United States Patent Application Publication US 2023/0272434 A1 - sequence listing, part 12

SEQ ID NO: 19681 - protein, 991 aa, Danaus plexippus
MKQSTWKVHDDNLADLLEHPGSKQDLNSRVETFQNTIYDYFNEQYPPRNHYARKNKDNSFKIKMRRKKRELIKNLRIAKALGDNHLSHQLARALRSILKLIQGISARTAKNRDNFDRAKQEVDFDKNPFEYSKIIFKKERGQLLLTNEQIYDHFKSTYEVPKSVRLYADPNDQKPGIPRFDFHGIPPTLDEISIQIKKKSSKSAPGPDGIPYIVFKKCPSVRKHLTYIYDKIWSRKQIPECFGKAIFVLIPKKDRVTDPKDTRPIALTNTISKIFFSVLQTRMTRFMLSNRYFRPNHQKGFLPGISGCLEHNTLLSESLKDARKSERQITVCWIDLENAFGSIQHELMLFALRWYNFPPLVTDMIASYYSKLKFSITTKEGHSKTFSYNVGLFQGCCLSPIVFNIVINILVDKLSSNEKKWGYRFKFNNKYTESILAFADDLAILTRNPKHCQVLLDEVDRFCEWTDGLRTKPCKCHCLCLSRRSTRYTSYDPGLSLGGQCISTVTENAPFKFLGRKIDNIGRTPSLEGIVDSFLNDLNKVDSQQISNVKKAWIYDNYLTSRLNWPFLVYDFNKTLLSKLDAGVIKMLKLWLGLALTADSSALFRDRNSFGMSLKRPSELYKHLRVSKRYILGKSQDDVVTSLPKDKDAPELESRLQFHKQFMIGAQSNRVGLGSSRKVQDTDILKSFIRQDENDKYKIHAISLEMQNEWLDIGDFCIPLALKWRTLIHDWSPALLKFYLNAFQMTLPDQSNLVRWGKGTEKTCYICGKAVGTARHLLVGCKVLLDSGQYSRRHDRVLEIIREAVSLSVARAQKEITTNERSVGFVREGTRAIKTNVKPYSILKAATDWTIMMDTYEKQYKIPEDICASASRPDIFMYSRILKRVVMIELTVPWETNIPKDHTIKVNKYYELTNELTRNRFVVDLYAVEVGARGITAKSLYNLLKDLGLSRTHINSFLERTSKAALVGSFQIWLGRERSLDSGGERLTRVS

SEQ ID NO: 19682 - protein, 928 aa, Danaus plexippus
MRRKKRELIKNLRIAKALGDNHLSHQLARALRSILKLIQGISAQTAKNRDNFDRAKQEVDFDKNPFEYSKTIFKKERGQLLLTNEQIYDHFKSTYEVPKSVRLYADPNDQKPGIPRFDFHGIPPTLDEISIQIKKKSSKSAPGPDGIPYIVFKKCPSVRKHLTYIYDKIWSRKQIPECFGKAIFVLIPKTDRVTDPKDTRPIALTNTISKIFFSVLQTRMTRFMLSNRYFRPNHQKGFLPGISGCLEHNTLLSESLKDARKSERQITVCWIDLENAFGSIQHELMLFALRWYNFPPLVTDMIASYYSKLKFSITTKEGHSKTFSYNVGLFQGCCLSPIVFNIVINILVDKLTSNEKKWGYRFKFNNKYTESILAFADDLAILTRNPKHCQVLLDEVDRFCEWTDGLRTKPSKCHCLCLGRRSTRYTSYDPGLSLGGQCISTVTENAPFKFLGRKIDNIGRTPSLEGIVDSFLNDLNKVDSQQISNVKKAWTYDNYLTSRLNWPFLVYDFNKTLLSKLDAGVIKMLKLWLGLALTADSSALFRDRNSFGMSLKRPSELYKHLRVSKRYILGKSQDDVVTSLPKDKDAPELESRLQFHKQFMIGAQSNRVGLGSSRKVQDTDIFKSFIRQDENDKYKIHAISLEMQNEWLDIGDFCIPLALKWRTLIHDWSPALLKFYLNAFQMTLPDQSNLVRWGKGTEKTCYICGKAVGTARHLLVGCKVLLDSGQYSRRHDRVLEIIREAVSLSVARAQKEITTNERSVGFVREGTRAIKTNVKPYSILKAATDWTIMMDTYEKQYKIPEDICASASRPDIFMYSRILKRVVMIELTVPWETNIPKDHTIKVNKYYELTNELTRNRFVVDLYAVEVGARGITAKSLYNLLKDLGLSRTHINSFLERTSKAALVGSFQIWLGRERSLDSGGERLTRVS

SEQ ID NO: 19683 - protein, 991 aa, Danaus plexippus
MKQSTWKVHDDNLADLLEHPGSKQDLNSRVETFQNTIYDYFNEQYPPRNHYARKNKDNSFKIKMRRKKRELIKNLRIAKALGDNHLSHQLARALRSILKLIQGISAQTAKNRDNFDRAKQEVDFDKNPFEYSKTIFKKERGQLLLTNEQIYDHFKSTYEVPKSVRLYADPNDQKPGIPRFDFHGIPPTLDEISIQIKKKSSKSAPGPDGIPYIVFKKCPSVRKHLTYIYDKIWSRKQIPECFGKAIFVLIPKKDRVTDPKDTRPIALTNTISKIFFSVLQTRMTRFMLSNRYFRPNHQKGFLPGISGCLEHNTLLSESLKDARKSERQITVCWIDLENAFGSIQHELMLFALRWYNFPPLVTDMIASYYSKLKFSITTKEGHSKTFSYNVGLFQGCCLSPIVFNIVINILVDKLTSNEKKWGYRFKFNNKYTESILAFADDLAILTRNPKHCQVLLDEVDRFCEWTDGLRTKPCKCHCLCLGRRSTRYTSYDPGLSLGGQCISTVTENAPFKFLGRKIDNIGRTPSLEGIVDSFLNDLNKVDSQQISNVKKAWIYDNYLTSRLNWPFLVYDFNKTLLSKLDAGVIKMLKLWLGLALTADSSALFRDRNSFGMSLKRPSELYKHLRVSKRYILGKSQDDVVTSLPKDKDAPELESRLQFHKQFMIGAQSNRVGLGSSRKVQDTDILKSFIRQDENDKYKIHAISLEMQNEWLDIGDFCIPLALKWRTLIHDWSPALLKFYLNAFQMTLPDQSNLVRWGKGTEKTCYICGKAVGTARHLLVGCKVLLDSGQYSRRHDRVLEIIREAVSLSVARAQKEITTNERSVGFVREGTRAIKTNVKPYSILKAAMDWTIMMDTYEKQYKIPEDICASASRPDIFMYSRILKRVVMIELTVPWETNIPKDHTIKVNKYYELTNELTRNRFVVDLYAVEVGARGITAKSLYNLLKDLGLSRTHINSFLERTSKAALVGSFQIWLGRERSLDSGGERLTRVS

SEQ ID NO: 19684 - protein, 991 aa, Danaus plexippus
MKQSTWKVHDDNLADLLEHPGSKQDLNSRVETFQNTIYDYFNEQYPPRNHYARKNKDNSFKIKMRRKKRELIKNLRIAKALGDNHLSHQLARALRSILKLIQGISAQTAKNRDNFDRAKQEVDFDKNPFEYSKTIFKKERGQLLLTNEQIYDHFKSTYEVPKSVRLYADPNDQKPGIPRFDFHGIPPTLDEISIQIKKKSSKSAPGPDGIPYIVFKKCPSVRKHLTYIYDKIWSRKQIPECFGKAIFVLIPKKDRVTDPKDTRPIALTNTISKIFFSVLQTRMTRFMLSNRYFRPNHQKGFLPGISGCLEHNTLLSESLKDARKSERQITVCWIDLENAFGSIQHELMLFALRWYNFPPLVTDMIASYYSKLKFSITTKEGHSKTFSYNVGLFQGCCLSPIVFNIVINILVDKLTSNEKKWGYRFKFNNKYTESILAFADDLAILTRNPKHCQVLLDEVDRFCEWTDGLRTKPCKCHCLCLGRRSTRYTSYDPGLSLGGQCISTVTENAPFKFLGRKIDNIGRTPSLEGIVDSFLNDLNKVDSQQISNVKKAWIYDNYLTSRLNWPFLVYDFNKTLLSKLDAGVIKMLKLWLGLALTADSSALFRDRNSFGMSLKRPSELYKHLRVSKRYILGKSQDDVVTSLPKDKDAPELESRLQFHKQFMIGSQSNRVGLGSSRKVQDTDILKSFIRQDENDKYKIHAISLEMQNEWLDIGDFCIPLALKWRTLIHDWSPALLKFYLNAFQMTLPDQSNLVRWGKGTEKTCYICGKAVGTARHLLVGCKVLLDSGQYSRRHDRVLEIIREAVSLSVARAQKEITTNERSVGFVREGTRAIKTNVKPYSILKAATDWTIMMDTYEKQYKIPEDICASASRPDIFMYSRILKRVVMIELTVPWETNIPKDHTIKVNKYYELTNELTRNRFVVDLYAVEVGARGITAKSLYNLLKDLGLSRTHINSFLERTSKAALVGSFQIWLGRERSLDSGGERLTSVS

SEQ ID NO: 19685 - protein, 991 aa, Danaus plexippus
MKQSTWKVHDDNLADLLEHPSSKQDLNSRVETFQNTIYDYFNEQYPPRNHYARKNKDNSFKIKMRRKKRELIKNLRIAKALGDNHLSHQLARALRSILKLIQGISAQTSKNRDNFDRAKQEVDFDKNPFEYSKTIFKKERGQLLLTNEQIYDHFKSTYEVPKSVRLYADPNDQKPGIPRFDFHGIPPTLDEISIQIKKKSSKSAPGPDGIPYIVFKKCPSVRKHLTYIYDKIWSRKQIPECFGKAIFVLIPKKDRVTDPKDTRPIALTNTISKIFFSVLQTRMTRFMLSNRYFRPNHQKGFLPGISGCLEHNTLLSESLKDARKSERQITVCWIDLENAFGSIQHELMLFALKWYNFPPLVTDMIASYYSKLKFSITTKEGHSKTFSYNVGLFQGCCLSPIVFNIVINILVDKLTSNEKKWGYRFKFNNKYTESILAFADDLAILTRNPKHCQVLLDEVDRFCEWTDGLRTKPCKCHCLCLGRRSTRYTSYDPGLSLGGQCISTVTENAPFKFLGRKIDNIGRTPSLEGIVDSFLNDLNKVDSQQISNVKKAWIYDNYLTSRLNWPFLVYDFSKTLLSKLDAGVIKMLKLWLGLALTADSSALFRDRNSFGMSLKRPSELYKHLRVSKRYILGKSQDDVVTSLPKDKDAPELESRLQFHKQFMIGAQSNRVGLGSSRKVQDTDILKSFIRQDENDKYKIHAISLEMQNEWIDIGDFCIPLALKWRTLIHDWSPALLKFYLNAFQMTLPDQSNLVRWGKGTEKTCYICGKAVGTARHLLVGCKVLLDSGQYSRRHDRVLEIIREAVSLSVARAQKEITTNERSVGFVREGTRAIKTNVKPYSILKAATDWTIMMDTYEKQYKIPEDICASASRPDIFMYSRILKRVVMIELTVPWETNIPKDHTIKVNKYYELTNELTRNRFVVDLYAVEVGARGITAKSLYNLLKDLGLSRTHINSFLERTSKAALVGSFQIWLGRERSLDSGGERLTRVS

SEQ ID NO: 19686 - protein, 991 aa, Danaus plexippus
MKQSTWKVHDDNLADLLEHPGSKQELNSRVETFQNTIYDYFNEQYPPRNHYARKNKDNSFKIKMRRKKRELIKNLRIAKALGDNHLSHQLARALRSILKLIQGISAQTAENRDNFDRAKQEVDFDKNPFEYSKTIFKKERGQLLLTNEQIYDHFKSTYEVPKSVRLYADPNEQKPGIPRFDFHGIPPTLDEISIQIKKKSSKSAPGPDGIPYIVFKKCPSVRKHLTYIYDKIWSRKQIPECFGKAIFVLIPKKDRVTDPKDTRPIALTNTISKIFFSVLQTRMTRFMLSNRYFRPNHQKGFLPGISGCLEHNTLLSESLKDARKSERQITVCWIDLENAFGSIQHELMLFALRWYNFPPLVTDMIASYYSKLKFSITTKEGHSKTFSYNVGLFQGCCLSPIVFNIVINILVDKLTSNEKKWGYRFKFNNKYTESILAFADDLAILTRNPKHCQVLLDEVDRFCEWTDGLRTKPSKCHCLCLGRRSTRYTSYDPGLSLGGQCISTVTENAPFKFLGRKIDNIGRTPSLEGIVDSFLNDLNKVDSQQISNVKKAWIYDNYLTSRLNWPFLVYDFNKTLLSKLDAGVIKMLKLWLGLALTADSSALFRDRNSFGMSLKRPSELYKHLRVSKRYILGKSQDDVVTSLPKDKDAPELESRLQFHKQFMIGAQSNRVGLGSSRKVQDTDILKSFIRQDENDKYKIHAISLEMQNEWLDIGDFCIPLALKWRTLIHDWSPALLKFYLNAFQMTLPDQSNLVRWGKGTEKTCYICGKAVGTARHLLVGCRVLLDSGQYSRRHDRVLEIIREAVSLSVARAQKGITTNERSVGFVREGTRAIKTNVKPYSILKAATDWTIMMDTYEKQYKIPEDICASASRPDIFMYSRILKRVVMIELTVPWETNIPKDHTIKVNKYYELTNELTRNRFVVDLYAVEVGARGITAKSLYNLLKDLGLSRTHINSFLERTSKAALVGSFQIWLGRERSLDSGGERLTRVS

SEQ ID NO: 19687 - protein, 991 aa, Danaus chrysippus
MKQSTWKVHDDNLAVLLEHPGSKQDFNSQVETFQNTVYDYFNEQYSPRNHYACKNKENSFKIKMRKKKRELIKNLRIAKALGDNHLSHQLARALRSILKLIQGISAQIAEYHGNFDRAKQEVDFDKNPFEYSKTIFKKERGQLLLTNDQIYDHFKSTYEVPKSVRLYTDPNEQKPEIPHIDFHGIPPTLDEISSHIKRKSSKSAPGPDGIPYIVFKKCPSVRKHLINIYGKIWSRKQIPECFGKAMFVLIPKKDQVTDPKDTRPIALTNTISKIFFSVLQTRMTRFMLSNKYIRPNYQKGFLPGISGCLEHNTLLSESLKDARKSERQITVCWIDLENAFGSIQHELMLFALRWYNFPPLVSDMIASYYSKLKFSIITKEGPSKSLSYNVGLFQGCCLSPIVFNIVINILVDKLISNEKKWGYRFKFNNKYTESILAFADDLAILTRHPKHCQVLLDEVDKFCEWTDGLRTKPSKCHCLCLGRRNTRYTSYDPGLSIGGQCVSTVTENAPFKFLGRKIDNIGRTPSLEGIVDSFLNDLNKVDSQQISNVKKAWIYDNYLTSRLNWPFLVYDFSKTLLSKLDAGVIKMLKLWLGLALTADSSALFRDRNSFGMNLKRPSELYKHLRVSKRHILGKSHDDVVTSLPKDNDAPELESRLQFHKQFMIGAQNNRVGLGSSRKVQDTDILKSFIRQDENDKYKIHAMSLEMQNEWLDIGDFCIPLALKWRTLIHDWSPALLKFYLNAFQMTLPDQSNLVRWGKGTEKTCYICGKAVGTAKHLLVGCKVLLDSGQYSRRHDRVLEIIREAVSLSVARAQREITTNERSIGFVREGTRAIKSNVKPYSILKAASDWTIMMDTYEKQYKIPEDICASASRPDIFLYSRILKRVVMIELTVPWETNIPKDHAIKVNKYYELTNELTRNRFVVDLYAVEVGARGITAKSLYNLLKDLGLSRTNINSFLERTSKAALVGSFQIWLGRERNLDSGGERITRVS

SEQ ID NO: 19688 - protein, 991 aa, Danaus plexippus
MKQSTWKVHDDNLADLLEHPGSKQDLNSRVETFQNTIYDYFNEQYPPRNHYARKNKDNSFKIKMRRKKRELIKNLRIAKALGDNHLSHQLARALRSILKLIQGISAQTAKNRDIFDRAKQEVDFDKNPFEYSKTIFKKERGQLLLTNEQIYDHFKSTYEVPKSVRLYADPNDQKPGIPRFDFHGIPPTLDEISIQIKKKSSKSAPGPDGIPYIVFKKCPSVRKHLINIYDKIWSRKQIPECFGKAIFVLIPKKDRVTDPKDTRPIALTNTISKIFFSVLQTRMTRFMLSNRYFRPNHQKGFLPGISGCLEHNTLLSESLKDARKSERQITVCWIDLENAFGSIQHELMLFALRWYNFPPLVTDMIASYYSKLKFSITTKEGHSKTFSYNVGLFQGCCLSPIVFNIVINILVDKLTSNEKKWGYRFKFNNKYTESILAFADDLAILTRNPKHCQVLLDEVDRFCEWTDGLRTKPSKCHCLCLGRRSTRYTSYDPGLSLGGQCISTVTENAPFKFLGRKIDNIGRTPFLEGIVESFLNDLNKVDSQQISNVKKAWIYDNYLTSRLNWPFLVYDFNKTLLSKLDAGVIKMLKLWLGLALTADSSALFRDRNSFGMSLKRPSELYKHLRVSKRYILGKSQDDVVTSLPKDKDAPELESRLQFHKQFMIGAQSNRVGLGSSRKVQDTDILKSFIRQDENDKYKIHAISLEMQNEWLDIGDFCIPLALKWRTLIHDWSPALLKFYLNAFQMTLPDQSNLVRWGKGTEKTCYICGKAVGTARHLLVGCKVLLDSGQYSRRHDRVLEIIREAVSLSVARAQKEITTNERSVGFVREGTRAIKTNVKPYSILKAATDWTIMMDTYEKQYKIPEDICASASRPDIFMYSRILKRVVMIELTVPWETNIPKDHTIKVNKYYELTNELTRNKFVVDLYAVEVGARGITAKSLYNLLKDLGLSRTHINSFLERISKAALVGSFQIWLGRERSLDSGGERLTRVS

SEQ ID NO: 19689 - protein, 928 aa, Danaus chrysippus
MRKKKRELIKNLRIAKALGDNHLSHQLARALRSILKLIQGISAQTAEYRDNFDRAKQEVDFDKNPFEYSKTIFKKERGQLLLTNDQIYDHFKSTYEVPKSLRRYRDPNDQKPEFPRIEFHGIPPTLEELSSQIKRKSSKSAPGPDGIPYIVFKKCASVRKHLLNIYGKIWSRKQIPECFGKAIFVLIPKKDRVTDPKDTRPIALTNTISKIFFSVLQTRMTRFMLSNNYFRPNHQKGFLPGISGCLEHNTLLSESLKDARKSERQITVCWIDLENAFGSIQHELMLFALRWYNFPPLVRDMIASYYSKLRFSIITKEGPSKSLSYNVGLFQGCCLSPIAFNIVINILVDKLICNEKKWGYRFKFNNKYTESILAFADDLAILTRNPKHCQVLLDEVDKFCEWTDGLRTKPSKCHCLCLGRRNTRYTSYDPGLSLGGQCISTVTENAPFKFLGRKIDNIGRTPSLEGIVDSFLNDLNKVDSQLISNVKKAWIYENYLTSRLNWPFLVYDFNKTLLSKLDAGVIKMLKLWLGLALTADSSALFRGSNSFGMSLKRPSELYKHLRVSKRYILGKSHDDIVTSLPKDEDAPELESRLQFHKQFMIGAQSNRAGLGSNRKVQDADILKSFIRQDENDKYKIHAMNLEMQNEWLDIGDFCIPLALKWRTLIYDWSPALLKFYLNAFQMTLPDQSNLVRWGKSTEKTCYICGKAVGTAKHLLVGCKVLLDSGQYSRRHDRVLEVIREAVSLSVARAQKEITTNERSVGFVREGTRATKSNVKPYSILKAASDWTIMMDTYEKQYKIPEDICASASRPDIFLFSRILKRVVMIELTVPWETNIPKDHTIKVNKYYELTNELTRNRFVVDLYAVEVGARGITAKSLYNLLKDLGLSRTHINAFLERTSKAALVGSFQIWLGRERSLDSGGERITRVS

SEQ ID NO: 19690 - protein, 709 aa, Danaus chrysippus
MTRFMLSNNYFRPNHQKGFLPGISGCLEHNTLLSESLKDARKSERQITVCWIDLENAFGSIQHELMLFALRWYNFPPLVRDMIASYYSKLRFSIITKEGPSKSLSYNVGLFQGCCLSPIAFNIVINILVDKLICNEKKWGYRFKFNNKYTESILAFADDLAILTRNPKHCQVLLDEVDKFCEWTDGLRTKPSKCHCLCLGRRNTRYTSYDPGLSLGGQCISTVTENAPFKFLGRKIDNIGRTPSLEGIVDSFLNDLNKVDSQLISNVKKAWIYENYLTSRLNWPFLVYDFNKTLLSKLDAGVIKMLKLWLGLALTADSSALFRGSNSFGMSLKRPSELYKHLRVSKRYILGKSHDDIVTSLPKDEDAPELESRLQFHKQFMIGAQSNRAGLGSNRKVQDADILKSFIRQDENDKYKIHAMNLEMQNEWLDIGDFCIPLALKWRTLIYDWSPALLKFYLNAFQMTLPDQSNLVRWGKSTEKTCYICGKAVGTAKHLLVGCKVLLDSGQYSRRHDRVLEVIREAVSLSVARAQKGITTNERSVGFVREGTRATKSNVKPYSILKAASDWTIMMDTYEKQYKIPEDICASASRPDIFLFSRILKRVVMIELTVPWETNIPKDHTIKVNKYYELTNELTRNRFVVDLYAVEVGARGITAKSLYNLLKDLGLSRTHINAFLERTSKAALVGSFQIWLGRERSLDSGGERITRVS

SEQ ID NO: 19691 - protein, 1151 aa, Danaus plexippus
MLRGFVSFKTTARRVGLTLERQLTLERQMALERQMTAGKTAEGNGLASPARDYEAKSPIKKNTPRTVREGGRKICPPVDVNGENGANTDLKCPTCGKNYKRRAWYIKHLKTHNGVEARQSSVSSSTFTADRVDPHVSHGEPLIGNYQESIDIRTRLSIPNMKQSTWKVHDDNLADLLEHPGSKQELNSRVETFQNTIYDYFNEQYPPRNHYARKNKDNSFKIKMRRKKRELIKNLRIAKALGDNHLSHQLARALRSILKLIQGISAQTAENRDNFDRAKQEVDFDKNPFEYSKTIFKKERGQLLLTNEQIYDHFKSTYEVPKSVRLYADPNEQKPGIPRFDFHGIPPTLDEISIQIKKKSSKSAPGPDGIPYIVFKKCPSVRKHLTYIYDKIWSRKQIPECFGKAIFVLIPKKDRVTDPKDTRPIALTNTISKIFFSVLQTRMTRFMLSNRYFRPNHQKGFLPGISGCLEHNTLLSESLKDARKSERQITVCWIDLENAFGSIQHELMLFALRWYNFPPLVTDMIASYYSKLQFSITTKEGHSKTFSYNVGLFQGCCLSPIVFNIVINILVDKLTSNEKKWGYRFKFNNKYTESILAFADDLAILTRNPKHCQVLLDEVDRFCEWTDGLRTKPSKCHCLCLGRRSTRYTSYDPGLSLGGQCISTVTENAPFKFLGRKIDNIGRTPSLEGIVDSFLNDLNKVDSQQISNVKKAWIYDNYLTSRLNWPFLVYDFNKTLLSKLDAGVIKMLKLWLGLALTADSSALFRDRNSFGMSLKRPSELYKHLRVSKRYILGKSQDDVVTSLPKDKDAPELESRLQFHKQFMIGAQSNRVGLGSSRKVQDTDILKSFIRQDENDKYKIHAISLEMQNEWLDIGDFCIPLALKWRTLIHDWSPALLKFYLNAFQMTLPDQSNLVRWGKGTEKTCYICGKAVGTARHLLVGCRVLLDSGQYSRRHDRVLEIIREAVSLSVARAQKGITTNERSVGFVREGIRTIKTNVKPYSILKAATDWTIMMDTCEKQYKIPEDICASASRPDIFMYSRILKRVVMIELTVPWETNIPKDHTIKVNKYYELTNELTRNRFVVDLYAVEVGARGITAKSLYNLLKDLGLSRTHINSFLERTSKAALVGSFQIWLGRERSLDSGGERLTRVS

SEQ ID NO: 19692 - protein, 1151 aa, Danaus plexippus
MLRGFVSFKTTARRVGLTLERQLTLERQMALERQMTAGKTAEGNGLASPARDYEAKSPIKKNTPRTVREGGRKICPSVDVNGENGANTDLKCPTCGKNYKRRAWYIKHLKTHNGVEARQSSVSSSTFTADRVDPHVSHGEPLIGNYQESIDIRTRLSIPNMKQSTWKVHDDNLADLLEHPGSKQELNSRVETFQNTIYDYFNEQYPPRNHYARKNKDNSFKIKMRRKKRELIKNLRIAKALGDNHLSHQLARALRSILKLIQGISAQTAENRDNFDRAKQEVDFDKNPFEYSKTIFKKERGQLLLTNEQIYDHFKSTYEVPKSVRLYADPNEQKPGIPRFDFHGIPPTLDEISIQIKKKSSKSAPGPDGIPYIVFKKCPSVRKHLTYIYDKIWSRKQIPECFGKAIFVLIPKKDRVTDPKDTRPIALTNTISKIFFSVLQTRMTRFMLSNRYFRPNHQKGFLPGISGCLEHNTLLSESLKDARKSERQITVCWIDLENAFGSIQHELMLFALRWYNFPPLVTDMIASYYSKLQFSITTKEGHSKTFSYNVGLFQGCCLSPIVFNIVINILVDKLTSNEKKWGYRFKFNNKYTESILAFADDLAILTRNPKHCQVLLDEVDRFCEWTDGLRTKPSKCHCLCLGRRSTRYTSYDPGLSLGGQCISTVTENAPFKFLGRKIDNIGRTPSLEGIVDSFLNDLNKVDSQQISNVKKAWIYDNYLTSRLNWPFLVYDFNKTLLSKLDAGVIKMLKLWLGLALTADSSALFRDRNSFGMSLKRPSELYKHLRVSKRYILGKSQDDVVTSLPKDKDAPELESRLQFHKQFMIGAQSNRVGLGSSRKVQDTDILKSFIRQDENDKYKIHAISLEMQNEWLDIGDFCIPLALKWRTLIHDWSPALLKFYLNAFQMTLPDQSNLVRWGKGTEKTCYICGKAVGTARHLLVGCRVLLDSGQYSRRHDRVLEIIREAVSLSVARAQKGITTNERSVGFVREGIRTIKTNVKPYSILKAATDWTIMMDTCEKQYKIPEDICASASRPDIFMYSRILKRVVMIELTVPWETNIPKDHTIKVNKYYELTNELTRNRFVVDLYAVEVGARGITAKSLYNLLKDLGLSRTHINSFLERTSKAALVGSFQIWLGRERSLDSGGERLTRVS

SEQ ID NO: 19693 - protein, 991 aa, Danaus chrysippus
MKQSTWKVHDDNLAVLLGHPGSKQELNSQVETFQNTVYDYFNEQYPPRNHYARKNKENSFKIKMRKKKRELIKNLRIAKALGDNHLSHQLARALRSILKLIQGISAQTAEYRGNFDRAKQEVDFDKNPFEYSKTIFKKERGQLLLTNDQIYDHFKSTYEVPKSVRLYTDPNEQKPEIPHIDFHGIPPTLDEISSHIKRKSSKSAPGPDGIPYIVFKKCPSVRKHLINIYGKIWSRKQIPECFGKAIFVLIPKKDRVTDPKDTRPIALTNTISKIFFSVLQTRMTRFMLSNKYFRPNHQKGFLPGISGCLEHNTLLSESLKDARKSERQITVCWIDLENAFGSIQHELMLFALRWYNFPPLVRDMIASYYSKLRFSIITKEGPSKSLSYNVGLFQGCCLSPITFNIVINILVDKLICNEKKWGYRFKFNNKYTESILAFADDLAILTRHPKHCQVLLDEVDKFCEWTDGLRTKPSKCHCLCLGRRNTRYTSYDPGLSIGGQCVSTVTEDAPFKFLGRKIDNIGRTPSLEGIVDSFLNDLNKVDSQQISNVKKAWIYDNYLTSRLNWPFLVYDFSKTLLSKLDAGVIKMLKLWLGLALTADSSALFRDRNSFGMNLKRPSELYKHLRVSKRHILGKSHDDVVTSLPKDNDAPELESRLQFHKQFMIGAQNNRVGLGSSRKVQDTDILKSFIRQDENDKYKIHAMSLEMQNEWLDIGDFCIPLALKWRTLIHDWSPALLKFYLNAFQMTLPDQSNLVRWGKGTEKTCYICGKAVGTAKHLLVGCKVLLDSGQYSRRHDRVLEIIREAVSLSVARAQREITTNERSIGFVREGTRAIKSNVKPYSILKAASDWTIMMDTYEKQYKIPEDICASASRPDIFLYSRILKRVVMIELTVPWETNIPKDHAIKVNKYYELTNELTRNRFVVDLYAVEVGARGITAKSLYNLLKDLGLSRTNINSFLERTSKAALVGSFQIWLGRERNLDSGGERITRVS

SEQ ID NO: 19694 - protein, 991 aa, Danaus plexippus
MKQSTWKVHDDNLADLLEHPGSKQDLNSRVETFQNTIYDYFNEQYPPRNHYARKNKDNSFKIKMRRKKRELIKNLRIAKALGDNHLSHQLARALRSILKLIQGISAQTAKNRENFDRAKQEVDFDKNPFEYSKTIFKKERGQLLLTNEQIYVHFKSTYEVPKSVRLYADPNDQKPGIPRFDFHGIPPTLDEISIQIKKKSSKSAPGPDGIPYIVFKKCPSVRKHLTYIYDKIWSRKQIPECFGKAIFVLIPKKDRVTDPKDTRPIALTNTISKIFFSVLQTRMTRFMLSNRYFRPNHQKGFLPGISGCLEHNTLLSESLKDARKSERQITVCWIDLENAFGSIQHELMLFALRWYNFPPLVTDMIASYYSKLKFSITTKEGHSKTFSYNVGLFQGCCLSPIVFNIVINILVDKLTSNEKKWGYRFKFNNKYTESILAFADDLAILTRNPKHCQVLLDEVDRFCEWTDGLRTKPCKCHCLCLGRRSTRYTSYDPGLSLGGQCISTVTENAPFKFLGRKIDNIGRTPSLEGIVDSFLNDLNKVDSQQISNVKKAWIYDNYLTSRLNWPFLVYDFNKTLLSKLDAGVIKMLKLWLGLALTADSSALFRDRNSFGMSLKRPSELYKHLRVSKRYILGKSQDDVVTSLPKDKDAPELESRLQFHKQFMIGAQSNRVGLGSSRKVQDTDILKSFIRQDENDKYKIHAISLEMQNEWLDIGDFCIPLALKWRTLIHDWSPALLKFYLNAFQMTLPDQSNLVRWGKGTEKTCYICGKAVGTARHLLVGCKVLLDSGQYSRRHDRVLEIIREAVSLSVARAQKEITTNERSVGFVREGTRAIKTNVKPYSILKAATDWTIMMDTYEKQYKIPEDICASASRPDIFMYSRILKRVVMIELTVPWETNIPKDHTIKVNKYYELTNELTRNRFVVDLYAVEVGARGITAKSLYNLLKDLGLSRTHINSFLERTSKAALVGSFQIWLGRERSLDSGGERLTRVS

SEQ ID NO: 19695 - protein, 991 aa, Danaus chrysippus
MKQSTWKVHDDNLAVLLEHPGSKQELNSQVETFQNTVYDYFNEQYPPRNHYARKNKENSFKIKMRKKKRELIKNLRIAKALGDNHLSHQLARALRSILKLIQGISAQTAEYRGNFDRAKQEVDFDKNPFEYSKTIFKKERGQLLLTNDQIYDHFKSTYEVPKSVRLYTDPNEQKPEIPHIDFHGIPPTLDEISSHIKRKSSKSAPGPDGIPYIVFKKCPSVRKHLINIYGKIWSRKQIPECFGKAIFVLIPKKDRVTDPKDTRPIALTNTISKIFFSVLQTRMTRFMLSNKYFRPNHQKGFLPGISGCLEHNTLLSESLKDARKSERQITVCWIDLENAFGSIQHELMLFALRWYNFPPLVRDMIASYYSKLRFSIITKEGPSKSLSYNVGLFQGCCLSPITFNIVINILVDKLICNEKKWGYRFKFNNKYTESILAFADDLAILTRHPKHCQVLLDEVDKFCEWTDGLRTKPSKCHCLCLGRRNTRYTSYDPGLSIGGQCVSTVTENAPFKFLGRKIDNIGRTPSLEGIVDSFLNDLNKVDSQQISNVKKAWIYDNYLTSRLNWPFLVYDFSKTLLSKLDAGVIKMLKLWLGLALTADSSALFRDRNSFGMNLKRPSELYKHLRVSKRHILGKSHDDVVTSLPKDNDAPELESRLQFHKQFMIGAQNNRVGLGSSRKVQDTDILKSFIRQDENDKYKIHAMSLEMQNEWLDMGDFCIPLALKWRTLIHDWSPALLKFYLNAFQMTLPDQSNLVRWGKGTEKTCYICGKAVGTAKHLLVGCKVLLDSGQYSRRHDRVLEIIREAVSLSVARAQREITTNERSIGFVREGTRAIKSNVKPYSILKAASDWTIMMDTYEKQYKIPEDICASASRPDIFLYSRILKRVVMIELTVPWETNIPKDHAIKVNKYYELTNELTRNRFVVDLYAVEVGARGITAKSLYNLLKDLGLSRTNINSFLERTSKAALVGSFQIWLGRERNLDSGGERITRVS

SEQ ID NO: 19696 - protein, 928 aa, Danaus chrysippus
MRKKKRELIKNLRIAKALGDNHLSHQLARALRSILKLIQGISAQTAEYRDNFDRAKQEVDFDKNPFEYSKTIFKKERGQLLLTNDQIYDHFKSTYEVPKSLRRYRDPNDQKPEFPRIEFHGIPPTLEELSSQIKRKSSKSAPGPDGIPYIVFKKCASVRKHLLNIYGKIWSRKQIPECFGKAIFVLIPKKDRVTDPKDTRPIALTNTISKIFFSVLQTRMTRFMLSNNYFRPNHQKGFLPGISGCLEHNTLLSESLKDARKSERQITVCWIDLENAFGSIQHELMLFALRWYNFPPLVRDMIASYYSKLRFSIITKEGPSKSLSYNVGLFQGCCLSPIAFNIVINILVDKLICNEKKWGYRFKFNNKYTESILAFADDLAILTRNPKHCQVLLDEVDKFCEWTDGLRTKPSKCHCLCLGRRNTRYTSYDPGLSLGGQCISTVTENAPFKFLGRKIDNIGRTPSLEGIVDSFLNDLNKVDSQLISNVKKAWIYENYLTSRLNWPFLVYDFNKTLLSKLDAGVIKMLKLWLGLALTADSSALFRGSNSFGMSLKRPSELYKHLRVSKRYILGKSHDDIVTSLPKDEDAPELESRLQFHKQFMIGAQSNRAGLGSNRKVQDADILKSFIRQDENDKYKIHAMNLEMQNEWLDIGDFCIPLALKWRTLIYDWSPALLKFYLNAFQMTLPDQSNLVRWGKSTEKTCYICGKAVGTAKHLLVGCKVLLDSGQYSRRHDRVLEVIREAVSLSVARAQKGITTNERSVGFVREGTRATKSNIKPYSILKAASDWTIMMDTYEKQYKIPEDICASASRPDIFLFSRILKRVVMIELTVPWETNIPKDHTIKVNKYYELTNELTRNRFVVDLYAVEVGARGITAKSLYNLLKDLGLSRTHINAFLERISKAALVGSFQIWLGRERSLDSGGERITRVS

SEQ ID NO: 19697 - protein, 991 aa, Danaus plexippus
MKQSTWKVHDDNLADLLEHPGSKQDMNSRVETFQNTIYDYFNEQYPPRNHYARKNKDNSFKIKMRRKKRELIKNLRIAKALGDNHLSHQLARALRSILKLIQGISTQTAKNRDNFDRAKQEVDFDKNPFEYSKTIFKKERGQLLLTNEQIYDHFKSTYEVPKSVRLYADPNDQKPGIPRFDFHGIPPTLDEISIQIKKKSSKSASGPDGIPYIVFKKCPSVRKHLTYIYDKIWSRKQIPECFGKAIFVLIPKKDRVTDPKDTRPIALTNTISKIFFSVLQTRMTRFMLSNRYFRPNHQKGFLPGISGCLEHNTLLSESLKDARKSERQITVCWIDLENAFGSIQHELMLFALRWYNFPPLVTDMIASYYSKLKFSITTKEGHSKTFSYNVGLFQGCCLSPIVFNIVINILVDKLTSNEKKWGYRFKFNNKYTESILAFADDLAILTRNPKHCQVLLDEVDRFCEWTDGLRTKPCKCHCLCLGRRSTRYTSYDPGLSLGGQCISTVTENAPFKFLGRKIDNIGRTPSLEGIVDSFLNDLNKVDSQQISNVKKAWIYDNYLTSRLNWPFLVYDFNKTLLSKLDAGVIKMLKLWLGLALTADSSALFRDRNSFGMSLKRPSELYKHLRVSKRYILGKSQDDVVTSLPKDKDAPELESRLQFHKQFMIGAQSNRVGLGSSRKVQDTDILKSFIRQDENDKYKIHAISLEMQNEWLDIGDFCIPLALKWRTLIHDWSPALLKFYLNAFQMTLPDQSNLVRWGKGTEKTCYICGKAVGTARHLLVGCKVLLDSGQYSRRHDRVLEIIREAVSLSVARAQKEITTNERSVGFVREGTRAIKTNVKPYSILKAATDWTIMMDTYEKQYKIPEDICASASRPDIFMYSRILKRVVMIELTVPWETNIPKDHTIKVNKYYELTNELTRNRFVVDLYAVEVGARGITAKSLYNLLKDLGLSRTHINSFLERTSKAALVGSFQIWLGRERSLDSGGERLTRVN

SEQ ID NO: 19698 - protein, 928 aa, Danaus chrysippus
MRKKKRELIKNLRIAKALGDNHLSHQLARALRSILKLIQGISAQTAENRDNFDRAKQEVDFDKNPFEYSKTIFKKERGQLLLTNDQIYDHFKSTYEVPKSLRRYRDPNDQKPEFPRIEFHGIPPTLEELSSQIKRKSSKSAPGPDGIPYIVFKKCPSVRKHLLNIYGKIWSGKQIPECFGKAIFVLIPKKDRVTDPKDTRPIALTNTISKIFFSVLQTRMTRFMLSNNYFRPNHQKGFLPGISGCLEHNTLLSESLKDARKSERQITVCWIDLENAFGSIQHELMLFALRWYNFPPLVRDMIASYYSKLRFSIITKEGPSKSLSYNVGLFQGCCLSPIAFNIVINILVDKLICNEKKWGYRFKFNNKYTESILAFADDLAILTRNPKHCQVLLDEVDKFCEWTDGLRTKPSKCHCLCLGRRNTRYTSYDPGLSLGGQCISTVTENAPFKFLGRKIDNIGRTPSLEGIVDSFLNDLNKVDSQLISNVKKAWIYENYLTSRLNWPFLVYDFNKTLLSKLDAGVIKMLKLWLGLALTADSSALFRGSNSFGMSLKRPSELYKHLRVSKRYILGKSHDDIVTSLPKDEDAPELESRLQFHKQFMIGAQSNRAGLGSNRKVQDADILKSFIRQDENDKYKIHAMNLEMQNEWLDIGDFCIPLALKWRTLIYDWSPALLKFYLNAFQMTLPDQSNLVRWGKSTEKTCYICGKAVGTAKHLLVGCKVLLDSGQYSRRHDRVLEVIREAVSLSVARAQKGITTNERSVGFVREGTRATKSNVKPYSILKAASDWTIMMDTYEKQYKIPEDICASASRPDIFLFSRILKRVVMIELTVPWETNIPKDHTIKVNKYYELTNELTRNRFVVDLYAVEVGARGITAKSLYNLLKDLGLSRTHINAFLERTSKAALVGSFQIWLGRERSLDSGGERITRVS

SEQ ID NO: 19699 - protein, 991 aa, Danaus plexippus
MKQSTWKVHDDNLADLLEHPGSKQDLNSRVETFQNTIYDYFNEQYPPRNHYARKNKDNSFKIKMRRKKRELIKNLRIAKALGDNHLSHQLARALRSILKLIQGISAQTAKNRDNFDRAKQEVDFDKNPFEYSKTIFKKERGQLLLTNEQIYDHFKSTYEVPKSVRLYADPNDQKPGIPRFDFHGIPPTLDEISIQIKKKSSKSAPGPDGIPYIVFKKCPSVRKHLTYIYDKIWSRKQIPECFGKAIFVLIPKKDRVTDPKDTRPIALTNTISKIFFSVLQTRMTRFMLSNRYFRPNHQKGFLPGISGCLEHNTLLSESLKDARKSERQITVCWIDLENAFGSIQHELMLFALRWYNFPPLVTDMIASYYSKLKFSITTKEGHSKTFSYNVGLFQGCCLSPIVFNIVINILVDKLTSNEKKWGYRFKFNNKYTESILAFADDLAILTRNPKHCQVLLDEVDRFCEWTDGLRTKPSKCHCLCLGRRSTRYTSYDPGLSLGGQCISTVTENAPFKFLGRKIDNIGRTPSLEGIVDSFLNDLNKVDSQQISNVKKAWIYDNYLTSRLNWPFLVYDFNKTLLSKLDAGVIKMLKLWLGLALTADSSALFRDRNSFGMSLKRPSELYKHLRVSKRYILGKSQDDVVTSLPKDKDAPELESRLQFHKQFMIGAQSNRVGLGSSRKVQDTDILKSFIRQDENDKYKIHAISLEMQNEWLDIGDFCIPLALKWRTLIHDWSPALLKFYLNAFQMTLPDQSNLVRWGKGTEKTCYICGKAVGTARHLLVGCKVLLDSGQYSRRHDRVLEIIREAASLSVARAQKEITTNERSVGFVREGTRAIKTNVKPYSILKAATDWTIMMDTYEKQYKIPEDICASASRPDIFMYSRILKRVVMIELTVPWETNIPKDHTIKVNKYYELTNELTRNRFVVDLYAVEVGARGITAKSLYNLLKDLGLSRTHINSFLERTSKAALVGSFQIWLGRERSLDGGGERLTRVS

SEQ ID NO: 19700 - protein, 928 aa, Danaus chrysippus
MRKKKRELIKNLRIAKALGDNHLSHQLARALRSILKLIQGISAQTAEYRDNFDRAKQEVDFDKNPFEYSKTIFKKERGQLLLTNDQIYDHFKSTYEVPKSLRRYRDPNDQKPEFPRIEFHGIPPTLEELSSQIKRKSSKSAPGPDGIPYIVFKKCASVRKHLLNIYGKIWSRKQIPECFGKAIFVLIPKKDRVTDPKDTRPIALTNTISKIFFSVLQTRMTRFMLSNNYFRPNHQKGFLPGISGCLEHNTLLSESLKDARKSERQITVCWIDLENAFGSIQHELMLFALRWYNFPPLVRDMIASYYSKLRFSIITKEGPSKSLSYNVGLFQGCCLSPIAFNIVINILVDKLICNEKKWGYRFKFNNKYTESILAFADDLAILTRNPKHCQVLLDEVDKFCEWTDGLRTKPSKCHCLCLGRRNTRYTSYDPGLSLGGQCISTVTENAPFKFLGRKIDNIGRTPSLEGIVDSFLNDLNKVDSQLISNVKKAWIYENYLTSRLNWPFLVYDFNKTLLSKLDAGVIKMLKLWLGLALTADSSALFRGSNSFGMSLKRPSELYKHLRVSKRYILGKSHDDIVTSLPKDEDAPELESRLQFHKQFMIGAQSNRAGLGSNRKVQDADILKSFIRQDENDKYKIHAMNLEMQNEWLDIGDFCIPLALKWRTLIYDWSPALLKFYLNAFQMTLPDQSNLVRWGKSTEKTCYICGKAVGTAKHLLVGCKVLLDSGQYSRRHDRVLEVIREAVSLSVARAQKGITTNERSVGFVREGTRATKSNVKPYSILKAASDWTIMMDTYEKQYKIPEDICASASRPDIFLFSRILKRVVMIELTVPWETNIPKDHTIKVNKYYELTNELTRNRFVVDLYAVEVGARGITAKSLYNLLKDLGLSRTHINAFLERISKAALVGSFQIWLGRERSLDSGGERITRVS

SEQ ID NO: 19701 - protein, 905 aa, Spilarctia lutea
MRRKKRELIKQLRKAKAMGDNHLSHQLSRALRSILKLIQGISLQITKNRDNFNRAKHEVDFDKNPFQYSKNIFNEQKGKLLLSNQQIYDHFKSTYQVPKRGRRYEDPNIQKPHYPLVNFESCPPTLEEVDHQIKKKTSKSAPGPDGIPYIVYKKCPSVRKHLLNVFCKIWSKKQIPTSFGKAVFVLIPKKDEVTHPKDTRPIALTNTISKIFFSVLQTKMTKFMISNRYFRPNHQKGFLPGISGCLEHNTLLAESLKDARMHERQITVCWIDLENAFGSVQHELMIFALKWYNFPTVVIDIITSYYSELQFAIAADKEHTETLHYNVGLFQGCCLSPIAFNIIINILIDKLISHEKKWGYRFKINNKYTESILAFADDLAILTRNPKQCQKLLIEVDEFCTWTDGLRAKPSKCHCLCLGRRNTKYTSYDPGLSIGGQCVTTIAEAVPFKFLGRRIDYKGRTPSLEVTVENFLSDLNKVDQQPLNNIKKVWIYDNYLTSRLTWPFLVYDISKSLLVKLDANVKKILKSWLGIAHSADPSTLFRDQNSFGMKLKKPSELYKHLRVTKMHVLGQSQGEIVSSLPKDKYVTELESRLQFHKQFMAGAQFNKVGLGFAKRKGDREIIKSFIQQDENDKYKVHAMNLEMQSEWLTIFCIPLALKWRTLLYDWSPALLKFYLNAFQMTLPDQSNLVRWGKASEKSCYTCGEAVGTARHLLVGCRVLLDRGYYSRRHDRVLEIIREAVSLSVARAQKGLTTNKREINFIKDGSTTKSKSKPFSILGTAPDWTILMDTYDKHYKIPEDVGVSSSRPDIFLFSRQIKHIILVELTVPWETNIPKDHRIKLNKYYDLTTELNKNGYVVNLYAVEVGARGIPAKSLYNLLKDLGLSRSAVSSILERVSKAALTDKFG

SEQ ID NO: 19702 - protein, 918 aa, Spilarctia lutea
MRRKKRELIKQLRKAKAMGDNHLSHQLSRALRSILKLIQGISLQITKNRDNFNRAKHEVDFDKNPFQYSKNIFKEQKGKLLLTNQQIYDHFKSTYQVPKRGRRYEDPNVQKPHYPLVDFESCPPTLEEVDHQIKKKTSKSAPGPDGIPYIVYKKCPSVRKHLLNVFYKIWSKKQIPTSFGKAIFVLIPKKDEVIHPKDTRPIALTNTISKIFFSVLQTKMTKFMISNRYFRPNHQKGFLPGISGCLEHNTLLAESLKDARMHERQITVCWIDLENAFGSVQHELMIFALKWYNFPTVVIDIITSYYSKLQFTIAANKEHTEPLHYNVGLFQGCCLSPIAFNIIINILIDKLISHEKKWGYRFKINNKYTESILAFADDLAILIRNPKQCQKLLIEVDEFCTWTDGLRAKPSKCHCLCLGRRNTKYTSYDPGLSIGGQCVTTIAEAVPFKFLGRKIDYKGRTPSLEITVENFLNDLNKVDQQPLNNIKKVWIYDNYLTSRLTWSFLVYDIGKSLLAKLDANVKKIFGIAHSADPSTLFRDQNNFGMKLKKPSELYKHLRVTKMHVLGQSQDEIVSSLPKDKYVTELESRLQFHKQFMAGAQFNRVGLGFAKKKGDREIIKSFIQQDENDIYKVHAMNLEMQSEWLTIGEFCIPLALKWRTLLYDWSPALLKFYLNAFQMTLPDQSNLVRWGKASEKSCYTCGEAVGTARHLLVGCRVLLDRGYYSRRHDRVLEIIREAVSLSVARAQKGLTTNKREINFIKDGSTTKSKSKPFSILGTAPDWTILMDTYDKHYKIPEDVGVSSSRPDIFLFSRQIKHIILVELTVPWETNIPKDHRIKLNKYYDLTTELNKNGYVVNLYAVEVGARGIPAKSLYNLLKDLGLSRSAVSSILERVSKAALTGSYQIWLGRAGNSSSEGER

SEQ ID NO: 19703 - protein, 919 aa, Ortholexis hollandi
MRRKKRELIKQLRKAKSMGDNHLSHQLSRALRSILKLIQGISLEITKNRDNFNRAKHEVDFDKNPFQYSKNIFKKQNGKLLLTKDQVYEHYKSTYEVPKRVTPYKDPNIQKPHNPLVEFPANPPTLEEIEKQVKKKSSNSAPGPDGIPYIVYKKCPTVRKHLFKIFGRIWLRKQIPVAFGEAIFVLIPKKEEVTHPKDTRPIALTNTISKIFFSTLQAKMTQFMIGNRYFRPNHQKGFLPGISGCLEHNTLLAESLKDARTYEKQITVCWIDLENAFGSVQHELMIFAMRWYNFPTVVIDIITSYYSKLKFVIAFSEKGHSDLLNYNVGLFQGCCLSPIAFNVVINILIDKIIVHEKKWGYRFKINNKHTESILAFADDLALLTRNPKQSQELLLKVDEFCTWTNGLRTKPDKCHCLSLGRRDTKYTSYNPGLVIGGQKISTIADTLPFKFLGRKIDHKGRTPSVETVVDSFLNDLNMVDQQPISSIKKAWIYDNFLTSRLNWPFLVYDIGKTLLTKLDANVVKTLKSWLGLAHSADPSTLFRDHNSFGMNLKRPSELYKRLRVTKSHILGKSHDDIVASLPKDKNATELESRLHFHKQFMIGAQSNRVGFGTGKKKDDLDLIKSFLKQDEIDNYRVHAISLETQNEWLTIGELCIPPALKWRSLLYDWSPTLLKFYLNAFQMTLPDQSNLVRWGKATEKTCKICKEAIGTARHLLAGCKVLLDRGYYSRRHDRVLEIIREAVSLSVARAKKGLTTNKRQINFVKEGSNKKPENKPYSILSLAPDWALMMDAYEKHYKIPEDLAVSTSRPDIFLVSRTLKRIVMIELTVPWETNIPKDHALKTNKYYDLANELTRNGYVVNLYAVEVGARGLPAKSLYNLFKDLGLPRTATNSLMNRVSKAALAGSYQIWVRREGEFGQ

SEQ ID NO: 19704 - protein, 984 aa, Danaus plexippus
MKQSTWKVHDDNLADLLEHPGSKQDLNSRVETFQNTIYDYFNEQYPPRNHYARKNKDNSFKIKMRRKKRELIKNLRIAKALGDNHLSHQLARALRSILKLIQGISAQTAKNRDIFDRAKQEVDFDKNPFEYSKTIFKKERGQLLLTNEQIYDHFKSTYEVPKSVRLYADPNDQKPGIPRFDFHGIPPTLDEISIQIKKKSSKSAPGPDGIPYIVFKKCPSVRKHLINIYDKIWSRKQIPECFGKAIFVLIPKKDRVTDPKDTRPIALTNTISKIFFSVLQTRMTRFMLSNRYFRPNHQKGFLPGISGCLEHNTLLSESLKDARKSERQITVCWIDLENAFGSIQHELMLFALRWYNFPPLVTDMIASYYSKLKFSITTKEGHSKTFSYNVGLFQGCCLSPIVFNIVINILVDKLTSNEKKWGYRFKFNNKYTESILAFADDLAILTRNPKHCQVLLDEVDRFCEWTDGLRTKPSKCHCLCLGRRSTRYTSYDPGLSLGGQCISTVTENAPFKFLGRKIDNIGRTPFLEGIVESFLNDLNKVDSQQISNVKKAWIYDNYLTSRLNWPFLVYDFNKTLLSKLDAGVIKMLKLWLGLALTADSSALFRDRNSFGMSLKRPSELYKHLRVSKRYILGKSQDDVKDVPELESRLQFHKQFMIGAQSNRVGLGSSRKVQDTDILKSFIRQDENDKYKIHAISLEMQNEWLDIGDFCIPLALKWRNLIHDWSPALLKFYLNAFQMTLPDQSNLVRWGKGTEKTCYICGKAVGTARHLLVGCKVLLDSGQYSRRHDRVLEIIREAVSLSVARAQKEITTNERSVGFVREGTRAIKTNVKPYSILKAATDWTIMMDTYEKQYKIPEDICASASRPDIFMYSRILKRVVMIELTVPWETNIPKDHTIKVNKYYELTNELTRNKFVVDLYAVEVGARGITAKSLYNLLKDLGLSRTHINSFLERISKAALVGSFQIWLGRERSLDSGGERLTRVS

SEQ ID NO: 19705 - protein, 1001 aa, Metaphire vulgaris
MSSQTVISQPSSQNTIKPLGICSHCKTARHVYKNSGLIHLHGPRNNICPGSNKPPLAIHSVTDDSYTSLQSVDDISLSSVIQTQKRIEITEISHPDFHHGVIKHIPKGARTTVALHLASLLDRICSGHNRTENWIALLNVGQEILGTFPRGGRRNNLTATIKKRVSACQEALTSAVTPPPTTTTRQRPKKSPLVSHQHWLRAVCSKLEDGNVRAALRILCSDDSLADADATSVEELRSKHPEPTDNDRIPSPDNDVEPLQVTASEILREIRSFPSGSSGGPDGIRPQHILELVNHSDTGPALLSSLTNFINLLLRGDCPEVVRPVLFGGNLLALRKKTGGLRPIAIGYYWRRLASKCANSFAISQVVDRLAPLQLGIGTPGGCEAAVHSARRFLDALGPDSVLVKLDFRNAFNSLSRSAMLTAVLSATPSIYPYCHAAYAEASTLKFGQYKLLSQSGAQQGDPLGPFLFCMTIQPLLESLSSELRIGFLDDLTIGGTIQEAARDVEILSDEASKIGLSLNVNKCEIISNTDSSLPGILSQFLPVPRNEACLLGAPLSTGIALSRCLEYRRDELALGISRIKDLPRHDALTLLRCSINSSRMLYTLRCAPCMDHPTLVQFDELLRTGLSQVLNLNLSAEHWLQATLPIRDGGLGIRRSTSLALPAFLASAAGTARLQTSILANTAIPEDAHLNAAMTRWSLECNEPDIVAGENLRRQSAWDRPLVERDILHLKSTITSDFHQARINAITAPHSGDWLFCLPITALGLRLDDEAVRIATGLRLGVDLCAPHLCCCGTPVTSDGSHGLSCRLGPGRIARHAALNDVIWRALSKAGIPSRKEPVGLTRSDGKRPDGQTLIPWENGKCLTWDVTVIDTLASSYRTVAAQSPGGPSEIAATRKIDKYVNALPNYAFVPLAFETLGPINVEGLTFIRRIGRLLSQLSGDHRETSFLLQLISVTIQRFNAVAFHGTFSEFQPKSASCGDGGDDDDFLGHGGVDNKVIVS

SEQ ID NO: 19706 - protein, 1013 aa, Metaphire vulgaris
MSSQTVISQSSSQNTIKPLGICSHCKTARHVYKNSGLIHLHGPRNNICPGSNKPPLAIHSVTDDSYTSLQSVNDTSLSSVLQSQKCIEVAEISHPDFHHGVIKHIPKGARTTVALHLASLLDRICSGHNRTEYWIALLNVGQEILGTFPRGGRRNNLTATIKKRVSACQEALTSAVTSPPTTITRQRPKKSPLVSHQNWLRAVCSKLEDGNVRAALRILCSDDSLVDADATSVEELRSKHPEPTDNDRIPSPDNDVQPLQVTASEILREIRSFPSGSSGGPDGIRPQHILELVHHSDTGPALLSSLTNFINLLLRGDCPEVVRPVLFGGNLLALRKKTGGLRPIAIGYYWRRLTSKCANSFAISQVVDRLAPLQLGIGTPGGCAAAVHSARRFLDALGPDSVLVKLDFTNAFNSLSRSAMLTAVLSATPSIYPYCHAAYAEASTLKFGQYKLLSQTGAQQGDPLGPFLFCMTIQPLLESLSSELRIGFLDDLTIGGTIQEAARDVEILSDEASKIGLSLNVNKCEIISNSIHSSLPGILSQFLPVPRNEACLLGAPLSTGIALSRCLEYRRDELALGISRIKDLPRHDALTLLRCSINSSRMLYTLRCAPCMDHPTLIQFDELLRTGLSQVLNLNLSAEHWLQATLPIRDGGLGIRRSTSLSLPAFLASAAGTARLQTSILANTAIPEDTHLNAAMTRWSLECSEADIVAGENLRRQSAWDRPLVERDILHLKSTITSDFDQARLNAITTPHSGDWLFCLPITALGLRLDDEAVRIATGLRLGVDLCAPHLCCCGMPVTSDGSHGLSCRLGPGRIARHAALNDVVWRALSKAGIPSRKEPVGLTRSDGKRPDGQTLIPWENGKCLTWDVTVIDTLASSYRAVAAQSPGGPSEIAATRKIDKYVNALPNYAFVPLAFETLGPINVDGLTFIRRIGRLLSQLSGDHRETSFLLQLISVTIQRFNAVAFHGMFSEFQSNSDLCGDGGSVLDDFLGHGDFDSSDNQTEDLCSVKSLE

SEQ ID NO: 19707 - protein, 1424 aa, Zerynthia polyxena
MTNIALANPNKMETRSMRKRLESLPGGDRRGTPGAGAGCHSMRTIGGAELSRRAPVDKDATAEDQELSERTAWRSEPNPNALTEQRSRTPSISSTESLFQTPPSSPQCFQRQSSSSSTSSIIPANVVQKANANKSAPAAGKKRARITWTLEMNTYIWRNYLIITKLQTKKEGILRHCTFCEKFSYIQITKQRLGDQCRAIVRNNLIPLNICKEIEDEVRTYLQYTPPGFAQTQNKQTRNTRMNWTDDLNELLIRCYYETTENEHNMTAYRQKLYRRFIEACPHLSNLTEQRVADQRRSIVKNKLIGEDRLQEIREEINQQNQNVHILNNRNTQHNTYANTQAIPLSSEHSSRPIINQTNSQPEFSTLEDNTQIQSHISLADVTQTYSEPIHTTHPVTTNNSTHYTLTPNQHNNFNIDENKITEEFQNALRKFKGTDPTCRPFIPKQKSSRKLARIVDYINSTIIPKHLSTELNFITVQTVIYSAAYTAAICNGSKIREGEYRIHRQNNIPAWQKRLQNKIELLRKHIARFIQYINGNRNLRLVRHIENLKNKYKTHSRYEEPNLADEQYLDTLKQKLNAASSRLRRYVACTLRKHQNKQFVNNEKQFYRKIATDTQHIQNPSIDQTTRTPNAEDFHQFWSTIWSNPKTHNQSAEWLNDPAQTTEHVPEMEFQHIPVAIFAKVLNKTHNWKCPGTDHIHNYWYKKFTNVHPLLYNHINNFIKIPNTIPEYLTEGITYMLPKDNDHQNPAKYRPITCLQTIYKILTSCLSELIYDHITKNNILAEEQKGCRKNSQGCKEQLVIDSVAMKHAFNSKTDIHTMYIDYQKAFDSVPHTWLIHVLKHYKIHPTIVSFLENTMQLWNTKLKLIGNTNIQTEMIPIRRGIFQGDALSPLWFCLVLNPLSVMLNSTPNGLPVKVGPKQTKLTHLMYMDDIKLYSNSKESLHQIANMTQTFSQDIQMEFGIDKCKTFSVVNGTVQQNNYIVSPGCNIESLADNELYKYLGFQQALEINQKIAKSELTKKYKHRLNIILRSRLHSKNLIKAINTFAIPVLTYSFGIIHWTQTDLKKLQTTINTKMTAHRKHHPKSCTQRLTLPRKEGGRGLIDIVNLHNKLISSLRKYFHTRAEHSELHSLTTLADRRFTPLNLHNTNVQRNEKIVDVKTKIEEWQQKSLHGRHWHDLQQSHVDKVASNAWLQRGELFPETEGFMLAIQDQVIETRNYQKHIMRLPNLPTDLCRRCHSSSETIQHITGACRSIVQTDYKHRHDQVAGIVHQYLAHKYNFIAQKVPYYKYSPQNVFENTEYRLYWDRTIITDKTIHFNRPDITLFHKPSKTVYLIDIAVCNTHNITKTFNEKISKYTDLAIELRTQWNALNVKTLPIIISSTGVIPISLQTGLNTLNVPKSIYTLLQKAVILNTCRIVRKFLSLSQ

SEQ ID NO: 19708 - protein, 1058 aa, Trichogramma evanescens
MNNYNNPDPAENTNVLPIESLTPPAFPEVPDVLRRRFKALLKNAATSQRLIKRPSGDVQAETIALVNELLREQLSKIYATTASDTSKRKNAKLAIYAAGILLAGEHKRKTAKRAPQNFEYTRRKIENVQRQLERTRKLREYVGDRRLPRKLQRCARELRKKKMKPTQAIKLGEERLQALTTKHEMQQAKAEALGVRIKFHDKPSMNTIAQRTDRPSPDPARTRTYYSSLFAADPARDRRRTPMFSRWLERMHEYASTENFDQQVSAERLTRTISRTINESPPWKACGLDRIPTALYKLLPAAREFLTDFIVQAINGQRKVQEADVRARVILIHKAGDTEDPANYRPIAVLNADYKILSAVLSVIVSEGLADWMVPKQQLARRNVWGTTHGLLWDKACTQAARLSRRKNYSAWYDFKKAYDSVSHTQLKGLVMALPAHNKVKNLIRAMIGKWAVIIQLKENQTEPIYIRRGIYQGDSMTPLLFILVTAFIVPAIEDDPDITRASQGRHRIAAFMDDIKTHAPTKKAAELIKRKLEDAAGEIGLTLNVEKCGVYVSGANDRLDEEAEEEIPFLPTIREGYKYLGLVQTERDSPMNLVRVIQNTEQKLTEVLTSQLAPNQKIQLINTTLMPAVVYVTGNLYPNESRATSLKNCHDIDKRIRKALVTHEMLGRTSTRAIVYLPTTLGGIGLKSVANETEIQYVRKYIYLLHHPDMRETKAEYERLAAAGWRNPITDAQQVLASYGMEAPAIGPNDSVNTHCKRVVDSLKSLQEKKTIESWTASSHYARLVTQAKHKIRFPALTDYRVETWTTTTARTAAEEQVHGLGANPARRRTCRLGCNTDETAYHVVSSCITQEYTARHDCVVHHLIRSILVGTHAPEHVHTQLRFGKAALIAEYSWGERQIRIRAGSKIQTEPELHHNRPDVVIIATNPDVVYVFEVAVSHLQNIELQERIKEVRYGKNSTLHITERNVDSVPRDLNISEALARMYKAPVKLAIMVVGALGEIMETPTLAATYRHLQQLGVTKNGTRKLERQCSRSVAMASAKIIMRRLRCGRRTATP

SEQ ID NO: 19709 - protein, 1211 aa, Arctia plantaginis
MAAEPIDKIVLNGSTVTILLPIKNEELARCPICMDARYRGATKIENFNRHVKQHHDGTTVVYACWSCGFTAPVGKRYPRKIVSQHCVECVPQIQQVRTGRVDVARRNNIRQELFPAPAPAPMADGGAAGQRRQRQLRRHNAGHDPVPERDRVASRRHAVSIIESSSSVTEPLDRHLGEHEATASLTLPRTGPGTGAAAPPAREDGSSGSTPFSAPTAEDTAMQQDNNSAAARVVDRLASPRRAESDDAARAPSTPARPRRVGHGDAAHIAAEDMERGATERSCTAGQRALAAEINNIHDLEQLEVVMPGVVAFLGRFARVGGVGGSPGRRTTAARTRAGPRDEGERIQAAKHIQRLYRNKRKTAVQRILAGDNNICNIDLRTVENHFHRLAAPRDGEDSWPPVLVQADPMPESDDRLCAPFTEGEITDCLKRRTDTSPGPDGIKYSDLRRADPESRVLTALFNAVWRIEAAPSTWGAANTILLHKKGDVDQINNWRPISLGNTVPKLFAAILSTRLKSWGTANGRFSSSQKGFLSFEGCFEHNFVLQEAIRDVRRRGGELVVAWLDLTSAFDSIPHSSIRRALEGHGLPLRVRHVIASLYSNMTTSVRVASGSTAPIHIESGVRQGCPLSPDIFNLTIEVLLRGLAGLNEGYVLEGRRYNSLFYADDGALLADSPEGMRRLLEAAESGARAVGIEFNPSKCATIHIVGGRGGGARPTVFNIQGTPMRALADEEAYEHLGIPTGYQVRQTPVGTVRDLLEDAKKIGDSLLAPWQKLDAVGTFLLPRLDFIMQGATMEKEYLTAVDRAVRRLAKEWLYLPQRASAELVYLPPSRGGGGLLPLADLHDVLTVAHSYRLLNARDHAVRSLTEALLKRTTSDRLGRSAGGDDIARYLSGDTGLPPSGAGTSFWARVRVASTNLKKKIGLRWQWHPDKETLGLKCGGDGEALLPEDSRRVANVLRRGVSAHYAGKLLAKRDQGKVFEVTKRSVASNHFLRTGRNIRFCDWRFIHRARLNVLPLNAAVRGIPGLDKSCRRCGDDLESLPHVLNHCGPHAAARQMRHNGVQNRLVRAARCVGNITINRSVTGAHGAAAVMRPDIVVRDETTRRINIVDVCVPFENRTEAFRAARREKLAKYAPLAEQLVEQGYTTRIETFMVGALGGWDAHNETVIKLLGISKRYAGMMRRLMISEVVRWSRDIYVEHVSGVRQYRVDQ

SEQ ID NO: 19710 - protein, 1219 aa, Ophraella communa
MVNRQNNNKASDERRDGRARRGNGVLDQDMTQATVNGRRTRNRRRIQEDTVPHEVLNEASTSGNTQSKKRTKWTIEMNEFLYRSYLSITHLEQLNTPFSTELHARMIGRFEELKNKTVQNIIDQRNQIEKRQVITNERRKEIQDEVRRELDMEVDEQRQDGNYLEAIEEERFEELRDSSMQIIIDHDDIRREVGMEVEEQNQDRNNLEVIEGENTTTPHEIKTLECYEKYELMYSGMNPAARPKLQRLKTNKNTSEILYTVNKIIERKVKEVNTPQELHDIVYNAATTTLYMHGQEIEETEKGKKKKDNRPKWQRRLESKIANLRKEIGKVTQGIKQTQPKPKLREEVNKIVEKHTNEENRSKIEILDLLKQKLMVMSSRLKRYKISNQRKKDNLTFTQNQKQFYRNLGKSNTQEDAHIQHPTNEETPTSEDIKTFWGGIWEEKAIHRENAKWIIEERRKQLNTAYMRDNIINKQDLQNAIRKTHNWKSPGCDGIQNYWYKKFTAIHGKLLNIFNDIIAKPDTMPTFFTQGITYLLPKTENPTNDPGKYRPITCLPTIYKLLTSMIATKIYRHLEKNQILTEEQKGCRKGSQGCKEQILIDSCITMGCKKQKKELHIAYIDYQKAFDSVPHTWLQEVLDIYKIDEHITALLKYSMSQWKTELRLATRNKNEKYGNINIQRGIFQGDALSALWFCLAINPLSTQLRNTPGYNIPPSNEKITHLIYMDDLKLYAKKKEHLDQALNITCKFTEDIKMKLGVDKCKINSMKRGKWTAEENFWTGTDNIEHMQEEETYKYLGVMQTTTMQTKKIKQQTKDKMLKRVKQIMKSKLNGPNTTKAINTYAIPVCTYTFGTVKWTNTELEELNTAVRTTFTKFRNKHPKSSVIRFHIARKSGGRGVIDIKNQHHKQIKSLQTYMHEKATSSNLHAAIVQADVNITPLNLANNALNDEQHVTTETEKVEKWMSMAMHGKYINTIRQPGINEEATHMWLKSNIFPETEGFMMAIQDKVIATRNYLKHIIRDPSVVDDRCRLCQKVTESIEHIISGCSVLAPTEYMRRHNNIANIIHQNIKKQIDPEHQAQPYYIYKPNAVEETEKHKLYWDRTIQTDHTVPHNRPDITIIDKETNVTTLIDVTVPLADNIEKKYDDKVTKYLPLAQEIKKMWKQEKVTIIPLVIGATGEIPKSLLTNLNQLNMPESTLKLIQKSVILDTCSIVRKIITQN

SEQ ID NO: 19711 - protein, 1241 aa, Pachyrhynchus sulphureomaculatus
MYCKDNMQLRRLEKPRQRLKWTDEMNRTVMRCYYTATKLETITSGYRQQLHRLFLTEYPHLQLLVSEQRVVDQKRVITKNNRLTPLELQTIKDTVAVELSTDQPNNRNNKADSEPASHTQPPSRTQQYPPPRRSITQNNIASTAQHHITDNNMNHSPPSTTSTQHHPESPLIQTLKAKMESHLARWSSTDPTTRNPIPRLIFRQSTQPILNTLNKHIIPQYITDSSTIEEIHTIIYAAAVTTLTQNNQKLPQRQGNPNRTKPKFKWQIRIENKINNIRRDLGHLTQFISGNASKRVTQGANKIKSKSPNRTLPEILDTLKQKLSVYAARLRRCKESNERKDTNNLFRRSEKQFYRKTMYNKQIAVTEPPNKQELTDYWKSIWSEPKQHNNNTPWIKAEEDKHKHVREQENTTFNTQEITETIKHTHNWKCPGIDNIQNFWYKQFTTTHEALTHQINKAILQPHTFPTFLTQGITYVKPKSSDTTNPSNYRPITCLPTLYKIITATISKKIEQHLTDNNILTEEQKGCRKNSRGCKEQLIIDSVIMGQTRKEHRNLHIGYIDYKKAFDSIPHCWLIGALEIYKINQHLRQFLAQIMKTWKTKIRLETQTERIQTEELYIRRGIFQGDSLSALWFCLCLNPLSNILNRTEHGFNIRHQKENQHKIDHLLYMDDIKLYTATQTQLKELLKITEIFTLDVNMEFGISKCKVLHINKGQWKHHHETETINNETLDNMFDKETYKYLGFQQSTKLNHTHIKTELRTEFKNRLTKLLQTKLNSKNLTKAINTFAIPILTYSFGIIKWSQTDIENIHILIRSQFTKYRKLHPNACKERLTIERKAGGRGIIDIRSLHTKQIQTLRKFFHSKQTSLRTATVKADKNYTPLDLARADHSADTHSHTQLQQEKMKTWSEKTLHGKHRYHIEQDHVNKKQSYTWLRDGQLFPETEGFLLAIQDKVILTRNYQKHIIKDPTIAEDRCRKCHQQKETIEHITSGCKILAGTEYTARHDSAAKVVHQALATTYRLIENTDPYYKYTPTSVLENEDYKLYWDIGIHTDKTVSANRPDITFQCKKGKVTYLIDIAVPNDTNIQAKYTEKISKYTDLATEIKRLWRQEKVIIVPLIISATGLTPITFTPHLVQLGLNTDIHRNIQKSVILKTCNIVRSYGMVIAFVLTWFWPVSQTWNHIDQMVERRTFCNNNNIITHIIHIKRNISLPLCLSVSVLIIREPLIRFTCFFFLILKLNIY

SEQ ID NO: 19712 - protein, 1279 aa, Pachyrhynchus sulphureomaculatus
MEHVHHKLLEVIGIIRQQFSSNEINAVGKCSLFGINFDILIIIIIMNDNNEHAMRCCNEITPEKEITDKRITRRLDPPPPIPSATDVDAGQIQPPKPGQTAYVLQGQHATTKAGKPRQRLKWTDEMNRTVMRCYYTATKLETVTSGYRLELHRLFLTEYPHLQLLVTEQRVIDQKRVITKNNRLTPFELQTIKDTVAAELNTDQVAAELNTDQPNNRNSRADTEPISHTQPPSRKQQDPPPSRSITPNNISKQIASTTRHHITDDKMNDSPPSTTSTQHHSESPLIQTLKAEMQSHLARWSGTDPTTRNPIPRLIFKQSTQIILNTINKHIIPQYITDLSTIEDIHTIIYAAAITTITQNNQKLPQRQRDPNNRKPKFKWQIRLENKINNIRRDLGHLTQFMNGNASKRVTQGVDKIKSKSLKRTLPEIVDTLKQKLSVYAARLRRYKESNKRKDTNNLFRRSEKQFYRKTMYNEQTVVTKTPNKQEIADYWKTVWSEPKLHNNNTPWIKAEEDKHKRVTEQENSTLTTEEITETIKHTHNWKCPGIDNIQNFWYKQFTTTHEALTHQINKAILQPHTLPTFLTQGITYVKPKSSDTTNPSNYRPITCFPTLYKIITAAISKKIEQHLTDNNIITEEQKGCRKNSRGCKEQLIIDSVIMGQTRKEYRNLHIGYIDYKKAFDSIPHSWLIRALEIYKINQHLRQFLAQIMKTWKTKIRLETPTERIETEELYIRRGIFQGDSLSALWFCLCLNPLSNILNRTEHGFNIRHQKVNQHKINHLLYMDDIKLYAATQTQLKELLKITEIFTLDVNMEFGISKCKVLHINKGQWKCHHETETINNETLDNMFDKETYKYLGFQQSTKLNHTHIKTELRTEFKNRLTKLLQTKLNSKNLTKAINTFAIPVLTYSFGIIKWSQTDIENIHILIRSQFTKYRKLHPNACKERLTIERKAGGRGIIDIRSLHTKQIQTLRKFFHSKQTSLHTATVKADKNYTPLDLARADHSADTHSHTQLQQEKMKTWPEKTLHGKHRYHIEQDHVNKKQSYTWLQDGQLFPETEGFLLAIQDKVILTRNYQKHIIKDPTIAEDRCRKCHQQKETIEHITSGCKILAGTEYTARHDSAAKVVHQALATTYKLIENTDPYYKYTPTSILKNEDYKLYWDIGIHTDKTVSANSSDITFQCKKEKVTYLIDIAVPNDTNIQTKYTEKISKYTDLATEIKRLWKQEKVIIVPLIISATGLTPTTFTPHLVQLGLNTNIHKNIQKSVILKTCNIVRSFLNTQ

SEQ ID NO: 19713 - protein, 987 aa, Pachyrhynchus sulphureomaculatus
MQSYLARWSGTDPTTRNPIPRLIFKQSTQMILNTINKHIIPQYIRDLSTIEDIHTIIYAAAITTITQNNQKLPQRQRDPNSRKPKFKWQIRIENKINNIRRDLGHLTQFMNGNASKRVTQGVDKIKSKSLNRTLLEIVDTLKQKLSVYAARLRRYKESNERKDTNNLFRRSEKQFYRKTMYNEQRVVTEPPNKQELADYWKTVWSEPKLHNNNTSWIKAEEDKHKRVTEQENSTLTTEEITETIKHTHNWKCPGIDNIQNFWYKQFTTTHEALTHQINKAILQPHTFPTFLTEGITYVKPKSSDTTNPSNYRPITCLPTLYKIIIAAISKKIEQHLTDNNIITEEQKGCRKNSRRCKEQLIIDSVIMGQTRKEHRNLHIGYIDYKKAFDSIPHSWLIRALEIYKINQHLRQFLAQIMKTWKTKIRLETQTERIQTEELYIRRGIFQGDSLSALWFCLCLNPLSNILNRTEHGFNIRHQKGNQHKINHLLYMDDIKLYAATKAQLKELLKITEIFTLDVNMEFGISKCKVLHINKGQWKYHHETETINNETLDNMFDKETYKYLGFQQSTKLNHTHIKTELRTEFKNRLTKLLQTKLNSKYLTKAINTFAIPILTYSFGIIKWSQTDLENIHILIRSQFTKYRKLHPNACKERLTIERKAGGRGIIDIRSLHTKQIQALRKFFYTKQTSLHTATVKADKNYTPLDLSRVDHPADTHSHIQLQQEKMKTWSEKTLHGKHRYHIEQDHVNKKQSYTWLRDGQLLPETEGFLLAIQDKVILTRNYQKHIIKDPTITEDRCRKCHQQKETIEHITSGCKILAGTEYTARHDSAAKVVHQALATTYKLIENTDPYYKYTPTSVLENKDYKLYWDISIHTDKTVSANRPDITFQCKKEKVTYLIDIAVPNDTNIQTKYTEKISKYTDLATEIKRLWKQEKVIIVPLIISATGLTPTTFTPHLVQLGLNTNIHKNIQKSVILKTCNIVRSFLNTQ

SEQ ID NO: 19714 - protein, 809 aa, Pachyrhynchus sulphureomaculatus
MYNKQIAVTEPPNEQELTDYWKSIWSEPKLHNNNTPWIKAEEDKHKHVTEQENTTFNTQEITETIKHTHNWKCPGIDNIQNFWYKQFTTTHEALTHQINKAILQPHTFPTFLTQGITYVKPKSSDTTNPSNYRPITCLPTLYKIITATISKKIEQHLTDNNILTEEQKGCRKNSRGSKEQLIIDSVIMGQTRKEHRNLHIGYIDYKKAFDSIPHSWLIRALEIYKINQHLRQFLAQIMKTWKTKIRLETQTERIQTEELYIRRGMFQGDSLSALWFCLCLNPLSNILNRIEHGFNIRHQKVNQHKINHLLYMDDIKLYAATQTQLKELLKITEIFTLDVNMEFGISKCKVLHINKGQWKCHHETETINNETLDNMFDKKTYKYLGFQQSTKLNHTHIKTELRTEFKNRLTKLLQTKLNSKNLTKAINTFAIPILTYSFGIIKWSQTDIENIHILIRSQFTKYRKLHPNACKERLTIERKAGGRGIIDIRSLHTKQIQALRKFFHSKQTSLHTATVKADKNYTPLDLARADHSADTHSHTQLQQEKMKTWSEKTLHGKHRYHIEQDHVNKKQSYTWLQDGQLFPETEGFLLAIQDKVILTRNYQKHIIKDPTIAEDRCRKCHQQKETIEHITSGCRILAGTEYTARHDSAAKVVHQALATTYKLIENTDPYYKYTPTSILENEDYKLYWDISIHTDKTVSANRPDITFQCKKGKVTYLIDIAVPNDTNIQTKYTEKISKYTDLATEIKRLWKQEKVIIVPLIISATGLTPITFTPHLVQLGLNTNIHKNIQKSVILKTCNIVRSFLNTQW

SEQ ID NO: 19715 - protein, 1210 aa, Pachyrhynchus sulphureomaculatus
MKTQNLTKKSLRRESLAAWTHQHQSQAQTDVDTGQTQPPKPGQGPYVLQGQHATTKAGKPRQRLKWTDEMNRTVMHCYYTATKLETITSGYRPELHRLFLTEYPHLQLLVSEQRVIDQKRVITKNNRLTPLELQTIKDTVAVELNADQPSNRNNKADSEPASHTQPPSRTQQDPSPRRSITQNNIASTAQHHITDNNMNHSPPSTTSTQHHPESPLIQTLTAKMESHLAKWSGTDPTTRNPIPRLIFRQSTQPILNTLNKHIIPQYITDLSTIEDIHTIIYAAAITTLTQNNQKLPQRQGNPNRTKPKFKWQIRIENKINNIRRDLGHLTQFISGNASKRVTQGANKIKSKSPNRTLPEILDTLKQKLSVYAARLRRYKESNERKDTNNLFRRSEKQFYRKTMYNKQIAVTEPPNKQELTDYWKSIWSEPKLHNNNTPWIKAEEDKHKHVTEQENTTLNTQEITETIKHTHNWKCPGIDNIQNFWYKQFTTTHEALTHQINKAILQPHTFPTFLTQGITYVKPKSSDTTNPSNYRPITCLPTLYKIITATISKKIEQHLTDNNILTEEQKGCRKNSRGCKEQPIIDSVIMGQTRKEHRNLHIGYIDYKKAFDSIPHSWLIRALEIYKINQHLRQFLAQIMKTWKTKIRLETPTERIETEELYIRRGIFQGDSLSALWFCLCLNPLSNILNRTEHGFNIRHQKVNQHKINHLLYMDDIKLYAATQTQLKELLKTTEIFTLDVNMEFGISKCKVLHINKGQWKCHHETETINNETLDNMFDKETYKYLGFQQSTKLNPTHIKTELRTEFKNRLTKLLQTKLNSKNLTKAINTFAIPVLTYSFGIIKWSQTDIENIHILIRSQFTKYRKLHPNACKERLTIERKAGGRGIIDIRSLHTKQIQTLRKFFHSKQTSLHTATVKADKNYTPLDLARADHSADTHSHTQLQQEKMKTWSEKTLHGKHRYHIEQDHVNKKQSYTWLRDGQLFPETEGFLLAIQDKVILTRNYQKYIIKDPTIAEDRCRKCHQQKETIEHITSGCKILAGTEYTARHDSAAKVVHQALATTYRLIENTDPYYKYTPTSILENEDYKLYWDIGIHTDKTVSANRPDITFQCKKGKVTYLIDIAVPNDTNIQAKYTEKISKYTDLATEIKRLWRQEKVIIVPLIISATGLTPITFTPHLVQLGLNTDIHRNIQKSVILKTCNIVRLFLNTE

SEQ ID NO: 19716 - protein, 908 aa, Pachyrhynchus sulphureomaculatus
MIIIRKSTQPILNTLNKHIIPQYITDLSTIEDIHTIIYAAAITTLTQNNQKLPQRQGNPNRTKPKFKWQIRIENKINNIRRDLGHLTQFISGNASKRVTQGANKNKSKSPDRTLPEILDTLKQKLSVYAARLRRYKESNERKDTNNLFRRSEKQFYRKTMYNRQIAVTEPPNKQELTDYWKSIWSEPKLHNNNTPWIKAEEDKHKHVTEQENTTFNTQEITETIKHTHNWKCPGIDNIQNFWYKQFTTTHEALTHQINKAILQPHTFPTFLTQGITYVKPKSSDTTNPSNYRPITCLPTLYKIITATISKKIEQHLTDNNILTEEQKGCRKNSRGCKEQLIIDSVIMGQTRKEHRNLHIGYIDYKKAFDSIPHSWLIRALEIYKINQHLRQFLAQIMKTWKTKIRLETQTERIQTEELYIRRGIFQGDSFSALWFCLCLNPLSNILNRTEHGFNIRHQKVNQHKINHLLYMDDIKLYAATQTQLKELLKITDIFTLDVNMEFGISKCKVLHINKGQWKYHHKTETINNKTLDNMFDKETYKYLGFQQSTKLNHTHIKTELRTEFKNRLTKLLQTKLNSKNLTKAINTFAIPILTYSFGIIKWSQTDIENIHILIRSQFTKYRKLHPNACKERLTIERKAGGRGIIDIRSLHTKQIQTLREFFHSKQTSLHTATVKADKNYTPLDLARADHAVDTYSHTQLQQEKMKTWSEKTLHGKHRYHIEQDHVNKKQSYTWLRDGQLFPETEGFLLAIQDKVILTRNYQKHIIKDPTIAEDRCRKCHQQKETIEHITSGCKILAGTEYTARHDSAAKVVHQALATTYRLIENTDPYYKYTPTSILKNEDYKLYWDIGIHTDKTVSANRPDITFQCKNGKVTYLIDIAVPNDTNIQAKYTEKISKYTELATEIKRL

SEQ ID NO: 19717 - protein, 809 aa, Pachyrhynchus sulphureomaculatus
MYNKQIAVTEPPNKQELTDYWKSIWSEPKQHNNNTPWIKAEEDKHKHVTEQENTTFNTQEITETIKHTHNWKCPGIDNIQNFWYKQFTTTHEALTHQINKAILQPHTFPTFLTQGITYVKPKSSDTTNPSNYRPITCLPTLYKIITATVSKKIEQHLTDNNILTEEQKGCRKNSRGCKEQLIIDSVIMGQTRKEHRNLHIGYIDYKKAFDSIPHSWLIRALEIYKINQHLRQFLAQIMKTWKTKIRLETQTERIQTEELYIRRGIFQGDSLSALWFCLCLNPLSNILNRTEHGFNIRHQKENQHKINHLLYMDDIKLYAATQTQLKELLKITEIFTLDVNMEFGISKCKVLHINKGQWKHHHETETINNETLDNMFDKETYKYLGFQQSTKLNHTHIKTELRTEFKNRLTKLLQTKLNSKNLTKAINTFAIPILTYSFGIIKWSQTDIENIHILIRSQFTKYRKLHPNACKERLTIERKAGGRGIIDIRSLHTKQIQTLRKFFHSKQTSLHTATVKADKNYTPLDLARADHSADTHSHTQLQQEKMKTWSEKTLHGKHRYHIEQDHVNKKQSYTWLRDGQLFPETEGFLLAIQDKVILTRNYQKHIIKDPTIAEDRCRKCHQQKETIEHITSGCKILAGTEYTARHDSAAKVVHQALATTYRLIENTDPYYKYTPTSILENEDYKLYWDIGIHTDKTVSANRPDITFQCKKGKVTYLIDIAVPNDTNIQAKYTEKISKYTDLATEIKRLWRQEKVIIVPLIISATGLTPITFTPHLVQLGLNTDIHRNIQKSVILKTCNIVRSFLNTEW

SEQ ID NO: 19718 - protein, 1480 aa, Pachyrhynchus sulphureomaculatus
MLNNNNYNNENGRVLRRRTPVVQTATATPQQQLQTNQTTASVETTPDSFTRSDIVGDGNCLFRAVSLYLYGHQNHHEKLREVALRYLQQNWSELHTFSLIEVDDIKDFNNYYNYMRKNGTYGTSLEILALSETQNSNFHIFSKQRRTRHTKITFTDRPTIISTGKYNKTIYLLLTGNPMSGHFELLTPQNTENIPENNRPIKEASGERRNGRGRRGKWQLDQNDEDQATENGPAKSVVLATKPTPTKAGKSQQRMSCTTGINEHAMRCCNENTKPDKEITKKRITRRLDPPTSIPSATDVDTGQTQPPKSGQGPYVLQGQHATTKAGKPRQRLKWTDEMNRTVMRCYYTATKLETITSGYRQQLHRLFLTEYPHLQLLVSEQRVVDQKRVITKNNRLTPLELQTIKDTVAVELNTDQPNNRNNKADSEPASHTQPPSRTQQYPPPRRSITQNNIASTAQHHITDNNMNHSPPSTTSTQHHPESPLIQTLKARMESHLARWSGTDPTTRNPIPRLIFRQSTQPILNTLNKHIIPQYITDSSTIEDIHTIIYAAAITTLTQNNQKLPQRQGNPNRTKPKFKWQIRIENKINNIRRDLGHFTQFISGNASKRVTQGANKIKSKSPNRTLPEILDTLKQKLSVYAARLRRYKESNERKDTNNLFRRSEKQFYRKTMYNKQIAVTEPPNKQELTDYWKSIWSEPKQHNNNTPWIKAEEDKHKHVTEQENTTFNTQEITETIKHTHNWKCPGIDNIQNFWYKQFTTTHEALAHQINKAILQPHTFPTFLTQGITYVKPKSSDTTNPSNYRPITCLPTLYKIITATISKKIEQHLTDNNILTEEQKGCRKNSRGWKEQLIIDSVIMGQTRKEHRNLHIGYIDYKKAFDSIPHSWLIRALEIYKINQHLRQFLAQIMKTWKTKIRLETQTERIQTEELYIRRGIFQGDSLSALWFCLCLNPLSNILNRTEHGFNIRHQKENQHKINHLLYMDDIKLYAATQTQLKELLKITEIFTLDVNMEFGISKCKVLHINKGQWKHHHETETINNETLDNMFDKETYKYLGFQQSTKLNHTHIKTELRTEFKNRLTKLLQTKLNSKNLTKAINTFAIPILTYSFGIIKWSQTDIENIHILIRSQFTKYRKLHPNACKERLTIERKAGGRGIIDIRSLHTKQIQALRKFFHSKQTSLHTATVKADKNYTPLDLARADHSADTHSHTQLQQEKMKTWSEKTLHGKHRYHIEQDHVNKKQSYTWLQDGQLFPETEGFLLAIQDKVILTRNYQKHIIKDPTIAEDRCRKCHQQKETIEHITSGCRILAGTEYTARHDSAAKVVHQALATTYKLIENTDPYYKYTPTSILENEDYKLYWDISIHTDKTVSANRPDITFQCKKEKVTYLIDIAVPNDTNIQTKYTGKISKYTDLATEIKRLWKQEKVIIVPLIISATGLTPTTFTPHLVQLGLNTNIHKNIQKSVILKTCNIVRSFLNTQW

SEQ ID NO: 19719 - protein, 1301 aa, Pachyrhynchus sulphureomaculatus
MSGHFELLTPQNIENIPDNSRPIKEASGERRNGRGRRGKWQLDQNDEDQATENGPAQSVVPASKPTPTKAGKSQQRMSCTTGINEHAMRCCNEITPDKEITDKRITRRLDPPPPIPSATDVNAGQIQPPKPGQTAYVLQGQHATTKAGKPRQRLKWTDEMNKTVMRCYYTATKLETVTSGYRLELHRLFLTEYPHLQLLVTEQRVIDQKRVITKNNRLTPFELQTIKDTVAAELNADQVAAELNTDQLNNRNDRADTEPISHTQPPSRKQQDPPPSRSITQNNISEQIASTTRHSTTSIQHHPESPLIQTLKAQMQSHLARWSGTDPTTRNPIPRLIFKQSTQMILNTINKHIIPQYITDLSTIEDIHTIIYAAAITTITQNNQKLPQRQRDPNSRKPKFKWQIRIENKINNIRRDLGHLTQFMNGNASKRVTQGVDKIKSKSLNRTLPEIVDTLKQKLSVYAARLRRYKESNERKDTNNLFRRSEKQFYRKTMYNEQTVVTEPPNKQELADYWKTIWSEPKLHNNNTSWIKAEEDKHKRVTEQENSTLTTEEITETIKHTHNWKCPGIDNIQNFWYKQFTTTHEALTYQINKTILQPHTFPTFLTQGITYVKPKSSDTTNPSNYRPITCLPTLYKIITAAISKKIEQHLTDNNIITEEQKGCRKNSRGCKEQLIIDSVIMGQTRKEHRNLHIGYIDYKKAFDSIPHSWLIRALEIYKINQHLRQFLAQIMKTWKTKIRLETQTERIQTEELYIRRGIFQGDSLSALWFCLCLNPLSNILNRTEHGFNIRHQKGNQHKINHLLYMDDIKLYAATKTQLKELLKITEIFTLDVNMEFGISKCKVLHINKGQWKYHHETETINNETLDNMFDKETYKYLGFQQSTKLNHTHIKTELRTEFKNRLTKLLQTKLNSKYLTKAINTFAIPILTYSFGIIKWSQTDLENIHILIRSQFTKYRKLHPNACKERLTIERKAGGRGIIDIRSLHTKQIQALRKFFHTKQTSLHTATVKADKNYTPLDLSRVDHPADTHSHIQLQQEKMKTWSEKTLHGKHRYHIEQDHVNKKQSYTWLRDGQLFPETEGFLIAIQDKVILTRNYQKHIIKDPTITDDRCRKCHQQKETIEHITSGCKILAGTEYTARHDSAAKVVHQALATTYKLIENTDPYYKYTPTSVLENKDYKLYWDISIHTDKTVSANRPDITFQCKKKKVTYLIDIAVPNDTNIQTKYTEKISKYTDLATEIKRLWKQEKVIIVPLIISATGLTPTTFTPHLVQLGLNTNIHKNIQKSVILKTCNIVRSFLNTQ

SEQ ID NO: 19720 - protein, 1003 aa, Pachyrhynchus sulphureomaculatus
MNHSPPSTTSTQHHPESPLIQTLKAKMESHLARWSGTDPTTRNPIPRLIFRQSTQPILNTLNKHIIPQYITDSSTIEDIHTIIYAAAITTLTQNNQKLPQRQGNPNRTKPKFKWQIRIENKINNIRRDLGHLTQFISGNASKRVTQGANKIKSKSPNRTLPEILDTLKQKLSVYAARLRRYKESNERKDTNNLFRRSEKQFYRKTMYNKQIAVTEPPNKQELTDYWKSIWSEPKQHNNNTPWIKAEEDKHKHVTEQENTTFNTQEITETIKHTHNWKCPGIDNIQNFWYKQFTTTHEALTHQINKAILQPHTFPTFLTQGITYVKPKSSDTTNPSNYRPITCLPTLYKIITATISKKIEQHLTDNNILTEEQKGCRKNSRGCKEQLIIDSVIMGQTRKEHRNLHIGYIDYKKAFDSIPHSWLIRALEIYKINQHLRQFLAQIMKTWKTKIRLETQTERIQTEELYIRRGIFQGDSLSALWFCLCLNPLSNILNRTEHGFNIRHQKENQHKINHLLYIDDIKLYAATQTQLKELLKITEIFTLDVNMEFGISKCKVLHINKGQWKHHHETETINNETLDNMFDKETYKYLGFQQSTKLNHTHIKTELRTEFKNRLTKLLQTKLNSKNLTKAINTFAIPILTYSFGIIKWSQTDIENIHILIRSQFTKYRKLHPNACKERLTIERKAGGRGIIDIRSLHTKQIQTLRKFFHSKQTSLHTATVKADKNYTPLDLARADHSADTHSHTQLQQEKMKTWSEKTLHGKHRYHIEQDHVNKKQSYTWLRDGQLFPETEGFLLAIQDKVILTRNYQKHIIKDPTIAEDRCRKCHQQKETIEHITSGCKILAGTEYTARHDSAAKVVHQALATTYRLIENTDPYYKYTPTSILENEDYKLYWDIGIHTDKTVSANRPDITFQCKKGKVTYLIDIAVPNDTNIQAKYTEKISKYTDLATEIKRLWRQEKSHHCPPHYISHRPYTNNIHTTFSAIGTQHGHTQKHSEVSDFENM

SEQ ID NO: 19721 - protein, 1492 aa, Pachyrhynchus sulphureomaculatus
MSKNNNYSNDNGRVLRRRTPVVQTAIAAPQQQQPQTTQTTASAETTPDSFTRSDIVGDGNCLFRAVSLHLYGHQNHHEKLREVALRYLQQNWSELHTFSLIEVDDIKDFNNYYNYMRKNGTYGTSLEILALSETQNSNFHIFSKQRRTRHTKITFTDRPTIISTGKYNKTIYLLLTGNTMSGHFELLTPQNIENIPDNSRPIKEASGERRNGRGRRGKWQLDQNDEDRATENGPAKSVVPASKPTPTQAGKSQQRMSCTTGINEHAMRCCNEITPEKEITDKRITRRLDPPPPIPSATDVDAGQIQPPKPGQTAYVLQGQHATTKAGKPRQRLKWTDEMNRTVMRCYATATKLETVTSGYRLELHRLFLTEYPHLQLLVTEQRVIHQKRVITKNNRLTPFELQTIKDTVAAELNTDQVAAELNTDQPNNRNSRADTEPISHTQPPSRKQQDPPPSRSITQHNISKQIASTTRHHITDDKMNDSPPSTTSTQHHSESPLIQTLKAEMQSHLARWSGTDPTTRNPIPRLIFKQSTQIILNTINRHIIPQYITDLSTIEDIHTIIYAAAITTITQNNQRLPQRQRDPNSRKPKFKWQIRLENKINNIRRDLGHLTQFMNGNASKRVTQGVDKIKSKSLKRTLPEIVDTLKQKLSVYAARLRRYKESNERKDTNNLFRRSEKQFYRKTMYNEQTVVTKPPNKQEIADYWKTVWSEPKLHNNNTPCIKAEEDKHKRVTEQENSTLTTEEITETIKHTHNWKCPGIDNIQNFWYKQFTTTHEALTHQINKAILQPHTLPTFLTQGITYVKPKSSDTTNPSNYRPITCLPTLYKIITAAISKKIEQHLTDNNIITEEQKGCRKNSRGCKEQLIIDSVIMGQTRKEHRNIHIGYIDYKKAFDSIPHSWLIRALEIYKINQQLRQFLAQIMKTWKTKIRLETPTERIETEELYIRRGIFQGDSLSALWFCLCLNPLSNILNRTEHGFNIRHQKVNQHKINHLLYMDDIKLYAATQTQLKELLKTTEIFTLDVNMEFGISKCKVLHINKGQWKCHHETETINNETLDNMFDKETYKYLGFQQSTKLNHTHIKTELRTEFKNRLTKLLQTKLNSKNLTKAINTLAIPVLTYSFGIIKWSQTDIENIRILIRSQFTKYRKLHPNACKERLTIERKAGGRGIIDIRSLHTKQIQTLRKFFHSKQTSLHTATVKADKNYTPLDLARADHSADTHSHTQLQQEKMKTWSEKTLHGKHRYRIEQDHVNKKQSYTWLQDGQLFPETEGFLLAIQDKVILTRNYQKHIIKDPTIAEDRCRKCHQQKETIEHITSGCKILAGTEYTARHDSAAKVVHQALATTYKLIENTDPYYKYTPTSILENEDYKLYWDIGIHTDKTVSANRPDITFQCKKEKVTYLIDIAVPNDTNIQTKYTEKISKYTDLATEIKRLWKQEKVIIVPLIISATGLTPTTFTPHLVQLGLNTNIHKNIQKSVILKTCNIVRSFLNTQ

SEQ ID NO: 19722 - protein, 1480 aa, Pachyrhynchus sulphureomaculatus
MSKNNNYSNDNGRVLRRRTPIVQTAIATPQQQQPQTTQTTASAETTPDSFTRSDIVGDGNCLFRAVSLHLYGHQNHHEKLREVALRYLQQNWSELHTFSLIEVDDIKDFNNYYNYMRKNGTYGTSLEILALSETQNTNFHIFSKQRRTRHTKITFTDRPTIISTGKYNKTIYLLLTGNPMSGHFELLTPQNIENIPDNSRPIKEASGERRNGRGRRGKWQLDQNDEDQATENGPAQSVVPASKPTPTRAGKSQQRMSCTTGINEHAMRGCNEITPDKEITDKRITRRLDPPPPIPSAIDVNAGQIQPPKPGQTAYVLQGQHATTKAGKPRQRLKWTDEMNKTVMRCYYTATKLETVTSGYRLELHRLFLTEYPHLQLLVTEQRVIDQKRVITKNNRLTSFELQTIKDTVAAELNADQVAAELNTDQLNNRNSRADTEPISHTQPPSRKQQDPPPSKSITQNNISEQIASTTRHSTTSIQHHPESPLIQTLKAEMQSHLARWSGTDPTTRNPIPRLIFKQSTQMILNTINKHIIPQYITDLSTIEDIHTIIYAAAITTITQNNQKLPQRQRDPNSRKPKFKWQIRIENKINNIRRDLGHLTQFMNGNASKRVTQGVDKIKSKSLNRTLPEIVDTLKQKLSVYAARLRRYKESNERKDTNNLFRRSEKQFYRKTMYNEQTVVTEPPNKQELADYWKTVWSEPKLHNNNTSWIKAEEDKHKRVTEQENSTLTTEEITETIKHTHNWKCPGIDNIQNFWYKQFTTTHEALTHQINKAILQPHTFPTFLTQGITYVKPKSSDTTNPSNYRPITCLPTLYKIITAAISKKIEQHLTDNNIITEEQKGCRKNSRGCKEQLIIDSVIMGQTRKEHRNLHIGYIDYKKAFDSIPHSWLIRALEIYKINQHLRQFLAQIMKTWKTKIRLETQTERIQTEELYIRRGIFQGDSLSALWFCLCLNPLSNILNRTKHGFNIRHQKGNQHKINHLLYMDDIKLYAATKTQLKELLKITEIFTLDVNMEFGISKCKVLHINKGQWKYHHETETINNETLDNMFDKETYKYLGFQQSTKLNHTHIKTELRTEFKNRLTKLLQTKLNSKYLTKAINTFAIPILTYSFGIIKWSQTDLENIHILIRSQFTKYRKLHPNACKERLTIERKAGGRGIIDIRSLHTKQIQALRKFFHTKQTSLHTATVKADKNYTPLDLSRVDHPADTHSHIQLQQEKMKTWSEKTLHGKHRYHIEQDHVNKKQSYTWLRDGQLFPETEGFLLAIQDKVILTRNYQKHIIKDPTITEDRCRKCHQQKETIEHITSGCKILAGTEYTARHDSAAKVVHQALATTYKLIENTDPYYKYTPTSVLENKDYKLYWDISIHTDKTVSANRPDITFQCKKEKVTYLIDIAVPNDTNIQTKYTEKISKYTDLATEIKRLWKQEKVIIVPLIISATGLTPTTFTPHLVQLGLNTNIHKNIQKSVILKTCNIVRSFLNTQ

SEQ ID NO: 19723 - protein, 809 aa, Pachyrhynchus sulphureomaculatus
MYNKQIAVTEPPNKQELTDYWKSIWSEPKQHNNNTPWIKAEEDKHKHVTEQENTTFNTQEITETIKHTHNWKCPGIDNIQNFWYKQFTTTHEALTHQINKAILQPHTFPTFLTQGITYVKPKSSDTTNPSNYRPITCLPTLYKIITATISKKIEQHLTDNNILTEEQKGCRKNSRGCKEQLIIDSVIMGQTRKEHRNLHIGYIDYKKAFDSIPHSWLIRALEIYKINQHLRQFLAQIMKTWKTKIRLETQTERIQTEELYIRRGIFQGDSLSALWFCLCLNPLSNILNRTEHGFNIRHRKENQHKINHLLYMDDIKLYAATQTQLKELLKITEIFTLDVNMEFGISKCKVLHINKGQWKHHHETETINNETLDNMFDKETYKYLGFQQSTKLNHTHIKTELRTEFKNRLTKLLQTKLNSKNLTKAINTFAIPILTYSFGIIKWSQTDIENIHILIRSQFTKYRKLHPNACKERLTIERKAGGRGIIDIRSLHTKQIQALRKFFHSKQTSLHTATVKADKNYTPLDLARADHSADTHSHTQLQQEKMKTWSEKTLHGKYRYHIEQDHVNKKQSYTWLRDGQLFPETEGFLLAIQDKVILTRNYQKHIIKDPTIAKDRCRKCHQQKETIEHVTSGCKILAGTEYTARHDSAAKVVHQALATTYRLIENTDPYYKYTPTSILENEDYKLYWDIGIHTDKTVSANRPDITFQCKKGKVTYLIDIAVPNDTNIQAKYTEKISKYTDLATEIKRLWRQEKVIIVPLIISATGLTPITFTPHLVQLGLNTDIHRNIQKSVILKTCNIVRSFLNTEW

SEQ ID NO: 19724 - protein, 1480 aa, Pachyrhynchus sulphureomaculatus
MLNNNNYNNENGRVLRRRTPVVQTATATPQQQLQTNQTTASLETTPDSFTRSDIVGDGNCLFRAVSLYLYGHQNHHEKLREVALRYLQQNWSELHTFSLIEVDDIKDFNNYYNYMRKNGTYGTSLEILALSETQNSNFHIFSKQRRTRHTKITFTDRPTIISTGKYNKTIYLLLTGNPMSGHFELLTPQNTENIPENHRPIKEASGERRNGRGRRGKWQLDQNDEDQVTENGPAKSVVLATKPTPTKAGKSQQRMSCTTGINEHAMRCCNENTKPDKEITEKRITRRLDPPTSIPSATDVDTGQTQPPNPGQGPYVLQGQHATTKAGKPRQRLKWTDEMNRTVMRCYYTATKLETITSGYRQQLHRLFLTEYPHLQLLVSEQRVVDQKRVITKNNRLTPLELQTIKDTVAVELNTDQPNNRNNKADSEPASHTQPPSRTQQYPPPRRSITQNNIASTAPHHITDNNMNHSPPSTTSTQHHPESPLIQTLKAKMESHLARWSGTDPTTRNPIPRLIFRQSTQPILNTLNKHIIPQYITDSSTIEDIHTIIYAAAITTLTQNNQKLPQRQGNPNRTKPKFKWQIRIENKINNIRRDLGHLTQFISGNASKRVTQGANKIKSKSPNRTLPEILDTLKQKLSVYAARLRRYKESNERKDTNNLFRRSEKQFYRKTMYNRQIAVTEPPNKQELTDYWKSIWSEPKLHNNNTPWIKAEEDKHKHVTEQENTTFNTQEITETIKHTHNWKCPGIDNIQNFWYKQFTTTHEALTHQINKAILQPHTFPTFLTQGITYVKPKSSDTTNSSNYRPITCLPTLYKIITATISKKIEQHLTDNNILTEEQKGCRKNSRGCKEQLIIDSVIMGQTRKEHRNLHIGYIDYKKAFDSIPHSWLIRALEIYKIDQHLRQFLAQIMKTWKTKIRLETQTERIQTEELYIRRGIFQGDSLSALWFCLCLNPLSNILNRTEHGFNIRHQKENQHKINHLLYMDDIKLYAATQTQLKELLKITEIFTLDVNMEFGISKCKVLHINKSQWKHHHETETINNETLDNMFDKETYKYLGFQQSTKLNHTHIKTELRTEFKNRLTKLLQTKLNSKNLTKAINTFAIPILAYSFGIIKWSQTDIENIHILIRSQFTKYRKLHPNACKERLTIERKAGGRGIIDIRSLHTKQIQTLRKFFHSKQTSLHTATVKADKNYTPLDLARADHSADAHSHTQLQQEKMKTWSEKTLHGKHRYHIEQDHVNKKQSYTWLLDGQLFPETEGFLLAIQDKVILTRNYQKHIIKDPTIAEDRCRKCHQQKETIEHITSGCKILAGTEYTARHDSAAKIVHQALATTYKLIENTDPYYKYTPTSIFENKDYKLYWDISIHTDKTVSANRPDITFQCKKEKVTYLIDIAVPNDTNIQTKYTEKISKYTDLATEIKRLWKKEKVIIVPLIISATGLTPTTFTPHLVQLGLNTNIHKNIQKSVILKTCNIVRSFLNTQW

SEQ ID NO: 19725 - protein, 1225 aa, Pachyrhynchus sulphureomaculatus
MSCTTGINEHAMRCCNEITPDKEITDKRITRRLDPPPPIPSAINVNAGQIQPPKPGQTAYVLQGQHATTKAGKPRQRLKWTDEMNKTVMRCYYTATKLETVTSGYRLELHRLFLTEYPHLQLLVTEQRVIDQKRVITKNNRLTSFELQTIKDTVAAELNADQVAAELNTDQLHNRNSRADTEPISHTQPPSRKQQDPLPSRSITQNNISEQIASITRHSTTSIQHHPESPLIQTLKAEMQSHLARWSGTDPTTRNPIPRLIFKQNTQMILNTINKHIIPQYITDLSTIEDIHTIIYAPAITTITQNNQKLPQRQRDPNSRKPKFKWQIRIENKINNIRRDLGHLTQFMNGNASKRVTQGVDKIKSKSLNRTLPEIVDTLKQKLSVYAARLRRYKESNERKDTNNLFRRSEKQFYRKTMYNEHTVVTEPPNKQELADYWKTVWSEPKLHNNNTSWIKAEEDKHKRVTEQENSTLTTEEITETIKHTHNWKCPGIDNIQNFWYKQFTTTHEALTHQINKAILQPHTFPIFLTQGITYVKPKSSDTTNPSNYRPITCLPTLYKIITAAISKKIELHLTDNNIITEEQKGCRKNSRGCKEQLIIDSVIMGQTRKEHRNLHIGYIDYKKAFDSIPHSWLIRALEIYKINQHLRQFLAQIMKTWKTKIRLETQTERIQTEELYIRRGIFQGDSLSALWFCLCLNPLSNILNRTEHGFNIRHQKGNQHKINHLLYMDDIKLYAATKTQLKELLKITEIFTLDVNMEFGISKCKVLHINKGQWKYHHETETFNNETLDNMFDKETYKYLGFQQSTKLNHTHIKTELRTEFKNRLTKLLQTKLNSKYLTKAINTFAIPILTYSFGIIKWSQTDLENIHILIRSQFTKYRKLHPNACKERLTIERKAGGRGIIDIISLHTKQIQALRKFFHTKQTSLHTATVKADKNYTPLDLSRVDHPADTHSHIQLQQEKMKTWSEKTLHGKHRYHIEQDHVNKKQSYTWLRDGQLFPETEGFLLAIQDKVILTRNYQKHIIKDPTITEDRCRKCHQQKETIEHITSGCKILAGTEYTARHDSAAKVVHQALATTYKLIENTDPYYKYTPTSVLENKDYKLYWDISIHTDKTVSANRPDITFQCKKEKVTYLIDIAVPNDTNIQTKYTEKISKYTDLATEIKRIWKQEKVIIVPLIISATGLTPTTFTPHLVQLGLNTNIHKNIQKSVILKTCNIVRSFLNTQ

SEQ ID NO: 19726 - protein, 1141 aa, Pachyrhynchus sulphureomaculatus
MNRTVMRCYYTATKLETITSGYRQQLHRLFLTEYPHLQLLVSEQRVVDQKRVITKNNRLTPLELQTIKDTVAVELNTDQPNNRNNKADSEPASHTQPPSRTQQYPPPRRSITQKNIASTAQHHITDNNMNHSPPSTTSTQHHPESPLIQTLKAKMESHLARWSGTDPTTRNPIPRLIFRQSTQPILNTLNKHIIPQYITDSSTIEDIHTIIYAAAITTLTQNNQKLPQRQGNPNRTKPKFKWQIRIENKINNIRRDLGHLTQFISGNASKRVTQGANKIKSKSPNRTLPEILDTLKQKLSVYAARLRRYKETNERKDTNNLFRRSEKQFYRKTMYNKQIAVTEPPNKQELTDYWKSIWSEPKLHNNNTPWIKAEEDKHKHVTEQENTTFNTQEITETIKHTHNWKSPGIDNIQNFWYKQFTTTHEALTHQINKAILQPHTFPTFLTQGITYVKPKSSDTTNPSNYRPITCLPTLYKIITATISKKIEQHLTDNNILTEEQKGCSRKNSRGCKEQLIIDSVIMGQTRKEHRNLHIGYIDYKKAFDSIPHSWLIRALEIYKINQHLRQFLAQIMKTWKTKIRLETQTERIQTEELYIRRGIFQGDSLSALWFCLCLNPLSNILNRTEHGFNIRHQKVNQHKINHLLYMDDIKLYAATQTQLKELLKITEIFTLDVSMEFGISKCKVLHTNKGQWKCHHETETINNETLDNMFDKETYKYLGFQQSTKLNHTHIKTELRTEFKNRLTKLLQTKLNSKNLTKAINTFAIPILTYSFGIIKWSQTDIENIHILIRSQFTKYRKLHPNACKERLTIERKAGGRGIIDIRSLHTKQIQALRKFFHSKQTSLHTATVKADKNYTPLDLSRADHSADTHSHTQLQQEKMKTWSEKTLHGKHRYHIEQDHINKKQSYTWLQDGQLFPETEDFLLAIQDKVILTRNYQKHIIKDPTIAEDRCRKCHQQKETIEHITSGCRILAGTEYTARHDSAAKVVHQALATTYKLIENTDPYYKYTPTSILENEDYKLYWDISIHTDKTVSANRPDITFQCKKGKVTYLIDIAVPNDTNIQTKYTEKISKYTDLATEIKRLWKQEKVIIVPLIISATGLTPIIFTPHLVQLGLNTNIHKNIQKSVILKTCNIVRSFLNT

SEQ ID NO: 19727 - protein, 1014 aa, Pachyrhynchus sulphureomaculatus
MNHSPPSTTSTQHHPESPLIQTLKAKMESHLARWSGTDPTTINPIPRLIFRQSTQPILNTLNKHIIPQYITDSSTIEDIHTIIYAAAITTLTQNNQKLPQRQGNPNRTKPKFKWQIRIENKINNIRRDLGHLTQFISGNASKRVTQGANKIKSKSPNRTLPEILDTLKQKLSVYSARLRRYKESNERKDTNNLFRRSEKQFYRKTMYNKQIAVTEPPNKQELTDYWKSIWSEPKQHNNNTPWIKVEEDKHKHVTEQENTTFNTQEITETIKHTHNWKCPGIDNIQNFWYKQFTTTHEALTHQINKAILQPHTFPTFLTQGITYVKPKSSDTTNPSNYRPITCLPTLYKIITATISKKIEQHLTDNNILTEEQNGCRKNSRGCKEQLIIDSVIMGQTRKEHRNLHIGYIDYKKAFDSIPHSWLIRALEIYKINQHLRQFLAQIMKTWKTKIRLETQTERIQTEELYIRRGIFQGDSLSALWFCLCLNPLSNILNRTEHGFNIRHQKENQHKINHLLYMDDIKLYAATQTQLKELLKITEIFTLDVNMEFGISKCKVLHINKGQWKHHHETETINNETLDNMFDKETYKYLGFQQSTKLNHTHIKTELRTEFKNRLTKLLQTKLNSKNLTKAINTFAIPILTYSFGIIKWSHTDIENIHILIRSQFTKYRKLHPNACKERLTIERKAGGRGIIDIRSLHTKQIQTLRKFFHSKQTSLHTATVKADKNYTPLDLSRADHSADTHSHTQLQQEKMKTWSEKTLHGKHRYHIEQDHVNKKQSYTWLRDGQLFPETEGFLLAIQDKVILTRNYQKHIIKDPTIAEDRCRKCHQQKETIEHITSGCKILAGTEYTARHDSAAKVVHQALATTYRLIENTDPYYKYTPTSILENEDYKLYWDIGIHTDKTVSANRPDITFQCKKGKVTYLIDIAVPNDTNIQAKYTEKISKYTDRATEIKRLWRQEKVIIVPLIISATGLTPITFTPHLVQLGLNTDIHRNIQKSVILKTCNIVRSFLNTEW

SEQ ID NO: 19728 - protein, 1366 aa, Pachyrhynchus sulphureomaculatus
MRKNGTYGTSLEILALSETQNSNFHIFSKQRRTRHTKITFTDRPTIISTGKYDKTIYLLLTGNSMSGHFELLTPQNTENIPENNRPIKEASGERRNGRGRRGKWQLDQNDEDQATENGPAKSVVLATKPTPTKAGKSQQRMSYTTGINEHAMRCCNENTKPDKEITAKRITRRLDPPTSIPSATDVDTGQTQPPRPGQGPYVLQGQHATTKAGKPRQRLKWTDEMNRTVMRCYYTATKLETITSGYRQQLHRLFLTEYPHLQLLVSEQRVVDQKRVITKNNRLTPLELQTIKDTVAVELNTDQPNNRNNKADSEPASHTQPPSRTQQYPPPRRSITQNNIASTAQHHITDNNMNHSPPSTTSTQHHPESPLIQTLKAKMESHLARWSGTDPTTRNPIPRLIFRQSTQPILNTLNKHIIPQYITDSSTIEDIHTIIYAAAITTLTQNNQKLPQRQGNPNRTKPKFKWQIRIENKINNIRRDLGHLTQFISGNASKRVTQGANKIKSKSPNRTLPEILDTLKQKLSVYAARLRRYKESNERKDTNNLFRRSEKQFYRKTMYNKQIAVTEPPNKQELTDYWKSIWSEPKQHNNNTPWIKAEEDKHKHVTEQENTTFNTREITETIKHTHNWKCPGIDNIQNFWYKQFTTTHEALTHQINKAILQPHTFPTFLTQGITYVKPKSSDTTNPSNYRPITCLPTLYKIITATISKKIEQHLTDNNILTEEQKGCRKNSRGCKEQLIIDSVIMGQTRKEHRNLHIGYIDYKKAFDSIPHSWLIRALEIYKINQHLRQFLAQIMKTWKTKIRLETQTERIQTEELYIRRGIFQGDSLSALWFCLCLNPLSNILNRTEHGFNIRHQKENQHKINHLLYMDDIKLYAATQTQLKELLKITEIFTLDVNMEFGISKCKVLHINKGQWKHHHETETINNETLDNMFDKETYKYLGFQQSTKLNHTHIKTELRTGLKNRLTKLLQTKLNSKNLTKAINTFAIPILTYSFGIIKWSQTDIENIHILIRSQFTKYRKLHPNACKERLTIERKAGGRGIIDIRSLHTKQIQTLRKFFHSKQTSLHTATVKADKNYTPLDLARADHSADTHSHTQLQQEKMKTWSEKTLHGKHRYHIEQDHVNKKQSYTWLRDRQLFPETEGFLLAIQDKVILTRNYQKHIIKDPTIAEDRCRKCHQQKETIEHITSGCKILAGTEYTARHDSAAKVVHQALATTYRLIENTDPYYKYTPTSILENEDYKLYWDIGIHTDKTVSANRPDITFQCKKGKVTYLIDIAVPNDTNIQAKYTEKISKYTDLATEIKRLWRQEKVIIVPLIISATGLTPITFTPHLVQLGLNTDIHRNIQKSVILKTCNIVRSFLNTEW

SEQ ID NO: 19729 - protein, 809 aa, Pachyrhynchus sulphureomaculatus
MYNKQIAVTEPPNKQELTDYWKSIWSEPKQHNNNTPWIKAEEDKHKHVTEQENTTFNTQEITETIKHTHNWKCPGIDNIQNFWYKQFTTTHEALTHQINKAILQPHTFPTFLTQGITYVKPKGSDTTNPSNYRPITCLPTLYKIITATISKKIEQHLTDNNILTEEQKGCRKNSRGCKEQLIIDSVIMGQTRKEHRNLHIGYIDYKKAFDSIPHSWLIRALEIYKINQHLRQFLAQIMKTWKTKIRLETQTERIQTEELYIRRGIFQGDSLSALWFCLCLNPLSNILNRTEHGFNIRHQKENQHKINHLLYMDDVKLYAATQTQLKELLKITEIFTLDVNMEFGISKCKVLHINKGQWKHHHETETINNETLDNMFDKETYTYLGFQQSTKLNHTHIKTELRTEFKNRLTKLLQTKLNSKNLTKAINTFAIPILTYSFGIIKWSQTDIENIHILIRSQFTKYRKLHPNACKERLTIERKAGGRGIIDIRSLHTKQIQTLRKFFHSKQTSLHTATVKADKNYTPLDLARADHSADTHSHTQLQQEKMKTWSEKTLHGKHRYHIEQDHVNKKQSYTWLRDGQLFPETEGFLLAIQDKVILTRNYQKHIIKDPTVAEDRCRKCHQQKETIEHITSGCKILAGTEYTARHDSAAKVVHQALATTYRLIENTDPYYKYTPTSILENDDYKLYWDIGIHTDKTVSANRPDITFQCKKGKVTYLIDIAVPNDTNIQAKYTEKISKYTDLATEIKRLWRQEKVIIVPLIISATGLTPITFTPHLVQLGLNTDIHRNIQKSVILKTCNIVRSFLNMEW

SEQ ID NO: 19730 - protein, 1480 aa, Pachyrhynchus sulphureomaculatus
MLNNNNYNNENGRVLRRRTPVVQTATATPQQQLQTNQTTASAETTPDSFTRSDIVGDGNCLFRAVSLYLYGHQNHHEKLREVALRYLQQNWSELHTFSLIEVDDIKDFNNYYNYMRKNGTYGTSLEILALSETQNSNFHIFSKQRRTRHTKITFTDRPTIISTGKYNKTIYLLLTGNPMSGHFELLTPQNTENIPENNRPIKEASGERRNGRGRRGKWQLDQNDEDQATENGPAKSVVLATKPTPTKAGKSQQRMSCTTGINEHAMRCCNENTKPDKEITEKRITRRLDPPTSIPSATDVDTGQTEPPNPGQGPYVLQGQHATTKAGKPRQRLKWTDEMNRTVMRCYYTATKLETITSGYRQQLHRLFLTEYPHLQLLVSEQRVVDQKRVITKNNRLTPLELQTIKDTVAVELNTDQPNNRNNKADSEPASHTQPPSRTQQYPPPRRSITQNNIASTAQHHITDNNMNHSPPSTTSTQHHPESPLIQILKAKMESHLARWSGTDPTTRNPIPRLIFRQSTQPILNTLNKHIIPQYITDSSTIEDIHTIIYAAAITTLTQNNQKLPQRQGNPNRTKPKFKWQIRIENKINNIRRDLGHLTQFISGNASKRVTQGANKIKSKSPNRTLPEILDTLKQKLSVYAARLRRYKESNERKDTNNLFRRSEKQFYRKTMYNKQIAVTEPPNKQELTDYWKSIWSEPKQHNNNTPWIKAEEDKHKHVTEQENTTFNTQEITETIKHTHNWKCPGIDNIQNFWYKQFTTTHEALTHQINKAILQPHTFPTFLTQGITYVKPKSSDTTNPSNYRPITCLPTLYKIITATISKKIEQHLTDNNILTEEQKGCRKNSRGCKEQLIIDSVIMGQTRKEHRNLHIGYIDYKKAFDSIPHSWLIRALEIYKINQHLRQFLAQIMKTWKTKIRLETQTERIQTEELYIRRGIFQGDSLSALWFCLCLNPLSNILNRTEHGFNIRHQKENQHKINHLLYMDDIKLYAATQTQLKELLKITEIFTLDVNMEFGISKCKVLHINKGQWKHHHETETINNETLDNMFDKETYKYLGFQQSTKLNHTHIKTELRTEFKNRLTKLLQTKLNSKNLTKAINTFAIPILTYSFGIIKWSQTDIENIHILIRSQFTKYRKLHPNACKERLTIERKAGGRGIIDIRSLHTKQIQTLRKFFHSKQTSLHTATVKADKNYTPLDLARADHSADTHSHTQLQQEKMKTWSEKTLHGKHRYHIEQDHVNKKQSYTWLRDGQLFPETEGFLLAIQDKVILTRNYQKHIIKDPTIAEDRCRKCHQQKETIEHITSGCKILAGTEYTARHDSAAKVVHQALATTYRLIENTDPYYKYTPTSILENEDYKLYWDIGIHTDKTVSANRPDITFQCKKGKVTYLIDIAVPNDTNIQAKYTEKISKYTDLATEIKRLWRQEKVIIVPLIISATGLTPITFTPHLVQLGLNTDIHRNIQKSVILKTCNIVRSFLNTEW

SEQ ID NO: 19731 - protein, 809 aa, Pachyrhynchus sulphureomaculatus
MYNKQIAVTEPPNKQELTDYWKSIWSEPKQHNNNTPWIKAEEDKHKHVTEQENTTFNTQEITETIKHTHNWKCPGIDNIQNFWYKQFTTTHEALTHQINKAILQPHTFPTFLTQGITYVKPKSSDTTNPSNYRPITCLPTLYKIITATISKKIEQHLTDNNILTEEQKGCRKNSRGCKEQLIIDSVIMGQTRKEHRNLHIGYIDYQKAFDSIPHSWLIRALEIYKINQHLRQFLEQIMKTWKTKIRLETQTEWIQTEELYIRRGIFQGDSLSALWFCLCLNPLSNILNRTEHGFNIRHQKENQHKINHLLYMDDIKLYAATQTQLKELLKITEIFTLDVNMEFGISKCKVLHINKGQWKHHHETETINNETLDNMFDKETYKYLGFQQSTKLNHTHIKTELRTEFKNRLTKLLQTKLNSKNLTKAINTFAIPILTYSFGIIKWSQTDIENIHILIRSQFTKYRKLHPNACKERLTIERKAGGRGIIDIRSLHTKQIQTLRKFFHSKQTSLHTATVKADKNYTPLDLARADHSADTHSHTQLQQEKMKTWSEKTLHGKHRYHIEQDHVNKKQSYTWLRDGQLFPETEGFLLAIQDKVILTRNYQKHIIKDPTIAEDRCRKCHQQKETIEHITSGCKILAGTEYTARHDSAAKVVHQALATTYRLIENTDPYYKYTPTSILENEDYKLYWDIGIHTDKTVSANRPDITFQCKKGKVTYLIDIAVPNDTNIQAKYTEKISKYTDLATEIKRLWRQEKVIIVPLIISATGLTPITFTPHLVQLGLNTDIHRNIQKSVILKTCNIVRSFLNTEW

SEQ ID NO: 19732 - protein, 1013 aa, Pachyrhynchus sulphureomaculatus
MNHSPPSTTSTQHHPESPLIQTLKAKMESHLARWSGTDPTTRNPIPRLIFRQSTQPILNTLNKHIIPQYITDLSTIEDIHTIIYAAAITTLTQNNQKLPQRQGNPNRTKPKFKWQIRIENKINNIRRDLGHLTQFISGNASKRVTQGANKIKSKSPNRTLPEILDTLKQKLSVYAARLRRYKESNERKDTNNLFRRSEKQFYRKTMYNKQIAVTEPPNKQELIDYWKSIWSEPKLHNNNTPWIKAEEDKHKHVTEQEDTTFNTQEITETIKHTHNWKCPGIDNIQNFWYKQFTTTHEALTHQINKAILQPHTFPTFLTQGITYVKPKSSDTTNPSNYRPITCLPTLYKIITATISKKIEQHLTDNNILTEEQKGCRKNSRGCKEQLIIDSVIMGQTRKEHRNLHIGYIDYKKAFDSIPHSWLIRALEIYKINQHLRQFLAQIMKTWKTKIRLETQTERIQTEELYIRRGIFQGDSLSALWFCLCLNPLSNILSRTEHGFNIRHQKVNQHKINHLLYMDDIKLYAATQTQLKELLKITEIFTLDVNMEFGISKCKVLHINKGQWKGHHETETINNETLDNMFDKETYKYLGFQQSTKLNHTHIKTELRTEFKNRLTKLLQTKLNSKNLTKAINTFAIPILTYSFGIIKWSHTDIENIHILIRSQFTKYRKLHPNACKERLTIERKAGGRGIIDIRSLHTKQIQTLRKFFHSKQTSLHTATVKADKNYTPLDLARADHSADTHSHTQLQQEKMKTWSEKTLHGKHRYHIEQDHVNKKQSYTWLRDGQLFPETEGFLLAIQDKVILTRNYQKYIIKNPTIAEDRCRKCHQQKETIEHITSGCKILAGTEYTARHDSAAKVIHQALATTYRLIENTDPYYKYTPTSILENEDYKLYWDIGIHTDKTVSANRPDITFQCKKGKVTYLIDIAVPNDTNIQAKYTEKISKYTDLATEIKRLWRQEKVIIVPLIISATGLTPITFTPHLVQLGLNTDIHRNIQKSVILKTCNIVRLFLNTE

SEQ ID NO: 19733 - protein, 1365 aa, Pachyrhynchus sulphureomaculatus
MRKNGTYGTSLEILALSETQNSNFHIFSKQRRTRHTKITFTDRPTIISTGKYNKTIYLLLTGNPMSGHFDLLTPQNTENIPENNRPIKEASGERRNGRGRRGKWQLDQNDEDQATENGPAKSVVLATKPTPTKAGKSQQRMSCTTGINEHAMRCCNENTKPDKEITEKRITRRLDPPTSIPSATDVDTGQTQPPNPGQGPYVLQGQHATTKAGKPRQRLKWTDEMNRTVMRCYYTATKLETITSGYRQQLHRLFLTEYPHLQLLVSEQRVVDQKRVINKNNRLTPLELQTIKDTVAVELNTDQPNNRNNKADSEPASHTQPPSRTQQYPPPRRSITQNNIASTAQHHITDNMNHSPPSTTSTQHHPESPLIQTLKAKMESHLARWSGTDPTTRNPIPRLIFRQSAQPILNTLNKHIIPQYITDSSTIEDIHTIIYAAAITTLTQNNQKLPQRQGNPNRTKPKFKWQIRIENKINNIRRDLGHLTQFISGNASKRVTQGANKIKSKSPNRTLPEILDTLKQKLSVYAARLRRYKESNERKDTNNLFRRSEKQFYRKTMYNKQIAVTEPPNKQELTDYWKSIWSEPKQHNNNTPWIKAEEDKHKHVTEQENTTFNTQEITETIKHTHNWKCPGIDNIQNFWYKQFTTTHEALTHQINKAILQPHTFPTFLTQGITYVKPKSSDTTNPSNYRPITCLPTLYKIITATISKKIEQHLTDNNILTEEQKGCRKNSRGCKEQLIIDSVIMGQTRREHRNLHIGYIDYKKAFDSIPHSWLIRALEIYKINQHLRQFLAQIMKTWKTKIRLETQTERIQTEELYIRRGIFQGDSLSALWFCLCLNPLSNILNRTEHGFNIRHQKENQHKINHLLYMDDIKLYAATQTQLKELLKITEIFTLDVNMEFGISKCKVLHINKGQWKHHHETETINNETLDNMFDKETYKYLGFQQSTKLNHTHIKTELRTEFKNRLTKLLQTKLNSKNLTKAINTFAIPILTYSFGIIKWSQTDIENIHILIRSQFTKYRKLHPNACKERLTIERKAGGRGIIDIRSLHTKQIQTLRKFFHSKQTSLHTATVKADKNYTPLDLTRADHSADTHSHTQLQQDKMKTWSEKTLHGKHRYHIEQDHVNKKQSYTWLRDGQLFPETEGFLLAIQDKVILTRNYQKHIIKDPTIAEDRCRKCNQQKETIEHITSGCKILAGTEYTARHDSAAKVVHQALATTYRLIENTDPYYKYTPTSILENEDYKLYWDIGIHTDKTVSANRPDITFQCKKGKVTYLIDIAVPNDTNIQAKYTEKISKYTDLATEIKRLWRQEKVIIVPLIISATGLTPITFTPHLVQLGLNTDIHRNIQKSVILKTCNIVRSFLNTEW

SEQ ID NO: 19734 - protein, 1014 aa, Pachyrhynchus sulphureomaculatus
MNHSPPSTTFTQHHPESPLIQTLKAKMESHLARWSGTDPTTRNPIPRLIFRQSTQPILNTLNKHIIPQYITDSSTIEDIHTIIYAAAITTLTQNNQKLPQRQGNPNRTKPKFKWQIRIENKINNIRRDLGHLTQFISGNASKRVTQGANKIKSKSPNRTLPEILDTLKQKLSVYAARLRRYKESNERKDTNNLFRRSEKQFYRKTMYNRQIAVTEPPNKQELTDYWKSIWSEPKLHNNNTPWIKAEEDKHKHVTEQENTTFNTQEITETIKHTHNWKCPGIDNIQNFWYKQFTTTHEALTHQINKAILQPHTFPTFLTQGITYVKPKSSDTTNPSNYRPITCLPTLYKIITATISKKIEQHLTDNNILTEEQKGCRKNSRGCKEQLIIDSVIMGQTRKEHRNLHIGYIDYKKAFDSIPHSWLIRALEIYKIHQHLRQFLAQIMKTWKTKIRLETQTERIQTEELYIRRGIFQGDSLSALWFCLCLNPLSNILNRTEHGFNIRHQKVNQHKINHLLYMDDIKLYAATQTQLKELLKITEIFTLDVNMEFGISKCKVLHINKGQWKCHHETETINNEMLDNMFDKETYKYLGFQQSTKLNHTHIKTELRTEFKNRLTKLLQTKLNSKNLTKAINTFAIPILTYSFGIIKWSQTDIENIHILIRSQFTKYRKLHPNACKERLTIERKAGGRGIIDIRSLHTKQIQTLRKFFHSKQTSLHTATVKADKNYTPLDLARADHSADTHSHTQLQQEKMKTWSEKTLHGKHRYHIEQDHVNKKQSYTWLRDGQLFPETEGFLLAIQDKVILTRNYQKHIIKDPTIAEDRCRKCHQQKETIEHITSGCKILAGTEYTARHDSAARVVHQALATTYRLIENTDPYYKYTPTSILENEDYKLYWDIGIHTDKTVSANRPDITFQCKKGKVTYLIDIAVPNDTNLQAKYTEKISKYTDLATEIKRLWRQEKVIIVPLIISATGLTPITFTPHLVQLGLNTDIHRNIQKSVILKTCNIVRSFLNTEW

SEQ ID NO: 19735 - protein, 1215 aa, Pachyrhynchus sulphureomaculatus
MRCCNENTKPDKEITEKRITRRLDPPTSIPSATDVDTGQTQPPKPGQGPYVLQGQHATTKAGKPRQRLKWTDEMNRTVMRCYYTATKLETITSGYRQQLHRLFLTEYPHLQLLVSEQRVVDQKRVITKNNRLTPLELQTIKDTVAVELNTDQPNNRNNKADSEPASHTQPSSRTQQYPPPRRSITQNNIASTAQHHITDNNMNHSPPSTTSTQHHPESPLIQTLKAKMESHLARWSGTDPTTRNPIPRLIFRQSTQPILNTLNKHIIPQYITDSSTIEDIHTIIYAAAITTLTQNNQKLPQRQGNPNRTKPKFKWQIRIENKINNIRRDLGHLTQFISGNASKRVTQGANKIKSKSPNRTLPEILDTLKQKLSVYAARLRRYKESNERKDTNNLFRRSEKQFYRKTMYNRQIAVTEPPNKQELTDYWKSIWSEPKQHNNNTPWIKAEEDKHKYVTEQENTTFNTQEITETIKHTHNWKCPGIDNIQNFWYKQFTTTHEALTHQINKAILQPHTFPTFLTQGITYVKPKSSDTTNPSNYRPITCLPTLYKIITATISKKIEQHLTDNNILTEEQKGCRKNSRGCKEQLIIDSVIMGQTRKEHRNLHIGYIDYKKAFDSIPHSWLIRALEIYKINQHLRQFLAQIMKTWKTKIRLETQTERIQTEELYIRRGIFQGDSLSALWFCLCLNPLSNILNRTEHGFNIRHQKENQHKINHLLYMDDIKLYAATQTQLKELLKITEIFTLDVNMEFGISKCKVLHINKGQWKHHHETETINNETLDNMFDKETYKYLGFQQSTKLNHTHIKTELRTEFKNRLTKLLQTKLNSKNLTKAINTFAIPILTYSFGIIKWSQTDIENIHILIRSQFTKYRKLHPNACKERLTIERKAGGRGIIDIRSLHTKQIQTLRKFFHSKQTSLHTATVKADKNYTPLDLARADHSADTHSHTQLQQEKMKTWSEKTLHGKHRYHIEQDHVNKKQSYTWLRDGQLFPETEGFLLAVQDKVILTRNYQKHIIKDPTIAEDRCRKCHQQKETIEHITSGCKILAGTEYTARHDSAAKVVHQALATTYRLIENTDPYYKYTPTSILENEDYKLYWDIGIHTDKTVSANRPDITFQCKKGKVTYLIDIAVPNDTNIQAKYTEKISKYTDLATEIKRLWRQEKVIIVPLIISATGLTPITFTPHLVQLGLNTDIHRNIQKSVILKTCNIVRSFLNTEW

SEQ ID NO: 19736 - protein, 902 aa, Pachyrhynchus sulphureomaculatus
MANKTRKQNQQHQKRSGTPYPVYERERVQTCVTQGVDKIKSKSLKRTLPEIVDTLKQKLSVYAAKLRRYKESNERKDTNNLFRRSEKQFYRKTMYNEQTVVTKPPNKQEIADYWKTVWSEPKLHNNNTPWIKAEEDKHKRVTEQENSTLTTEEITETTKHTHNWKCPGIDNIQNFWYKQFTTTHEALTHQINKAILQPHTLPTFLTQGITYVKPKSSNTTNPSNYRPITCLPTLYKIITAAISKKIEQHLTDNNIITEEQKGCRKNSRGCKEQPIIDSVIMGQTRKEHRNLHIGYIDYKKAFDSIPHSWLIRALEIYKINQQLRQFLAQITKIWKTKIRLETPTERIETEELYIRWGIFQGDSLSALWFCLCLNPLSNILNRTEHGFNIRHQKVNQHKINHLLYMDDIKLYAATQTQLKELLKITEIFTLDVNMEFGISKCKVLHFNKGQWKCHHETETINNETLDNMFDKETYKYLGFQQSTKLNHTHIKTELRTEFKNRLTKLLQTKLNSKNLTKAINTFAIPVLTYSFGIIKWSQTDIENIHILIRSQFTKYRKLHPNACKERLTIERKAGGRGIIDIRSLHTKQIQTLRKFFHSKQTTLHTATVKADKNYTPLDLARADHSADTHSHTQLQQEKMKTWSEKTLHGKHRYHIEQDHVNKKQSYTWLQDGQLFPETEGFLLAIQDKVILTRNYQKHIIKDPTIAEDRCRKCHQQKETIEHITSGCKILAGTEYTARHDSAAKVVHQALATTYRLIENTDPYYKYTPTSILENEDYKLYWDIGIHTDKTVSANRPDITFQCKKGKVTYLIDIAVPNDTNIQAKYTEKISKYTDLATEIKRLWRQEKVIIVPLIISATGLTPITFTPHLVQLGLNTDIHRNIQKSVILKTCNIVRSFLNTEW

SEQ ID NO: 19737 - protein, 902 aa, Pachyrhynchus sulphureomaculatus
MANKNRKQNQQHQERSRTSYPVYKRGNASKRVTQGANKIKSKSPNRTLPEILDTLKQKLSVYAARLRRYKESNERKDTNNLFRRSEKQFYRKTMYNKQIAVTEPPNKQELTDYWKSIWSEPKQHNNNTPWIKAEEDKHKHVTEQENTTFNTQEITETIKHTHNWKCPGIDNIQNFWYKQFTTTHEALTHQINKAILQPHTFPTFLTQGITYVKPKSSDTTNPSDYRPITCLPTLYKIITATISKKIEQHLTDNNILTEEQKGCRKNSRGCKEQLIIDSVIMGQTRKEHRNLHIGYIDYKKAFDSIPHSWLIRALEIYKINQHLRQFLAQIMKTWKTKIRLETQTERIQTEELYIRRGIFQGDSLSALWFCLCLNPLSNILNRTEHGFNIRHQKENQHKINHLLYMDDIKLYAATQTQLKELLKITEIFTLDVNMEFGISKCKVLHINKGQWKHHHETETINNETLDNMFDKETYKYLGFQQSTKLNHTHIKTELRTEFKNRLTKLLQTKLNSKNLTKAINTFAIPILTYSFGIIKWSQTDIENIHILIRSQFTKYRKLHPNACKERLTIERKEGGRGIIDIRSLHTKQIQTLRKFFHSKQTSLHTATVKADKNYTPLDLARADHSADTHSHTQLQQEKMKTWSEKTLHGKHRYHIEQDHVNKKQSYTWLRDGQLFPETEGFLLAIQDKIILTRNYQKHIIKDPTIAEDRCRKCHQQKETIEHITSGCKILAGTEYTARHDSAAKVVHQALATTYRLIENTDPYYKYTPTSILENEDYKLYWDIGIHTDKTVSANRPDITFQCKKGKVTYLIDIAVPNDTNIQAKYTEKISKYTDLATEIKRLWRQEKVIIVPLIISATGLTPITFTPHLVQLGLNTDIHRNIQKSVILKTCNIVRSFLNTEW

SEQ ID NO: 19738 - protein, 1365 aa, Pachyrhynchus sulphureomaculatus
MRKNGTYGTSLEILALSETQNSNFHIFSKQRRTRHTKITFTDRPTIISTGKYNKTIYLLLTGNPMSGHFELLTPQNIENIPDNSRPIKEASGERRNGRGRRGKWQLDQNDEDQATENGPAQSVVPASKPTPTKAGKSQQRMSCTTGINEHAMRCCNEITPDKEITDKRITRRLDPPPPIPSATDVNAGQIQPPKPGQTAYVLQGQHATTKAGKPRQRLKWTDEMNKTVMRCYYTATKLETVTSGYRLELHRLFLTEYPHLQLLVTEQRVIDQKRVITKNNRLTHFELQTIKDTVAAELNADQVAAELNTDQLNNRNSRADTEPISHTQPPSRKQQDPPPSRSITQNNISEQIASTTRHSTTSIQHHPESPLIQTLKAEMQSHLARWSGTDPTTRNPIPRLIFKQSTQMILNTINKHIIPQYITDLSTIEDIHTIIYAAAITTITQNNQKLPQRQRDPNSRKPKFKWQIRIENKINNIRRDLGHLTQFMNGNASKRVTQGVDKIKSKSLNRTLPEIVDNLKQKLSVYAARLRRYKESNERKDTNNLFRRSEKQFYRKTMYNEQTVVTEPPNKQELADYWKTVWSESKLHNNNTSWIKAEEDKHKRVTEQENSTLTTEEITETIKHTHSWKCPGIDNIQNFWYKQFTTTHEALTHQINKAILQPHTFPTFLTQGITYVKPKSSDTTNPSNYRPITCLPTLYKIITAAISKKIEQHLTDNNIITEEQKGCRKNSRGCKEQLIIDSVIMGQTRKEHRNLHICYIDYKKAFDSIPHSWLIRALEIYKINQHLRQFLAQIMKTWKIKIRLETQTERIQTEELYIRRGIFQGDSLSALWFCLYLNPLSNILNRTEHGFNIRHQKGNQHKINHLLYMDDIKLYAATKTQLKELLKITEIFTLDVNMEFGISKCKVLHINKGQWKYHHETETINNETLDNMFDKETYKYLGFQQSTKLNHTHIKTELRTEFKNRLTKLLQTKLNSKYLTKAINTFAIPILTYSFGIIKWSQTDLENIHILIRSQFTKYRKLHPNACKERLTIERKAGGRGIIDIRSLHTKQIQALRKFFHTKQTSLHTATVKADKNYTPLDLSRVDHPADTHSHIQLQQEKMKTWSEKTLHGKHRYHIEQDHVNKKQSYTWLRDGQLFPETEGFLLAIQDKVILTRNYQKHIIKDPTITEDRCRKCHQQKETIEHITSGCKILAGTEYTARHDSAAKVVHQALATTYKLIENTDPYYKYTPTSVLENKDYKLYWDISIHTDKTVSANRPDITFQCKKEKVTYLIDIAVPNDTNIQTKYTEKISKYTDLATEIKRLWKQEKVIIVPLIISATGLTPTTFTPHLVQLGLNTNIHKNIQKSVILKTCNIVRSFLNTQ

SEQ ID NO: 19739 - protein, 1483 aa, Pachyrhynchus sulphureomaculatus
MSKNNNYSNDNGRVLRRRTPVVQTAIATPQQQQPQTTQTTASAETTPDSFTRSDIVGDGNCLFRAVSLHLYGHQNHHEKLREVALRYLQQNWSELHTFSLIEVDDIKDFNNYYNYMRKNGTYETSLEILALSETQNSNFHIFSKQRRTRHTKITFTDRPTIISTGKYNKTIYLLLTGNTMSGHFELLTPQNIENIPDNSRPIKEASGERRNGRGRRGKWQLDQNDEDRATENGPAKSVVPASKPTPTQAGKSQQRMSCTTGINEHAMRCCNEITPEKEITDKRITRRLDPPPPIPSATDVDAGQIQPPKPGQTAYVLQGQHATTKAGKPRQRLKWTDEMNRTVMRCYYTATKLETVTSGYRLELHRLFLTEYPHLQLLVTEQRVIDQKRVITKNNRLTPFELQTIKDTVAAELNTDQPNNRNSRADTEPISHTQPPSRKQQDPPPSRSITQNNISKQIASTTRHHITDDKMNDSPPSTTSTQHHSESPLIQTLKAEMQSHLARWSGTDPTTRNPIPRLIFKQSTQIILNTINKHIIPQYITDLSTIEDIHTIIYAAAITTITQNNQKLPQRQRDPNSRKPKFKWQIRLENKVNSIRRDLGHLTQFMNGNASKRVTQGVDKIKSKSLKRTLPEIVDTLKQKLSVYAARLRRYKESNERKDTNNLFRRSEKQFYRKTMYNEQTVVTKPPNKQEIADYWKTVWSEPKLHNNNTPWIKAEEDKHKRVTEQENSTLTTEEITETIKHTHNWKCPGTDNIQNFWYKQFTTTHEALTHQINKAILQPHTLPTFLTQGITYVKPKSSDTTNPSNYRPITCLPTLYKIITAAISKKIEQHLTDNNIITEEQKGCRKNSRGCKEQLIIDSVIMGQTRKEHRNLHIGYIDYKKAFDSIPHSWLIRALEIYKINQQLRQFLAQIMKTWKTKIRLETPTERIETEELYIRRGIFQGDSLSALWFCLCLNPLSNILNRTEHGFNIRHQKVNQHKINHLLYMDDIKLYAATQTQLKELLKITEIFTLDVNMEFGISKCKVLHINKGQWKCHHETETINNETLDNMFDKETYKYLGFQQSTKLNHTHIKTELRTEFKNRLTKLLQTKLNSKNLTKAINTFAIPVLTYSFGIIKWSQTDIENIHILIRSQFTKYRKLHPNACKERLTIERKAGGRGIIDIRSLHTKQIQTLRKFFHSKQTSLHTATVKADKNYTPLDLARADHSADTHSHTQLQQEKMKTWSEKTLHGKHRYHIEQDHVNKKQSYTWLQDGQLFPETEGFLLAIQDKVILTRNYQKHIIKDPTIAEDRCRKCHQQKETIEHITSGCKILAGTEYTARHDSAAKVVHQALATTYKLIENTDPYYKYTPTSILENEDYKLYWDIGIHTDKTVSANRPDITFQCKKEKVTYLIDIAVPNDTNIQTKYTEKISKYTDLATEIKRLWKQEKVIIVPLIISATGLTPTTFTPHLVQLGLNTNIHKNIQKSVILKTCNIVRSFLNTQ

SEQ ID NO: 19740 - protein, 878 aa, Pachyrhynchus sulphureomaculatus
MNGNASKRVTQGVDKIKSKSLNRTLPEIVDTLKQKLSVYAARLRRYKESNERKDTNNLFRRSEKQFYRKTMYNEQRVVTEPPNKQELADYWKTVWSEPKLHNNNTSWIKAEEDKHKRVTEQENSTLTTEEITETIKHTHNWKCPGIDNIQNFWYKQFTTTHEALTHQINKAILQPHTFPTFLTQGITYVKPKSSDTTNPSNYRPITCLPTLYKIITAAISKKIEQHLTDNNIITEEQKGCRKNSRGCKEQLIIDSVIMGQTRKEHRNLHIGYIDYKKAFDSIPHSWLIRALEIYKINQHLRQFLTQIMKTWKTKIRLETQTERIQTEELYIRRGIFQGDSLSALWFCLCLNPLSNILNRTEHGFNIRHQKGNQHKINHLLYMDDIKLYAATKAQLKELLKITEIFTLDVNMEFGISKCKVLHINKGQWKYHHETETINNETLDNMFDKETYKYLGFQQSTKLNHTHIKTELRTEFKNRLTKLLQTKLNSKYLTKAINTFAIPILTYSFGIIKWSQTDLENIHILIRSQFTKYRKLHPNACKERLTIERKAGGRGIIDIRSLHTKQIQALRKFFHTKQTSLHTATVKADKNYTPLDLSRVDHPADTHSHIQLQQEKMKTWSEKTLHGKHRYHIEQDHVNKKQSYTWLRDGQLFPETEGFLLAIQDKVILTRNYQKHIIKDPTITEDRCRKCHQQKETIEHITSGCKILAGTEYTARHDSAAKVVHQALATTYKLIENTDPYYKYTPTSVLENKDYKLYWDISIHTDKTVSANRPDITFQCKKEKVTYLIDIAVPNDTNIQTKYTEKISKYTDLATEIKRLWKQEKVIIVPLIISATGLTPTTFTPHLVQLGLNTNIHKNIQKSVILKTCNIVRSFLNTQ

SEQ ID NO: 19741 - protein, 1165 aa, Pachyrhynchus sulphureomaculatus
MFCKDNMQLPRLENQDSGLKWTDEMNRTVMRCYYTATKLETITSGYRQQLHRLFLTEYPHLQLLVSEQRVIDQKRVITKNNRLTPLELQTIKDTVAVELNTDQPNNRNNKADSEPASHTQPPSRTQQYPPPRRSITQNNIASTAQHHITDNNMNHSPPSTTSTRRHPESPLIQTLKAKMESHLARWSGTDPTTRNPIPRLIFRQSTQPILNTLNKHIIPQYITDLSTIEDIHTIIYAAAITTLTQNNQKLPQRQGNPNRTKPKFKWQIRIENKINNIRRDLGHLTQFISGNASKRVTQGANKIKSKSPNRTLPEILDTLKQKLSVYAARLRRYKESNERKDTNNLFRRSEKQFYRKTMYNKQIAVTEPPNKQELTDYWKSIWSEPKLHNNNTPWIKAEEDKHKHVTEQEDTTFNTQEITETIKHTHNWKCPGIDNIQNFWYKQFTTTHEALTHQINKAILQPHTFPTFLTQGITYVKPKSSDTTNPSNYRPITCLPTLYKIITATISKKIEQHLTDNNILTEEQKGCRKNSRGCKEQLIIDSVIMGQTRKEHRNLHIGYIDYKKAFDSIPHSWLIRALEIYKINQHLRQFLAQIMKTWKTKIRLETQTERIQTEELYIRRGIFQGDSLSALWFCLCLNPLSNILSRTEHGFNIRHQKVNQHKINHLLYMDDIKLYAATQTQLKELLKITEIFTLDVNMEFGISKCKVLHINKGQWKGHHETETINNETLDNMFDKETYKYLGFQQSTKLNHTHIKTELRTEFKNRLRKLLQTKLNSKNLTKAINTFAIPILTYSFGIIKWSQTDMENIHILIRSQFTKYRKLHPNACKERLTIERKAGGRGIIDIRSLHTKQIQTLRKFFHSKQTSLHTATVKADKNYTPLDLARADHSADTHSHTQLQQEKMKTWSEKTLHGKHRYHIEQDHVNKKQSYTWLRDGQLFPETEGFLLAIQDKVILTRNYQKYIIKDPTIAEDRCRKCHQQKETIEHITSGCKILAGTEYTARHDSAAKVVHQALATTYRLIENTDPYYKYTPTSILENEDYKLYWDIGIHTDKTVSANRPDITFQCKKGKVTYLIDIAVPNDTNIQAKYTEKISKYTDLATEIKRLWRQEKVIIVPLIISATGLTPITFTPHLVQLGLNTDIHRDIQKSVILKTCNIVRLFLNTE

SEQ ID NO: 19742 - protein, 809 aa, Pachyrhynchus sulphureomaculatus
MYNKQIAVTEPPNKQELTDYWKSIWSEPKLHNNNTPWIKAEEDKHKHVTEQENTTFNTQEITETIKHTHNWKCPGIDNIQNFWYKQFTTTHEALTHQINKAILQPHTFPTFLTQGITYVKPKSSDTTNPSNYRPITCLPTLYKIITATISKKIEQHLTDNNILTEEQKGCRKNSRGCKEQLIIDSVIMGQTRKEHRNLHIGYIDYKKAFDSIPHSWLIRALEIYKINQHLRQFLAQITKTWKTKIRLETQTERIQTEELYIRRGIFQGDSLSALWFCLCLNPLSNILNRTEHGFNIRHQKVNQHKINHLLYMDDIKLYAATQTQLKELLKITEIFTLDVNMEFGISKCKVLHINKGQWKCHHETETINNETLDNMFDKETYKYLGFQQSTKLNHTHIKTELRTEFKNRLTKLLQTRLNSKNLTKAINTFAIPILTYSFGIIKWSQTDIENIHILIRSQFTKYRKLHPNACKERLTIEKKAGGRGIIDIRSLHTKQIQTLRKFFHSKQTSLHTATVKADKNYTPLDLARADHSADTHSHTQLQQEKMKTWSEKTLHGKHRYHIEQDHVNKKQSYTWLRDGQLFPETEGFLLAIQDKVKLTRNYQKHIIKDPTIAEDRCRKCHQQKETIEHITSGCKILAETEYTARHDSAAKVVHQALATTCRLIENTDPYYKYTPTSILENEDYKLYWDIGIHTDKTVSANRPDITFQCKKGKVTYLIDIAVPNDTNIQAKYTEKISKYTDLATEIKRLWRQEKVIIVPLIMSATGLTPITFTPHLVQLGLNTDIHRNIQKSVILKTCNIVRSFLNTEW

SEQ ID NO: 19743 - protein, 1226 aa, Pachyrhynchus sulphureomaculatus
MSCTTGINEHAMRCCNEITPDKEITDKRITRRLDPPPPIPSATDVNAGQIQPPKPGQTAYVLQGQHATTKAGKPRQRLKWTDEMNKTVMRCYYTATKLETVTSGYRLELHRLFLTEYPHLQLLVTEQRVIDQKRVITKNNRLTPFELQTIKDTVAAELNADQVAAELNTDQLNNRNSRADTEPISHTQPPSRKQQDPPPSRSITQNNISEQIASTTRHSTTSIQHHPESPLIQTLKAEMMQSHLARWSGTDPTTRNPIPRLIFKQSTQMILNTINKHIIPQYITDLSTIEDIHTIIYAAAITTITQNNQKLPQRQRDPNNRKPKFKWQIRIENKINNIRRDLGHLTQFMNGNASKRVTQGVDKIKSKSLNRTLPEIVDNLKQKLSVYAARLRRYKESNERKDTNNLFRRSEKQFYRKTMYNEQTVVTEPPNKQELADYWKTVWSESKLHNNNTSWIKAEEDKHKRVTEQENSTLTTEEITETIKHTHNWKCPGIDNIQNFWYKQFTTTHEALTHQINKAILQPHTFPTFLTQGITYVKPKSSDTTNPSNYRPITCLPTLYKIITAAISKKIEQHLTDNNIITEEQKGCRKNSRGCKEQLIIDSVIMGQTRKEHRNLHIGYIDYKKAFDSIPHSWLIRALEIYKINQHLRQFLAQIMKTWKTKIRLETQTERIQTEELYIRRGIFQGDSLSALWFCLCLNPLSNILNRTKHGFNIRHQKGNQHKINHLLYMDDIKLYAATKTQLKELLKITEIFTLDVNMEFGISKCKVLHINKGQWKYHHETETINNETLDNMFDKETYKYLGFQQSTKLNHTHIKTELRTEFKNRLTKLLQTKLNSKYLTKAINTFAIPILTYSFGIIKWSQTDLENIHILIRSQFTKYRKLHPNACKERLTIERKAGGRGIIDIRSLHTKQIQALRKFFHTKQTSLHTATVKADKNYTPLDLSRVDHPADTHSHIQLQQEKMKTWSEKTLHGKHRYHIEQDHVNKKQSYTWLRDGQLFPETEGFLLAIQDKVILTRNYQKHIIKDPTITEDRCRKCHQQKETIEHITSGCKILAGTEYTARHDSAAKVAHQALATTYKLIENTDPYYKYTPTSVLENKDYKLYWDISIHTDKTVSANRPDITFQCKKEKVTYLIDIAVPNDINIQTKYTEKISKYTDLATEIKRLWKQEKVIIVPLIISATGLTPTTFTPHLVQLGLNTDIHKNIQKSVILKTCSIVRSFLNTQ

SEQ ID NO: 19744 - protein, 1014 aa, Pachyrhynchus sulphureomaculatus
MNHSPPSTTSTQHHPESPLIQTLKAKMESHLARWSGTDPTTRNPIPRLIFRQSTQPILNTLNKHIIPQYITDLSTIEDIHTIIYAAEITTLTQNNQKLPQRQGNPNRTKPKLKWQIRIENKINNIRRDLGHLTQFISGNASKRVTQGANKIKSKSPNRTLPEILDTLKQKLSVYAARLRRYKESNERKDTNNLFRRSEKQFYRKTMYNKQIAVTELPNKQEFTDYWKSIWSEPKLHNNNTPWIKAEEDKHKHVTEQENTTFNTQEITETIKHTHNWKCPGIDNIQNFWYKQFTTTHEALTHQINKAILQPHTFPTFLTQGITYVKPKSSDTTNPSNYRPITCLPTLYKIITATISKKIEQHLTDNNILTEEQKGCRKNSRGCKEQLIIDSVIMGQTRKEHRNLHIGYIDYKKAFDSIPHSWLIRALEIYKINQHLRQFLAQIMKTWKTKIRLETQTERIQTEELYIRRGIFQGDSLSALWFCLCLNPLSNILNRTEHGFNIRHQKVNQHKINHLLYMDDIKLYAAIQTQLKELLKITEIFTLDVNMEFGISKCKVLHINKGQWKCHHETETINNETLDNMFDKETYKYLGFQQSTKLNHTHIKTELRTEFKNRLTKLLQTKLNSKNLTKAINTFAIPILTYSFGIIKWSQTDIENIHILIRSQFTKYRKLHPNACKERLTNERKAGGRGIIDIRSLHTKQIQTLRKFFHSKQTSLHTATVKADKNYTPFDLARVDHSADTHSHTQLQQEKMKTWSEKTLHGKHRYHIEQDHVNKKQSYTWLRDGQLFPETEGFLLAIQDKVILTRDYQKHIIKDPTIAEDRCRKCHQQKETIEHITSGCKILAETEYTARHDSAAKVVHQALATTYRLIENTDPYYKYTPTSILENEDYKLYWDIGIHTDKTVSANRPDITFQCKKGKVTYVIDIAVPNDTNIQAKYTEKIPKYTDLATEIKRLWRQEKVIIAPLIISATGLTPITFTPHLVQLGLNTDIHRNIQKSVILKTCNIVRSFLNTQW

SEQ ID NO: 19745 - protein, 1226 aa, Pachyrhynchus sulphureomaculatus
MSCTTGINEHAMRCCNENTKPDKEITEKRITRRLDPPTSIPSATDVDTGQTQPPKPGQGPYVLQGQHATTKAGKPRQRLKWTDEMNRTVMRCYYTATKLETITSGYRQQLHRLFLTEYPHLQLLVSEQRVVDQKRVITKNNRLTPLELQTIKDTVAVELNTDQPNNRNNKADSEPASHTQPPSRTQQYPPPRRSITQNNIASTAQHHITDNNMNHSPPSTTSTQHHPESPLIQTLKAKMESHLARWSGTDPTTRNPIPRLIFRQSTQPILNTLNKHIIPQYITDSSTIEDIHTIIYAAAITTLTQNNQKLPQRQGNPNRTKPKFKWQIRIENKINNIRRDLGHLTQFISGNASKRVTQGANKIKSKSPNRTLPEILDTLKQKLSVYAARLRRYKESNERKDTNNLFRRSEKQFYRKTMYNKQIAVTEPPNKQELTDYWKSIWSEPKQHNNNTPWIKAEEDKHKHVTEQENTTFNTQEITETIKHTHNWKCPGIDNIQNFWYKQFTTTHEALTHQINKAILQPHTFPTFLTQGITYVKPKSSDTTNPSNYLPITCLPTLYKIITATISKKIEQHLTDNNILTEEQKGCRKNSRGCKEQLIIDSVIMGQTRKEHRNLHIGYIDYKKAFDSIPHSWLIRALEIYKINQHLRQFLAQIMKTWKTKIRLETQTERIQTEELYIRRGIFQGDSLSALWFCLCLNPLSNILNRTEHGFNIRHQKENQHKINHLLYMDDIKLYAATQTQLKELLKITEIFTLDVNMEFGISKCKVLHINKGQWKHHHETETINNETLDNMFDKETYKYLGFQQSTKLNHTHIKTELRTEFKNRLTKLLQTKLNSKNLTKAINTFAIPILTYSFGIIKWSQTDIENIHILIRSQFTKYRKLHPNACKERLTIERKAGGRGIIDIRSLHTKQIQTLRKFFHSKQTSLHTATVKADKNYTPLDLARAEHSADTHSHTQLQQEKMKTWSEKTLHGKHRYHIEQDHVNKKQSYTWLRDGQLFPETEGFLLAIQDKVILTRNYQKHIIKDPTIAEDRCRKCHQQKETIEHITSGCKILAGTEYTARHDSAAKVVHQALATTYRLIENTDPYYKYTPTSILENEYYKLYWDIGIHTDKTVSANRPDITFQCKKGKVTYLIDIAVPNDTNIQAKYTEKISKYTDLATEIKRLWRQEKVIIVPLIISATGLTPITFTPHLVQLGLNTDIHRNIQKSVILKTCNIVRSFLNTEW

SEQ ID NO: 19746 - protein, 1014 aa, Pachyrhynchus sulphureomaculatus
MNHSPPSTTSTQHHPESPLIQTLKAKMESHLARWSGTDPTTRNPIPRLISRQSMQPILNTLNKHIIPQYITDSSTIEDIHTIIYAAAITTLTQNNQKLPQRQGNPNRTKPKFKWQIRIENKINNIRRDLGHLTQFISGNASKRVTQGANKIKSKSPNRTLPEILDTLKQKLSVYAARLRRYKESNERKDTNNLFQRSEKQFYRKTMYNKQIAVTEPPNKQELTDYWESIWSEPKLHNNNTPWIKAEEDKQKHVTEQENTTFNTQEITETIKHTHNWKCPGIDNIQNFWYKQFTTTHEALTHQINKAILQPHTFPTFLTQGITYVKPKSSDTTNPSNYRPITCLPTLYKIITATISKKIEQHLTDNNILTEEQKGCRKNSRGCKEQLIIDSVIMGQTRKEYRNLHIGYIDYKKAFDSIPHSWLIRALEIYKINQHLRQFLAQIMKTWKTKIRLETQTERIQTEELYIRRGIFQGDSLSALWFCLCLNPLSNILNRTEHGFNIRHQKVNQHKINHLLYMDDIKLYAATQTQLKELLKITEIFTLDVNMEFGISKCKVLHINKGQWKHHHETETINNETLDNMFDKETYKYLGFQQSTKLNHTHIKTELRTEFKNRLTKLLQTKLNSKNLTKAINTFAIPILTYSFGIIKWSQTDIENIHILIRSQFTKYRKLHPNACKERLTIERKAGGRGIIDIRSLHTKQIQTLRKFFHSKQTSLHTATVKADKNYTPLDLARADHSADTHSHTQLQQEKMKTWSEKTLHGKHRYHIEQEHVNKKQSYTWLRDGQLFPETEGFLLAIQDKVILTRNYQKHIIKDPTIAEDRCRKCHQQKETIEHITSGCKILAGTEYTARHDSAAKVVHQALATTYRLIENTDPYYKYTPTSILENEDYKLYWDIGIHTDKTVFANRPDITFQCKKGKVTYLIDIAVPNDTNIQAKYTEKISKYTDLATEIKRLWRQEKVIIAPLIISATGLTPITFTPHLVQLGLNTDIHRNIQKSVILKTCNIVRPFLNAEW

SEQ ID NO: 19747 - protein, 988 aa, Pachyrhynchus sulphureomaculatus
MQSHLARWSGTDPTTRNPIPRLIFKQSTQIILNTINNHIIPQYITDLRTIEDIHTIIYAAAITTITQNNQKLPQRQRVPNSRKPKFKWQIRIENKINNIRRDLGHLTQFMNGNASKRVTQGVDKIKSKSLNRTLPEIVDTLKQKLSVYAARLRRYKESNERKDTNNLFRRSEKQFYRKTMYNEQTVVTEPPNKQELADYWKTVWSEPKLHNNNTPWIKAEEDKHKRVTEQENSTLTTEEITETIKHTHNWKCPGIDNIQNFWYKQFTTTHEALTHQINKAILQPHTFPTFLTQGITYIKPKSSDTTNPSNYRPITCLPTLYKIITATISKKIEQHLIDNNILTEEQKGSRKNSRGCKEQLIIVSVIMGQTRKEHRNLHIGYIDYKKAFDSIPHSWLIRALEIYKINQHLRQFLAQIMKTWKTKIRLETQTERIQTEELYIRRGIFQGDSLSALWFCLCLNPLSNILNRTEHGFNIRHQKVNQHKINHLLYMDDIKLYAATKTQLKELLKITEIFTLDVNMEFGISKCKVLHINKGQWKYHHETETINNETLDNMFDKETYKYLGFQQSTKLNHTHIKTELRTEFKNRLTKLLQTKLNSKNLTKAINTFAIPILTYSFGIIKWSQRDIENIHILIRSQFTKYRKLHPNACKERLTIERKAGGRGIIDIRSLHTKQIQALRKFFHTKQTSLHTATIKADKNYTPLDLSRVDHAADTHSHTQLQQEKMKTWSEKTLHGKHRYHIEQDHVNKKQSYTWLRDGQLFPETEGFLLAIQDKVILTRNYQKHIIKDPTITEDRCRKCHQQKETIEHITSGCKILAGTEYTARHDSAAKVVHQALATTYKLIENTDPYYKYTPTSVLENKDYKLYWDISIYTDKTVSANRPDITFQCKKRKVTYLIDIAVPNDTNIQTKYTEKISKYTDLATEIKRLWKQEKVIIVPLIISATGLTPTTFTSHLEQLGLNTNIHKNIQKSVILKTCNIVRSFLNTQW

SEQ ID NO: 19748 - protein, 808 aa, Pachyrhynchus sulphureomaculatus
MYNKQIAVTEPPNKQELTDYWKSIWSEPKQHNNNTPWIKAEEDKHKHVTEQENTTFNTQEITETIKHTHNWKCPGIDNIQNFWYKQFTTTHEALTHQINKAILQPHTFPTFLTQGITYVKPKSSDTTNPSNYRPITCLPTLYKIITATISKKIEQHLTDNNILTEEQKGCRKNSRGCKEQLIIDSVIMGQTRKEHRNLHIGYIDYKKAFDSIPHSWLIRALEIYKINQHLRQFLAQIMKTWKTKIRLETQTERIQTEELYIRRGIFQGDSLSALWFCLCLNPLSNILNRTEHGFNIRHQKENQHKINHLLYMDDIKLYAATQTQLKELLKITEIFTLDVNMEFGISKCKVLHINKGQWKHHHETETINNETLDNMFDKETYKYLGFQQSTKLNHTHIKTELRTEFKNRLTKFLQTKLNSKNLTKAINTFAIPILTYSFGIIKWSQTDIENIHILIRSQFTKYRKLHPNACKERLTIERKAGGRGIIDIRSLHTKQIQTLRKFFHSKQTSLHTATVKADKNYTPLDLARADHSADTHSHTQLQQEKMKTWSEKTLHGKHRYHIEQDHVNKKQSYTWLRDGQLFPETEGFLLAIQDKVILTRNYQKHIIKDPTIAEDRCRKCHQQKETIEHITSGCKILAGTEYTARHDSAAKVVHQALATTYRLIENTDPYYKYTPTSILENEDYKLYWDIGIHTDKTVSANRPDITFQCKKGKVTYLIDIAVPNDTNIQAKYTEKISKYTDLATEIKRLWRQEKVIIVPLIISATGLTPITFTPHLVQLGLNTDIHRNIQKSVILKTCNIVRSFLNTE

SEQ ID NO: 19749 - protein, 1365 aa, Pachyrhynchus sulphureomaculatus
MRKNGTYGTSLEILALSETQNSNFHIFSKQRRTRHTKITFTDRPTIISTGKYNKTIYLLLTGNPMSGHFELLTPQNIENIPDNSRPIKEASGERRNGRGRRGKWQLDQNDEDQATENGPAQSVVPASKPTPTKAGKSQQRMSCTTGINEHAMRCCNEITPDKEITDKRITRRLDPPPPIPSAIDVNAGQIQPPKPGQTAYVLQGQHATTKAGKPRQRLKWTDEMNKTVMRCYYTATKLETVTSGYRLELHRLFLTEYPHLQLLVTEQRVIDQKRVITKNNRLTPFELQTIKDTVAAELNADQVAAELNTDQLNNRNSRADTEPISHTQPPSRKQQDPPPSRSITQNNISEQIASTTRHSTTSIQHHPESPLIQTLRAEMQSHLARWSGTDPTTRNPIPRLTFKQSTQMILNTINKHIIPQYITDLSTIEDIHTIIYAAAITTITQNNQKLPQRQRDPNSRKPKFKWQIRIENKINNIRRDLGHLTQFMNGNASKRVTQGVDKIKSKSLNRTLPEIVDTLKQKLSVYAARLRRYKESNERKDTNNLFRRSEKQFYRKTMYNEQTVVTEPPNKQELADYWKTVWSEPKLHNNNTSWIKAEEDKHKRVTEQENSTLTTEEITETIKYTHNWKCPGIDNIQNFWYKQFTTTHEALTHQINKAILQPHTFPTFLTQGITYVKPKSSDTTNPSNYRPITCLPTLYKIITAAISKKIEQHLTDNNIITEEQKGCRKNSRGCKEQLIIDSVIMGQTRKEHRNLHIGYIDYKKAFDSIPHSWLIRALEIYKINQHLRQFLAQIMKTWKTKIRLETQTERIQTEELYIRRGIFQGDSLSALWFCLCLNPLSNILNRTEHGFNIRHQKGNQHKINHLLYMDDIKLYAATKAQLKELLKITEIFTLDVNMEFGISKCKVLHINKGQWKYHHETETINNETLDNMFDKETYKYLGFQQSTKLNHTHIKTELRTEFKNRLTKLLQTKLNSKYLTKAINTFAIPILTYSFGIIKWSQTDLENIHILIRSQFTKYRKLHPNACKERLTIERKAGERGIIDIRSLHTKQIQALRKFFHTKQTSLHTATVKADKNYTPLDLSRVDHPADTHSHIQLQQEKMKTWSEKTLHGKHRYHIEQDHVNKKQSYTWLRDGQLFPETEGFLLAIQDKVILTRNYQKHIIKDLTITEDRCRKCHQQKETIEHITSGCKILAGTEYTARHDSAAKVVHQALATTYKLIENTDPYYKYTPTSVLENKDYKLYWDISIYTDKTVSANRPDITFQCKKEKVTYLIDIAVPNDTNIQTKYTEKISKYTDLATEIKRLWKQEKVIIVPLIISATGLTPTTFTPHLVQLGLNTNIHENIQKSVILKTCNIVRSFLNTQ

SEQ ID NO: 19750 - protein, 1481 aa, Pachyrhynchus sulphureomaculatus
MLKNNNYNNENGRVLRRRTPVVQTAIATPQQQQLQTNQTTASVETTPDSFTRSDIVGDGNCLFRAVSLHLYGHQNHHEKLREVALRYLQQNWSELHTFSLIEVDDIKDFNNYYNYMRKNGTYGTSLEILALSETQNSNFHIFSKQRRTRHTKITFTDRPTIISTRKYNKTIYLLLTGNPMSGHFELLTPQNIENIPDNSRPIKEASGERRNGRGRRGKWQLDQNDEDRATENGPAKSVVPASKPTPTKAGKSQQRMSCTTGINEHAMRCCNEITPDKKITDKRITRRLDPPPPIPRATDVDAGQIQPPKPGQTAYVLQGQHATTKAGKPRQRLKWTDEMNRTVMRCYYTATKLETVTSGYRLELHRLFLTEYPHLQLLVTEQRVIDQKRVITKNNRLTPSELQTIKDTVAAGLNADQVAAELNTDQPNNRNSRADTEPISHTQPPSRKQQDPPPSRSITQTNISKQIASTTRYSTTSIQHHSESPLIQTLKAEMQSHLARWSGIDPTTRNPIPRLIFKQSTQMILNTINKHIIPQYITDLSTIEDIHTIIYAAAITTITQNNQKLPQRQRDPNSRKSKFKWQIRIENKINNIRRDLGHLTQFMNGNASKRVTQGIDKIKSKSLNRTLPEIVDTLKQKLSVYAARLRRYKESNERKDTNNLFRRSEKQFYRKTMYNEQIVVTEPPNKQELADYWKTVWSEPKLHNNNTPWIKAEEDKHKRVTEQENFTLTTEEITEAIKHTHNWKCPGIDNIQNFWYKRFTTTHEALTHQINKAILQPHTFPTFLTQGITYVKPKSSDTTNPSNYRPITCLPTLYKIITAAISKKIEQHLTDNNIITEEQKGCRKNSRGCKEQLIIDSVIMGQTRKEHRNLHIGYIDYKKAFDSIPHSWLIRALEIYKINQHLRQFLAQIMKTWKTKIRLETQTERIQTEELYIRRGIFQGDSLSALWFCLCLNPLSNILNRTEHGFNIRHQRVNQHKINHLLYMDDIKLYAATKTQLKELLKITEIFTLDVNMEFGISKCKVLHINKGQWKYHHETETINNETLDNMFDKETYKYLGFQQSTKLNHTHIKTELRAEFKNRLTKLLQTKLNSKYLTKAINTFAIPILTYSFGIIKWSQTDLENIHILIRSQFTKYRKLHPNACKERLTIERKAGGRGIIDIRSLHTKQIQALRKFFHTKQTSLHTATVKADKNYTPLDLSRVDHPADTHSHIQLQQEKMKTWSEKTLHGKHRYHIEQDHVNKKQSYTWLRDGQLFPETEGFLLAIQDKVILTRNYQKHIIKDPTITEDRCRKCHQQKETIEHITSGCKILAGTEYTARHDSAAKVVHQALATTYKLIENTDPYYKYTPTTVLENKDYKLYWDISIHTDKTVSANRPDITFQCKKEKVTYLIDIAVPNDTNIQTKYTEKISKYTDLATEIKRLWKQEKVIIVPLIISATGLTPTTFTPHLVQLGLNTNIHKNIQKSVILKTCNIVRSFLNTQW

SEQ ID NO: 19751 - protein, 977 aa, Pachyrhynchus sulphureomaculatus
MESHLARWSGTDPTTRNPIPRLIFRQSTQPILNTLNKHIIPQYITDSSTIEDIHTIIYAAAITTLTQNNQKLPQRQGNPNRTKPKFKWQIRIENKINNIRRDLGHLTQFISGNASKRVTQGANKIKSKSPNRTLPEILDTLKQKLSVYAARLRRYKESNERKDNNNLFRRSEKQFYRKTMYNKQIAVTEPPNKQELTDYWKSIWSEPKQHNNNTPWIKAEEGKHKHVTEQENTTFNTQEITETIKHTHNWKCPGIDNIQNFWYKQFTTTHEALTHQINKAILQPHTFPTFLTQGITYVKPKSSDTTNPSNYRPITCLPTLYKIITATISKKIEQHLTDNNILTEEQKGCRKNSRGCKEQLIIDSVIMGQTRKEHRNLHIGYIDYKKAFDSIPHSWLIRALEIYKINQHLRQFLAQIMKTWKTKIRLETQTERIQTEELYIRRGIFQGDSLSALWFCLCLNPLSNILNRTEHGFNIRHQKENQHKINHLLYMDDIKLYAATQTQLKELLKITEIFTLDVNMEFGISKCKVLHINKGQWKHHHETETINNETLDNMFDKETYKYLGFQQSTKLNHTHIKTELRTEFKNRLTKLLQTKLNSKNLTKAINTFAIPILTYSFGIIKWSQTDIENIHILIRSQFTKYRKLHPNACKERLTIERKAGGRGIIDIRSLHTKQIQALRKFFHSKQTSLHTATVKADKNYTPLDLARADHSADTHSHTQLQQEKMKTWSEKTLHGKHRYHIEQDHVNKKQSYTWLRDGQLFPETEGFLLAIQDKVILTRNYQKHIIKDPTIAEDRCRKCHQQKETIEHVTSGCKILAGTEYTARHDSAAKVVHQALATTYRLIENTDPYYKYTPTSILENEDYKLYWDIGIHTDKTVSANRPDITFQCKKGKVTYLIDIAVPNDTNIQAKYTEKNFQIHRPCNGNKKAMETGKSHHCSPHYISHGPYTNNIHTTFSAIGTQHGHTQKHSEVSDFENM

SEQ ID NO: 19752 - protein, 1214 aa, Pachyrhynchus sulphureomaculatus
MRCCNEITPDKEITDKRITRRLDPPPPIPSAIDVNAGQIQPPKPGQTAYVLQGQHATTKAGKPRQRLKWTDEMNKTVMRCYYTATKLETVTSGYRLELHRLFLTEYPHLQLLVTEQRVIDQKRVITKNNRLTPFELQTIKDTVAAELNADQVAAELNTDQLNNRNSRADTEPISHTKPPSRKQQDPPPSRSITQNNISEQIASTTRHSTTSIQHHPESPLIQTLKAEMQSHLARWSGTDPTTRNPIPRLTFKQSTQMILNTINKHIIPQYITDLSTIEDIHTIIYAAAITTITQNNQKLPQRQRDPNSRKPKFKWQIRIENKINNIRRDLGHLTQFMNGNASKRVTQGVDKIKSKSLNRTLPEIVDTLKQKLSVYAARLRRYKESNERKDTNNLFRRSEKQFYRKTMYNEQTVVTEPPNIQELADYWKTVWSEPKLHNNNTSWIKAEEDKHKRVTKQENSTLTTEEITETIKHTHNWKCPGIDNIQNFWYKQFTTTHEALTHQINKAILQPHTFPTFLTQGITYVKPKSSDTTNPSNYRPITCLPTLYKIITAAISKKIEQHLTDNNIITEEQKGCRKNSRGCKEQLIIDSVIMGQTRKEHRNLHIGYIDYKKAFDSIPHSWLIRALEIYKINQHLRQFLAQIMKTWKTKIRRETQTERIQTEELYIRRGIFQGDSLSALWFCLCLNPLSNILNRTEHGFNIRHQKGNQHKINHLLYMDDIKLYAATKAQLKELLRITEIFTLDVNMEFGISKCKVLHINKGQWKYHHETETINNETLDNMFDKETYKYLGFQQSTKLNHTHIKTELRTEFKNRLTKLLQTKLNSKYLTKAINTFAIPILTYSFGIIKWSQTDLENIHILIRSQFTKYRKLHPNACKERLTIERKAGGRGIIDIRSLHTKQIQALRKFFHTKQTSLHTATVKADKNYTPLDLSRVDHPADTHSHIQLQQEKMKTWSEKTLHGKHRYHIEQDHVNKKQSYTWLRDGQLFPETEGFLLAIQDKVILTRNYQKHIIKDPTITEDRCRKCHQQKETIEHITSGCKILAGTEYTARHDSAAKVVHQALATTYKLIENTDPYYKYTPTSVLENKDYKLYWDISIHTDKTVSANRPDITFQCKKEKVTYLIDIAVPNDTNIQTKYTEKISKYTDLATEIKRLWKQEKVIIVPLIISATGLTPTTFTPHLVQSGLNTNIHKNIQKSVILKTCNIVRSFLNTQ

SEQ ID NO: 19753 - protein, 1226 aa, Pachyrhynchus sulphureomaculatus
MSCTTGINEHAMRCCNENTKPDKEITEKRITCRLDPPTSVPSATDVDTGQTQPPKPGQGPYVLQGQHATTKAGKPRQRLKWTDEMNRTVMRCYYTATKLETITSGYRPELHRLFLTEYPHLQLLVSEQRVIDQKRVITKNNRLTPLELQTIKDTVAVELNTDQPNNRNNKADSEPASHTQPPSRTQQDPPPRRSITQNNIASTAQHHITENNMNHSPPSTTSTQHHPESPLIQTLKAKMESHLARWSGTDPITRNPIPRLIFKQSTQPILNTLNKHIIPQYITDLSTIEDIHTIIYAAAITTLTQNNQKLPQRQGNPNRTKPKFKWQIRIENKINNIRRDLGHLTQFISGNASKRVTQGANKIKSKSPNRTLPEILDTLKQKLSVYAARLRRYKESNERKDTNNLFRRSEKQFYRKTMYNKQIAVTEPPNKQELTDYWKSIWSEPKLHNNNTPWIKAEEDKHKHVTEQENTTLNAQEITETIKHTHNWKCPGIDSIQNFWYKQFTTTHEALTHQINKAILQPHTFPTFLTQGITYVKPKSSDTTNPSNYRPITCLPTLYKIITATISKKIEQHLTDNNILTEEQKGCRKNSRGCKEQLIIDSVIMGQTRKEHRNLHIGYIDYKKAFDSIPHSWLIRALEIYKINQHLRQFLAQIMKTWKTKIRLETQTERIQTEELYIRRGIFQGDSLSALWFCLCLNPLSNILNRTEHGFNIRHQKENQHKINHLLYMDDIKLYAATQTQLKELLKITEIFTLDVNMEFGISKCKVLHINKGQWKHHHETETINNETLDNMFDKETYKYLGFQQSTKLNHTHIKTELRTEFKNRLTKLLQTKLNSKNLTKAINTFAIPILTYSFGIIKWSQTDIENIHILIRSQFTKYRKLHPNACKERLTIERKAGGRGIIDIRSLHTKQIQTLRKFFHSKQTSLHTATVKADKNYTPLDLARADHSADTHSHTQLQQEKMKTWSEKTLHGKHRYHIEQDHVNKKQSYTWLRDGQLFPETEGFLLAIQDKVILTRNYQKHIIKDPTIAEDRCRKCHQQKETIEHITSGCKILAGTEYTARHDSAAKVVHQALATTYRLIENTDPYYKYTPTSILENEDYKLYWDIGIHTDKTVSANRPDITFQCKKGKVTYLIDIAVPNDTNIQAKYTEKISKYTDLATEIKRLWRQEKVIIVPLIISATGLTPITFTPHLVQLGLNTDIHRNIQKSVILKTCNIVRSFLNTEW

SEQ ID NO: 19754 - protein, 1307 aa, Pachyrhynchus sulphureomaculatus
MSGHFELLTPQNTENIPENNRPIKEASGERRNGRGRRGKWQLDQNDEDQATENGPAKSVVLATKPTPTKAGKSQQRMSCTTGINEHAMRCCNENTKPDKEITEKRITRRLDPPTSIPSATDVDTGQTQPPKPGQGPYVLQGQHATTKAGKPRQRLKWTDEMNRTVMRCYYTATKLATITSGYRQQLHRLFLTEYPHLQLLVSEQRVVDQKRVITKNNRLTPLELQTIKDTVAVELNTDQPNNRNNKADSEPASQTQPPSRTQQYPPPRRSITQNNIASTAQHHITDNNMNHSPPSTTSTQHHPESPHIQTLKAKMESHLARWSGTDPTTRNPIPRLIFRQSTQPILNTLNKHIIPQYITDSSTIEDIHTIIYAAAITTLTQNNQKLPQRQGNPNRTKPKFKWQIRIENKINNIRRDLGHLTQFISGNASKRVTQGANKIKSKSPNRTLPEILDTLKQKLSVYAARLRRYKESNERKDTNNLFRRSEKKNSPQFYRKTMYNKPIAVTEPPNKQELTDYWKSIWSEPKQHNNNTPWIKAEEDKHKHVTEQENTTFNTQEITETIKHTHNWKCPGIDNIQNFWYKQFTTTHEALTHQINKAILQPHTFPTFLTQGITYVKLKSSDTTNPSNYRPITCLPTLYKIITATISKKIEQHLTDNNILTEEQKGCRKNSRGCKEQLIIDSVIMGQTRKEHRNLHIGYIDYKKAFDSIPHSWLIRALEIYKINQHLRQFLAQIMKTWKTKIRLETQTERIQTEELYIRRGIFQGDSLSALWFCLCLNPLSNILNRTEHGFNIRHQKVNQHKINHLLYMDDIKLYAATQTQLKELLKITEMFTLDVNMEFGISKCKVLHINKGQWKCHHETETINNETFDNMFDKETYKYLGFQQSTKLNHTHIKTELRTEFKNRLTKLLQTKLNSKNLTKAINTFAIPILTYSFGIIKWSQTDIENIHILIRSQFTKYRKLHPNACKERLTIERKAGGRGIIDIRSLHTKQIQTLRKFFHSKQTSLHTATVKADKNYTPLDLARADHSADTHSHTQLQQEKMKTWSEKTLHGKHRYHIEQDHVNRKQSYTWLRDGQLFPEIEGFLLAIQDKVILTRNYQKHIIKDPTIAEDRCRKCHQQKETIEHVTSGCKILAGTEYTARHDSAAKVVHQALATTYRLIEKTQIPTTNTRQHPYLKMKITSSTGISVSIQIKQSPPIDPILLFSAKKGKVTYLIDIAVPNDTNIQAKYTEKISKYTDLATEIKRLWRQEKVIIVPLIISATGLTPITFTPHLVQLGLNTDIHRNIQKSVILKTCNIVRSFLNTEW

SEQ ID NO: 19755 - protein, 1479 aa, Pachyrhynchus sulphureomaculatus
MLNNNNYNNENGRVLRRRTPVVQTATATPQQQLQTNQTTASVETTPDSFTRSDIVGDGNCLFRAVSLYLYGHQNHHEKLREVALRYLQQNWSELHTFSLIEVDDIKDFNNYYNYMRKNGTYGTSLEILALSETQNSNFHIFSKQRRTRHTKITFTDRPTIISTGKYNKTIYLLLTGNPMSGHFELLTPQNIENIPENNRTIKEASGERRNGRGRRGKWQLDQNDEDQATENGPAKSVVSATKPTPTKAGKSQQRMSCTTGINEHAMRCCNENTKPDKEITEKRITRRLDPPTSITSTTDVDTGQTQPPKPGQGPYVLQGQHATTKAGKPRQRLKWTDEMNRTVMRCYYTATKLETITSGYRQQLHRLFLTEYPHLQLLVSEQRVVDQKRVITKNNRLTPLELQTIKDTVAVGLNTDRPSNRNNKADSEPASHTQPPSRTQQYPPPRRSITQNNIASTAQHHITDNMNHSPPSTTSTQHHPESPLIQTLKAKMESHLARWSGTDPTTRNPIPRLIFRQSTQPILNTLNKHIIPQYITDSSTIEDIHTIIYAAAITTLTQNNQKLPQRQGNPNRTKPKFKWQIRIENKINNIRRDLGHLTQFISGNASKRVTQGANKIKSKSPNRTLPEILDTLKQKLSVYAARLRRYKESNERKDTNNLFRRSEKQFYRKTMYNKQIAVTEPPNKQELTDYWKSIWSEPKQHNNNTPWIKAEEDKHKHVTEQENTTFNTQEITETIKHTHNWKCPGIDNIQNFWYKQFTTTHEALTHQINKAILQPHTFPTFLTQGITYVKPKSSDTTNPSNYRPITCLPTLYKIITATISKKIEQHLTDNNILTEEQKGCRKNSRGCKEQLIIDSVIMGQTRKEHRNLQIGYIDYKKAFDSIPHSWLIRALEIYKINQHLRQFLAQIMKTWKTKIRLETQTERIQTEELYIRRGIFQGDSLSALWFCLCLNPLSNILNRTEHGFNIRHQKENQHKINHLLYMDDIKLYAATQTQLKELLKITEIFTLDVNMEFGISKCKVLHINKGQWKHHHETETINNETLDNMFDKETYKYLGFQQSTKLNHTHIKTELRTEFKNRLTKLLQTKLNSKNLTKAINTFAIPILTYSFGIIKWSQTDIENIHILIRSQFTKYRKLHPNACKERLTIERKAGGRGIIDIRSLHTKQIQTLRKFFHSKQTSLHTATVKADKNYTPLDLARADHSADTHSHTQLQQEKMKTWSEKTLHGKHRYHIEQDHVNKKQSYTWLRDGQLFPETEGFLLAIQDKVILTRNYQKHIIKDPTIAEDRCRKCHQQKETIEHITSGCKILAGTEYTARHDSAAKVVHQALATTYRLIENTDPYYKYTPTSILENEDYKLYWDIGIHTDKTVSANRPDITFQCKKGKVTYLIDIAVPNDTNIQAKYTEKISKYTDLATEIKRLWRQEKVIIVPLIISATGLTPITFTPHLVQLGLNTDIHRNIQKSVILKTCNIVRSFLNTEW

SEQ ID NO: 19756 - protein, 1226 aa, Pachyrhynchus sulphureomaculatus
MSCTTGINEHAMRCCNENTKPDKEITEKRITRRLDPPTSIPSATDVDTGQTQPPKPGQGPYVLQGQHATTKAGKPRQRLKWTDEMNRTVMRCYYTATKLETITSGYRQQLHRLFLTEYPHLQLLVSEQRVVDQKRVITKNNRLRPLELQTIKDTVAVELNTDQPNNRNNKADSEPASHTQPPSRTQQYPPPRRSIMQNNIASTAQHHITDNNMNHSPPSTTSTQHHPESPLIQTLKAKMESHLARWSGTDPTTRNPIPRLIFRQSTQPILNTLNKHIIPQYITDSSTIEDIHTIIYAAAITALTQNNQKLPQRQGNPNRTKPKFKWQIRIENKINNIRRDLGHLTQFISGNASKRVTQGANKIKSKSPNRTLPEILDTLKQKLSVYAARLRRYKESNERKDTNNLFRRSEKQFYRKTMYNKQIAVTEPPNKQELTDYWKSIWSEPKQHNNNTPWIKAEEDKHKHVTEQENTTFNTQEITETIKHTHNWKCPGIDNIQNFWYKQFTTTHEALTHQINKAILQPHTFPTFLTQGITYVKPKSSDTTNLSNYRPITCLPTLYKTITATISKKIEQHLTDNNILTEEQKGCRKNSRGCKEQLIIDSVIMGQTRKEHRNLHIGYIDYKKAFDSIPHSWLIRALEIYKINQHLRQFLAQIMKTWKTKIRLETQTERIQTEELYIRRGIFQGDSLSALWFCLCLNPLSNILNRTEHGFNIRHQKENQHKINHLLYMDDIKLYAATQTQLKELLKITEIFTLDVNMEFGISKCKVLHINKGQWKHHHETETIKNETLDNMFDKETYKYLGFQQSTKLNHTHIKTELRTEFKNRLTKLLQTKLNSKNLTKAINTFAIPILTYSFGIIKWSQTDIENIYILIRSQFTKYRKLHPNACKERLTIERKAGGRGIIDIRSLHTKQIQTLRKFFHSKQTSLHTATVKADKNYTPLDLARADHSADTHSHTQLQQEKMKTWSEKTLHGKHRYHIEQDHVNKKQSYTWLRDGQLFPETEGFLLAIQDKVILTRNYQKHIIKDPTIAEDRCRKCHQQKETIEHITSGCKILAGTEYTARHDSAAKVVHQALATTYRLIENTDPYYKYTPTSILENEDYKLYWDIGIHTDKTVSANRPDITFQCKKGKVTYLIDIAVPNDTNIQTKYTEKISKYTDLATEIKRLWRQEKVIIVPLIISATGLTPITFTPHLVQLGLNTDIHRNIQKSVILKTCNIVRSFLNTEW

SEQ ID NO: 19757 - protein, 808 aa, Pachyrhynchus sulphureomaculatus
MYNKQIAVTEPPNKQELTDYWKSIWSEPKQHNNNTPWIKAEEDKHKHVTEQENTTFNTQEITETIKHTHNWKCPGIDNIQNFWYKQFTTTHEALAHQINKAILQPHTFPTFLTQGITYVKPKSSDTKNPSNYRPITCLPTLYKVITATISKKIEQHLTDNNILTEEQKGCRKNSRGCKEQLIIDSVIMGQSRKEHRNLHIGYIDYKKAFDSIPHSWLIRALEIYKINQHLRQFLAQIMKTWKTKIRLETQTERIQTEELYIRRGIFQGDSLSALWFCLCLNPLSNILNRTEHGFNIRHQKENQHKINHLLYMDDIKLYAATQTQLKELLKITEIFTLDVNMEFGISKCKVLHINKGQWKHHHETETINNEKLDNMFDKETYKYLGFQQSTKLNHTHIKTELRTEFKNRLTKLLQTKLNSKNLTKAINTFAIPILTYSFGIIKWSQTDIENIHILIRSQFTKYRKLHPNACKERLTIERKAGGRGIIDIRSLHTKQIQTLRKFFHSKQTSLHTATVKADKNYTPLDLARADHSADTHSHTQLQQEKMKTWSEKTLHGKHRYHIEQDHVNKKQSYTWLRDGQLFPETEGFLLAIQDKVILTRNYQKHIIKDPTIAEDRCRKCHQQKETIEHITSGCKILAGTEYTARHDSAAKVVHQALATTYRLIENTDPYYKYTPTSILENEDYKLYWDIGIHTDKTVSANRPDITFQCKKGKVTYLIDIAVPNDTNIQAKYTEKISKYTDLATEIKRLWRQEKVIIVPLIISATGLTPITFTPHLVQLGLNTDIHRNIQKSVILKTCNIVRSFLNTE

SEQ ID NO: 19758 - protein, 1017 aa, Pachyrhynchus sulphureomaculatus
MQESTRKVTTNKIFKNCYIIQLLYNNNNNNLQSHLARWSGTDPTTRNPIPRLIFKQSTQMILNTINKHIIPQYITDLSTIEDIHTIIYAAAITTITQNNQKLPQRQRDPNSRKPKFKWQIRIENKINNIRRDLGHLTQFMNGNASKRVTQGVDKIKSKSLNRTLPEIVDTLKQKLSVYAARLRRYKESNERKDTNNLFRRSEKKQFYRKIMYNEQTVVTEPPNKQELADYWKTVWSEPKLHNNNTSWIKAEEDKHKRVTEQENSTLTTEEITEAIKHTHNWKCPGIDNIHFWYKQFTTTHEALTHQINKAILQPHTFPTFLTQGITYVKPKSSDTTNPSNYRPITCLPTLYKIITAAISKKIEQHLTDNNIITEEQKGCRKNSRGCKEQLIIDSVIMGQTRKEHRNLHIGYIDYKKAFDSIPHSWLIRALEIYKINQHLRQFLAQIMKTWKTKIRLETQTERIQTEELYIRRGIFQGDSLSALWFCLCLNPLSNILNRTEHGFNIRHQKGNQHKINHLLYMDDIKLYAATKTQLKELLKITEIFTLDVNMEFGISKCKVLHINKGQWKYHHETETINNETLDNMFDKETYKYLGFQQSTKLNHTHIKTELRTEFKNRLTKLLQTKLNSKYLTKAINTFAIPILTYSFGIIKWSQTDLENIHILIRSQFTKYRKLHPNACKERLTIERKAGGRGIIDIRSLHTKQIQALRKFFHTKQTSLHTATVKADKNYTPLDLSRVDHPADTHSHIQLQQEKMKTWSEKTLHGKHRYHIEQDHVNKKQSYTWLRDGQLFPETEGFLLAIQDKVILTRNYQKHIIKDPTITEDRCRKCHQQKETIEHITSGCKILAGTEYTARHDSAAKVVHQALATTYKLIENTDPYYKYTPTSVLENKEYKLYWDISIHTDKTVSANRPDITFQCKKEKVTYLIDVAVPNDTNIQTKYTEKISKYTDLATEIKRLWKQEKVIIVPLIISAIGLTPTTFTPHLVQLGLNTNIHKNIQKSVILKTCNIVRSFLNTQ

SEQ ID NO: 19759 - protein, 878 aa, Pachyrhynchus sulphureomaculatus
MNGNASKRVTQGVDKIKSKSLKRTLPEIVDTLKQKLSVYAARLRRYKESNERKDTNNLFRRSEKQFYRKTMYNEQTVVTKPPNKQEIADYWKTVWSEPKLHNNNTLWIKAEEDKHKRVTEQENSTLTTEEITETIKHTHNWKCPGIDNIQNFWYKQFTTTHEALTHQINKAILQPHTLPTFLTQGITYVKPKSSDTTNPSNYRPITCLPTLYKIITAAISKKIEQHLTDNNIITEEQKGCRKNSRGCKEQLIIDSVIMGQTRKEHRNLHIGYIDYKKAFDSIPHSWLIRALEIYKINQQLRQFLAQIMKTWKTKIRLETPTERIETEELYIRRGIFQGDSLSALWFCLCLNPLSNILNRTEHGFNIRHQKVNQHKINHLLYMDDIKLYAATQTQLKELLKITEIFTLDVNMEFGINKCKVLHINKGQWKCHHETETINNETLDNMFDKETYKYLGFQQSTKLNHTHIKTELRTEFKNRLTKLLQTKLNSKNLTKAINTFAIPVLTYSFGIIKWSQTDIENIHILIRSQFTKYRKLHPNACKERLTIERKAGGRGIIDIRSLHTKQIQTLRKFFHSKQTSLHTATVKADKNYTPLDLARADHSADTHSHTQLQQEKMKTWSEKTLHGKHRYHIEQDHVNKKQSYTWLQDGQLFPETEGFLLAIQDKVILTRNYQKHIIKDPTIAEDRCRKCHQQKETIEHITSGCKILAGTEYTARHDSAAKVVHQALATTYKLIENTDPYYKYTPTSILENEDYKLYWDIGIHTDKTVSANRPDITFQCKKEKVTYLIDIAVPNDTNIQTKYTEKISKYTDLATEIKRLWKQEKVIIVPLIISATGLTPTTFTPHLVQLGLNTNIHKNIQKSVILKTCNIVRSFLNTQ

SEQ ID NO: 19760 - protein, 1366 aa, Pachyrhynchus sulphureomaculatus
MRKNGTYGTSLEILALSETQNSNFHIFSKQRRTRHTKITFTDRPTIISTRKYNKTIYLLLTGNPMSGHFELLTPQNIENIPDNSRLIKEASGERRNGRGRRGKWQLDQNDEDRATENGPAQSVVPASKPTPTRAGKSQQRMSCTTGINEHAMRCCNEITPDKKITDKRITRRLDPPPPIPSATDVDAGQIQPPKPGQTAYVLQGQHATTKAGKPRQRLKWTDEMNRTVMRCYYTATKLETVTSGYRLELHRLFLTEYPHLQLLVTEQRVIDQKRVITKNNRLTPSELQTIKDTVAAGLNADQVAAELNTDQPNNRNSRADTEPISHTQPPSRKQQDPPPSRSITQTNISKQIASTTRYSATSIQHHSESPLIQTLKAEMQSHLARWSGIDPTTRNPIPRLIFKQSTQMILNTINKHIIPQYITDLSTIEDIHTIIYAAAITTITQNNQKLPQRQRDPNSRKPKFKWQIRIENKINNIRRDLGHLTQFMNGNASKRVTQGVDKIKSKSLNRTLPEIVDTLKQKLSVYAARLRRYKESNDRKDTNNLFRRSEKQFYRKTMYNEQTVVTEPPNKQELADYWKTVWSEPKLHNNNTPWIKAEEDKHKRVTEQENFTLTTEEITEAIKHTHNWKCPGIDNIQNFWYKRFTTTHEALTHQINKAILQPHTFPTFLTQGITYVKPKSSDTTNPSNYRPITCLPTLYKIITAAISKKIEQHLTDNNIITEEQKGCRKNSRGCKEQLIIDSVIMGQTRKEHRNLHIGYIDYKKAFDSIPHSWLIRALEIYKINQHLRQFLAQIMKTWKTKIRLETQTERIQTEELYIRRGIFQGDSLSALWFCLCLNPLSNILNRTEHGFNIRHQRVNQHKINHLLYMDDIKLYAATKTQLKELLKITEIFTSDVNMEFGISKCKVLHINKGQWKYHHETETINNETLDNMFDKETYKYLGFQQSTKLNHTHIKTELRAEFKNRLTKLLQTKLNSKYLTKAINTFAIPILTYSFGIIKWSQTDLENIHILIRSQFTKYRKLHPNACKERLTIERKAGGRGIIDIRSLHTKQIQALRKFFHTKQTSLHTATVKADKNYTPLDLSRVDHPADTHSHIQLQQEKMKTWSEKTLHGKHRYHIEQDHVNKKQSYTWLRDGQLFPETEGFLLAIQDKVILTRNYQKHIIKDPTITEDRCRKCHQQKETIEHITSGCKILAGTEYTARHDSAAKVVHQALATTYKLIENTDPYYKYTPTTVLENKDYKLYWDISIHTDKTVSANRPDITFQCKKEKVTYLIDIAVPNDTNIQTKYTEKISKYTDLATEIKRLWKQEKVIIVPLIISATGLTPTTFTPHLVQLGLNTNIHKNIQKSVILKTCNIVRSFLNTQW

SEQ ID NO: 19761 - protein, 1143 aa, Pachyrhynchus sulphureomaculatus
MNKTVMRCYYTATKLETVTSGYRLELHRLFLTEYPHLQLLVTEQRVIDQKRVITKNNRLTPFELQTIKDTVAAELNADQVAAELNTDQLNNRNSRADTEPISRTQPPSRKQQDPPPSRSITQNNILEQIASTTRHSTTSIQHHPESPLIQTLKAEMQSHLARWSATDPTTRNPIPRLIFKQSTQMILNTINKHIIPQYITDLSTIDDIHTIIYAAAITTITENNQKLPQRQRDPNSRKPKFKWQIRIENKINNIRRDLGHLTQFMNGNASKRVTQGVDKIKSKSLNRTLPEIVDTLKQKLSVYAARLRRYKESNERKDTNNLFRRSEKQFYRKTMYNEQIVVTEPPNKQELADYWKTVWSEPKLHNNNTSWIKAEEDKHKRVTEQENSTLTTEEITETIKHTHNWKCPGIDNIQNFWYKQFTTTHEALTHQINKAILQPHTFPTFLTQGITYVKPKSSDTTNPSNYYRPITCLPTLYKIITAAISKKIEQHLTDNNIITEEQKGCRKNSRGCKEQLIIDSVIMGQTRKEHRNLHIGYIDYKKAFDSIPHSWLIRALEIYKINQHLRQFLAQIMKTWKTKIRLETQTERIQTEELYIRRGIFQGDSLSALWFCLCLNPLSNILNRTEHGFNIRHQKGNQHKINHLLYMDDIKLYAATKTQLKELLKITEIFTLDVSMEFGISKCKVLHINKGQWKYHHETETINNETLDNMFDKETYKYLGFQQSTKLNHTHIKTELRTEFKNRLTKLLQTKLNSKYLTKAINTFAIPILTYSFGIIKWSQTDLENIHILIRSQFTKYRKLHPNACKERLTIERKAGGRGIIDIRSLHTKQIQALRKFFHTKQTSLHTATVKADKNYSPLDLSRVDHPADTHSHIQLQQEKMKTWSEKTLHGKHRYYIEQDHVNKKQSYTWLRDGQLFPETEGFLLAIQDKVILTRNYQKHIIKDPTITEDRCRKCHQQKETIEHITSGCKILAGTEYTARHDSAGKVVHQALATTYKLIENTDPYYKYTPTSVLENKDYKLYWDISIRTDKTVSANRPDITFQCKKEKVTYLIDIAVPNDTNIQTKYTEKISKYTDLATEIKRLWKQEKVIIVPLIISATGLTPTTFTPHLVQLGLNTNIHKNIQKSVILKTCNIVRSFLNTQ

SEQ ID NO: 19762 - protein, 844 aa, Pachyrhynchus sulphureomaculatus
MYIYIYIYIYIYIYIYIYIYICIYYIYIYIYIYIYIYIYIYIIIYIIIIIKNSQIIGKVSGQNPNYTIITPPWIKAEEDKHKHVTEQENTTFNTQEITETIKHTHNWKCPGIDNIQNFWYKQFTTTHEALTHQINKAILQPHTFPTFLTQGITYVKPKSSDTTNPSNYRPITCLPTLYKIITATISKKIEQHLTDNNILTEEQKGCRKNSRGCKEQLIIDSVIMGQTRKEHRNLHIGYIDYKKAFDSIPHSWLIRALEIYKINQHLRQFLAQIMKTWKTKIRLETQTERIQTEELYIRRGIFQGDSLSALWFCLCLNPLSNILNRTEHGFNIRHQKVNQHKINHLLYMDDIKLYAATQTQLKELLKITEIFTLDVNMEFGISKCKVLHINKGQWKCHHETETINNETLDNMFDKETYKYLGFQQSTKLNHTHIKTELRTEFKNRLTKLLQTKLNSKNLTKAINTFAIPILTYSFGIIKWSQTDIENIHILIRSQFTKYRKLHPNACKERLTIERKAGGRGIIDIRSLHTKQIQTLRKFFHSKQTSLHTATVKADKNYTPLDLARADHSADTHSHTQLQQEKMKTWSEKTLHGKHRYHIEQDHVNKKQSYTWLRDGQLFPETEGFLLAIQDKVILTRNYQKYIIKDPTIAEDRCRKCHQQKETIEHITSGCKILAGTEYTARHDSAAKVVHQALATTYRLIENTDPYYKYTPTSILENEDYKLYWDIGIHTDKTVSANRPDITFQCKKGKVTYLIDIAVPNDTNIQAKYTEKISKYTDLATEIKRLWRQEKVIIVPLIISATGLTPITFTPHLVQLGLNTDIHRNIQKSVILKTCNIVRSFLNTE

SEQ ID NO: 19763 - protein, 1367 aa, Pachyrhynchus sulphureomaculatus
MRKNGTYGTSLEILALSETQNSNFHIFSKQRRTRHTKITFTDRPTIISTGKYNKTIYLLLTGNLMSGHFELLTPQNTQNIPENNRPIKEASGERRNGRGRRGKWQLDQNDEDQATENGPAKSVVLATKPTPTKAGKSQQRMSCTTGINEHAMRCCNENTKPDKEITEKRITRRLDPPTSIPSATDVDTGQTQLPKPGQGPYVLQGQHATTKAGKPRQRLKWTDEMNRTVMRCYYTATKLETITSGYRQQLHRLFLTEYPHLQLLVSEQRVADQKRVITKNNRLTPLELQTIKDTVAVELNTDQPNNRNNKADSEPASHTQPLSRTQQYPPPRRSITQNNIASTAQHHITDNNMNHSAPSTTSTQHHPESSLIQTLKAKMESHLARWSGTDPTTRNPIPRLIFRQSTQPILNTLNKHIIPQYITDSSTIEDIHTIIYAAAITTLTQNNQKLLQRQGNPNRTKPKFKWQIRIENKINNIRRDLGHLTQFISGNASKRVTQGANKIKSKSPNRTLPEILDTLKQKLSVYAARLRRYKESNERKDTNNLFRRSEKQFYRKTMYNKQIAVTEPPNKQELTDYWKSIWSEPKQHNNNTPWIKAEEDKHKHVTEQENTTFNTQEITETIKHTHNWKCPGIDNIQNFWYKQFTTTHEALTHQINKAILQPHTFPTFLTQGITYVKPKSSDTTNPSNYRPITCLPTLYKIITATISKKIEQHLLGDNNILTEEQKGCRKNSRGCKEQLIIDSVIMGQTRKEHRNLHIGYIDYKKAFDSIPHSWLIRALEIYKINQHLRQFLAQIMKTWKTKIRLETRTERIQTEELYIRRGIFQGDSLSALWFCLCLNPLSNILNRTEHGFNIRHQKENQHKINHLLYMDDIKLYAATQTQLKELLKITEIFTLDVNMEFGISKCKVLHINKGQWKHHHEIETINNETLDNMFDKETYKYLGFQQSTKLNHTHIKTELRTEFKNRLTKLLQTKLNSKNLTKAINTFAIPILTYSFGIIKWSQTDIENIYILIRSQFTKYRKLHPNACKERLTIERKAGGRGIIDIRSLHTKQIQTLRKFFHSKQTSLHTATVKADKNYTPLDLARADHSADTHSHTQLQQEKMKTWSEKTLHGKHRYHIEQDHVNKKQSYTWLRDGQLFPETEGFLLAIQDKVILTRNYQKHIIKDPTIAEDRCRKCHQQKETIEHITSGCKILAGTEYTARHDSAAKVVHQALATTYRLIENTDPYYKYTPTSILENEDYKLYWDIGIHTDKTVSANRPDITFQCKKGKVTYLIDIAVPNDTNIQAKYTEKISKYTDLATEIKRLWRQEKVIIVPLIISATGLTPITFTPHLVQLGLNTDIHRNIQKSVILKTCNIVRSFLNTEW

SEQ ID NO: 19764 - protein, 1480 aa, Pachyrhynchus sulphureomaculatus
MLNNNNYNNENGRVLRRRTPVVQTATATPQQQLQTNQTTASVETTPDSFTRSDIVGDGNCLFRAVSLYLYGHQNHHEKLREVALRYLQQNWSELHTFSLIEVDDIKDFNNYYNYMRKNGTYGTSLEILALSETQNSNFHIFSKQRRTRHTKITFTDRPTIISTGKYNKTIYLLLTGNPMSGHFELLTPQNTENIPENNRPIKEASGERRNGRGRRGKWQLDQNDEDQATENGPAKSVVLATKPTPTKAGKSQQRMSCTTGINEHAMRCCNENTKPDKEITEKRITRRLDPPTSIPSATDVDTGQTQPPKPGQGPYVLQGQHATTKAGKPRQRLKWTDEMNRTVMRCYYTATKLETITSGYRQQLHRLFLTEYPHLQLLVSEQRVVDQKRVITKNNRLTPLELQTIKDTVAVELNTDQPNNRNNKADSEPASQIQPPSRTQQYPPPRRSITQNNIASTAQHHITDNNMNHSPPSTTSTQHHPESPHIQTLKAKMESHLARWSGTDPTTRNPIPRLIFRQSTQPILNTLNKHIIPQYITDSSTIEDIHTIIYAAAITTLTQNNQKLPQRQGNPNRTKPKFKWQIRIENKINNIRRDLGHLTQFISGNASKRVTQGANKIKSKSPNRTLPEILDTLKQKLSVYAARLRRYKESNERKDTNNLFRRSEKQFYRKTMYNKQIAVTEPPNKQELTDYWKSIWSEPKQHNNNTPWIKAEEDKHKHVTEQENTTFNTQEITETIKHTHNWKCPGIDNIQNFWYKQFTTTHEALTHQINKAILQPHTFPTFLTQGITYVKPKSSDTTNPSNYRPITCLPTLYKIITATISKKIEQHLTDNNILTEEQKGCRKNSRGCKEQLIIDSVIMGQTRKEHRNLHIGYIDYKKAFDSIPHSWLIRALEIYKINQHLRQFLAQIMKTWKTKIRLETQTERIQTEELYIRRGIFQGDSLSALWFCLCLNPLSNILNRTEHGFNIRHQKENQHKINHLLYMDDIKLYAATQTQLKELLKITEIFTLDVNMEFGISKCKVLHINKGQWKHHHETETINNETLDNMFDKETYKYLGFQQSTKLNHTHIKTELRTEFKNRLTKLLQTKLNSKNLTKAINTFAIPILTYSFGIIKWSQTDIENIHILIRSQFTKYRKLHPNACKERLTIERKAGGRGIIDIRSLHIKQIQALRKFFHSKQTSLHTATVKADKNYTPLDLARADHSADTHSRTQLQQEKMKTWSEKTLHGKHRYHIEQDHVNKKQSYTWLRDGQLFPETEGFLLAIQDKVILTRNYQKHIIKDPTIAEDRCRKCHQQKETIEHVTSGCKILAGTEYTARHDSAAKVVHQALATTYRLIENTDPYYKYTPTSILENEDYKLYWDIGIHTDKTVSANRPDITFQCKKGKVTYLIDIAVPNDTNIQAKYTEKISKYTDLATEIKRLWRQEKVIIVPLIISATGLTPITFTPHLVQLGLNTDIHRNIQKSVILKTCNIVRSFLNTEW

SEQ ID NO: 19765 - protein, 1207 aa, Callosobruchus maculatus
MHKVTSTNNQRRPRVRRLNSPEPQTEKEQPIGDNPVADVLPVEPATTKAGKPRQRLQWTTEMNTSVMHCYYTATKLETISTGYRHELHRLFTAQYPHLSARVTEQRLIDQKRVITKNNRLTPQQLQAIKNLVADEINTVETNDSLVNESIMETQHDHTLNDKTPNTNTTNTTSTHLEENPEHEFIPDAPDTVCTNRPPTTTRNQNVTQTSSFTQSAEQVMNAQFNKWCGTNPALRDPLPRLIFNSNTQKILHTINTNVIPQFLTKDSNLEDIHTVIYAAAAATLIVNGQKLPKRSNNHRSKKSKPKWQMRIENKITTIRKELAHLAQYTNNNNRSKRIQTTIDILKSKSPQKSIPEITDTLKQKLAVYAARLRRYNESNDRKDANNLFQKSEKQFYKKITTDNQITAIELPNKQELTEFWGSLWSEPKTHNENAPWIRQEEEKHQHIVEQGDVILTPEEIAETIKHTHNWKCPGVDNIQNFWYKQFSSVYEVLTDQINKAILQPNRLPKFLTQGIRYIKPKNADTKNPANYRPITCLPTLYKIITATICRRIEKHLTENSILTEEQKGCRKQSQGCKEQLIIDSVIMEQTRKEHRNLHTCFIDYKKAFDSVPHSWLTKTLQIYKINPGLRQFLTRTMETWRTNIHLQTEDGHIQTDQLHIRRGIFQGDSLSSLWFCLCLNPLSNTLNSTNCGFTIRHQKANQHKINHLLYMDDLKLYAATEVQLRELLRITEVCTSDIKMEFGMSKCKVLHINKGQWKNHPEQEVVTGQALDNMDNDETYKYLGINQNAKIDHTKIKTQLTQEFKDRLIRLLKTKLNSRNLTKAINTFAIPILTYSFGIIKWSHTDIENIHILIRTELTKHGMSHPKACKERLTIDRKQGGRGIIDIQSLHAKQIKSLRHFFHSKQTNLHKAIVKADKNYTPLTLSCPDHAADAHNHIKAQQEKINTWSQKALHGKHRYRVTQDHINEKQSYTWLQDGQLFPETEGFMLAIQDQVIATRNYRKYVMKDPSISDDNCRKCHQQKETIEHITSGCKTLAGTEYTARHNSAAKVIHQALATTNKLIENTDPYYNYTPTSVLENNQFKLYWDIEIHTDKTIPANRPDIVFQSKTDKVTYLIDIAIPNDMNIQNTYAGKISKYTDLAIEIKRLWKQNKVVIVPLIMSVSGLTPNTFTPHLQQLGLDEKLHKTFQKSVILKTCSIVRSFLNSE

SEQ ID NO: 19766 - protein, 1480 aa, Pachyrhynchus sulphureomaculatus
MSKNNNYSNDNGRVLRRRTPVVQTAIATPQQQQPQTTQTTASAETTPDSFTRSDIVGDGNCLFRAVSLHLYGHQNHHEKLREVALRYLQQNWSELHTFSLIEVNDIKDFNNYYNYMRKNGTYGTSLEILALSETQNSNFHIFSKQRRTRHTKITFTDRPTIISTGKYNKTIYLLLTGNPMSGHFELLTPQNIENIPDNSRPIKEASGERRNGRGRRGKWQLDQNDEDQATENGPAQSVVPASKPTPTKAGKSQQRMSCTTGINEHAMRCCNEITPDKEITDKRITRRLDPPPPIPSAIDVNAGQIQPPKPGQTAYVLQGQHATTKAGKPRQRLKWTDEMNKTVMRCYYTATKLETVTSGYRLELHRLFLTEYPHLQLLVTEQRVIDQKRVITKNNRLTPFELQTIKDTVAAELNADQVAAELNTDQLNNRNSRADTEPISHTQPPSRKQQDPPPSRSITQNNISEQIASTTRHSTTSIQHHPESPLIQTLKAEMQSHLARWSGTDPTTRNPIPRLTFKQSTQMILNTINKHIIPQYITDLSTIEDIHTIIYAAAITTITQNNQKLPQRQRDPNSRKPKFKWQIRIENKINNIRRDLGHLTQFMNGNASKRVTQGVDKIKSKSLNRTLPEIVDTLKQKLSVYAARLRRYKESNERKDTNNLFRRSEKQFYRKTMYNEQTVVTEPPNKQELADYWKTVWSEPKLHNNNTSWIKAEEDKHKRVTEQENSTLTTEEITETIKHTHNWKCPGIDNIQNFWYKQFTTTHEALTHQINKAILQPHTFPTFLTQGITYVKPKSSDTTNPSNYRPITCLPTLYKIITAAISKKIEQHLTDNNIITEEQKGCRKNSRGCKEQLIIDSVIMGQTRKEHRNLHIGYIDYKKAFDSIPHSWLIRALEIYKINQHLRQFLAQIMKTWKTKIRLETQTERIQTEELYIRRGIFQGDSLSALWFCLCLNPLSNILNRTEHGFNIRHQKGNQHKINHLLYMDDIKLYAATKTQLKELLKITEIFTLDVNMEFGISKCKVLHINKGQWKYHHETETINNETLDNMFDKETYKYLGFQQSTKLNHTHIKTELRTEFKNRLTKLLQTKLNSKYLTKAINTFAIPILTYSFGIIKWSQTDLENIHILIRSQFTKYRKLHPNACKERLTIERKAGGRGIIDIRSLHTKQIQALRKFFHTKQTSLHTATVKADKNYTPLDLSRVDHPADTHSHIQLQQEKMKTWSEKTLHGKHRYHIEQDHVNKKQSYTWLRDGQLFPETEGFLLAIQDKVILTRNYQKHIIKDPTITEDRCRKCHQQKETIEHITSGCKILAGTEYTARHDSAAKVVHQALATTYKLIENTDPYYKYTPTSVLENKDYKLYWDISIHTDKTVSANRPDITFQCKKEKVTYLIDIAVPNDTNIQTKYTEKISKYTDLATEIKRLWKQEKVIIVPLIISATGLTPTTFTPHLVQLGLNTNIHKNIQKSVILKTCNIVRSFLNTQ

SEQ ID NO: 19767 - protein, 863 aa, Pachyrhynchus sulphureomaculatus
MNGNASKRVTQGVDKIKSKSLKRTLPEIVDTLKQKLSVYAARLRRYKESNERKDTNNLFRRSEKQFYRKTMYNEQTIVTKTPNKQEIADYWKTVWSEPKLHNNNTLWIKAEEDKHKRLTEQENSTLTTEEITETIKHTHNWKCPGIDNIQNFWYKQFTTTHEALTHQINKAILQPHTLPTFLTQGITYVKPKSSDTTNPSNYRPITCLPTLYKIITAAISKKIEQHLTDNNIITEEQKGCRKNSRGCKEQLIIDSVIMGQTRKEHRNLHIGYIDYKKAFDSIPHSWLIRALEIYKINQHLRQFLAQIMKTWKTKIRLETPTERIETEEVYIRRGIFQGDSLSALWFCLCLNPLSNILNRTEHGFNIRHQKVNQHKINHLLYMDDIKLYAATQTQLKELLKITEIFTLDVNMEFGISKCKVLHINKGQWKRHHETETINNETLDNMFDKETYKYLGFQQSTKLNHTHIKTELRTEFKNRLTKLLQTKLNSKNLTKAINTFAIPVLTYSFGIIKWSQTDIENIHILIRSQFTKYRKLHPNACKERLTIERKAGGRGIIDIRSLHTKQIQTLRKFFHSKQTSLHTATVKADKNYTPLDLARADHSADTHSHSQLQQEKMKTWSEKTLHGKHRYHIEQDHVNKKQSYTWLQDGQLFPETEGFLLAIQDKVILTRNYQKHIIKDPTIAEDRCRKCHQQKETIEHITSGCKILAGTEYTARHDSAAKVVHQALATTYKLIENTDPYYKYTPTSILENEDYKLYWDIGIHTDKTVSANRPDITFQCKKEKVTYLIDIAVPNDINIQTKYTEKISKYTDLATEIKRLWKQEKVIIVPLIISATGLTPTTFTPHLVQLGLNTNIHKKTFRSQ

SEQ ID NO: 19768 - protein, 1014 aa, Pachyrhynchus sulphureomaculatus
MNHSPPSTTSTQHHPESPLIQTLKAKMESHLARWSGTDPTTRNPIPRLIFRQSTQPILNTLNKHIIPQYITDLSTIEDIHTIIYAAAITTLTQNNQKLPQPQGNPNRTKPRFKWQIRIENKINNIRRDLGHLTQFISGNASKRVTQGANKIKSKSPNRTLPEILDTLKQKLSVYAARLRRYKESNERKDTNNLFRRSEKQFYRKTMYNKQIAVTEPPNEQELTDYWKSIWSEPKLHNNNTPWIKAEEDKHKHVTEQENTTFNTQEITETIKHTHNWKCPGIDNIQNFWYKQFTTTHEALTHQINKAILQPHTFPTFLTQGITYVKPKSSDTTNPSNYRPITCLPTLYKIITATISKKIEQHLTDNNILTEEQKGCRKNSRGCKEQLIIDSVIMGQTRKEHRNLHIGYIDYKKAFDSIPHSWLIRALEIYKINQHLRQFLAQIMKTWKTKIRLETQTERIQTEELYIRRGIFQGDSLSALWFCLCLNPLSNILNRTEHGFNIRHQKVNQHKINHLLYMDDIKLYAATQTQLKELLKITEIFTLDVNMEFGISKCKVLHINKGQWKCHHETETINNETLDNMFDKETYKYLGFQQSTKLNHTHIKTELRTEFKNRLTKLLQTKLNSKNLTKAINTFAIPILTYSFGIIKWSQTDIENIHILIRSQFTKYRKLHPNACKERLTIERKAGGRGIIDIRSLHTKQIQALRKFFHSKQTSLHTATVKADKNYTPLDLARADHSADTHSHTQLQQEKMKTWSEKTLHGKHRYHIEQDHVNKKQSYTWLQDGQLFPETEGFLLAIQDKVILTRNYQKHIIKDPTIAEDRCRKCHQQKETIEHITSGCRILAGTEYTARHDSAAKVVHQALATTYKLIENTDPYYKYTPTSILENEDYKLYWDISIHTDKTVSANRPDITFQCKKGKVTYLIDIAVPNDTNIQTKYTEKISKYTDLATEIKRLWKQEKVIIVPLIISATGLTPITFTPHLVQLGLNTNIHKNIQKSVILKTCNIVRSFLNTQW

SEQ ID NO: 19769 - protein, 1141 aa, Pachyrhynchus sulphureomaculatus
MNRTVMHCYYTATKLETITSGYRPELHRLFLTEYPHLQLLVSEQRVIDQKRVITKNNRLTPLELQTIKDTVAVELNADQPSNRNNKADSEPASHTQPPSRTQQDPSPRRNITQNNIASTAQHHITDNNMNHSPPSTTSTQHHPESPLIQTLTAKMESHLARWSGTDPTTRNPIPRLIFRQSTQPILNTLNKHIIPQYITDLSTIEDIHTIIYAAAITTLTQNNQKLPQRQGNPNRTKPKFKWQIRIENKINNIRRDLGHLTQFISGNASKRVTQGANKIKSKSPNRTLPEILDTLKQKLSVYAARLRRYKESNERKDTNNLFRRSEKQFYRKTMYNKQIAVTEPPNKQELTDYWKSIWSEPKLHNNNTPWIKAEEDKHKHVTEQENTTLNTQEITEIIKHTHNWKCPGIDNIQNFWYKQFTTTHEALTHQINKAILQPHTFPTFLTQGITYVKPKSSDTTNPSNYRPITCLPTLYKIITATISKKIEQHLTDNNILTEEQKGCRKNSRGCKEQLIIDSVIMGQTRKEHRNLHIGYIDYKKAFDSIPHSWLIRALEIYKINQHLRQFLAQIMKTWKTKIRLETPTERIETEELYIRRGIFQGDSLSALWFCLCLNPLSNILNRTEHGFNIRHQKVNQHKINHLLYMDDIKLYAATQTQLKELLKTTEIFTLDVNMEFGISKCKVLHINKGQWKCHHETETINNETLDNMFDKETYKYLGFQQSTKLNHTHIKTELRTEFKNRLTKLLQTKLNSKNLTKAINTFAIPVLTYSFGIIKWSQTDIENIHILIRSQFTKYRKLHPNACKERLTIERKAGGRGIIDIRSLHTKQIQTLKKFFHSKQTSLHTATVKADKNYTPLDLARADHSADTHSHTQLQQEKMKTWSEKTLHGKHRYHIEQDHVNKKQSYTWLQDGQLFPETEGFLLAIQDKVILTRNYQKHIIKDPTIAEDRCRKCHQQKETIEHITSGCKILAGTEYTARHDSAAKVVHQALATTYKLIENTDPYYKYTPTSILENEEYKLYWDIGIHTDKTVSANRPDITFQCKKEKVTYLIDIAVPNDTNIQTKYTEKISKYTDLATEIKRLWKQEKVIIVPLIISATGLTPTTFTPHLVQLGLNTNIHKNIQKSVILKTCNIVRSFLNTQ

SEQ ID NO: 19770 - protein, 808 aa, Pachyrhynchus sulphureomaculatus
MYNKQIAVTEPPNKQELTDYWKSIWSEPKQHNNNTPWIKAEEDKHKHVTEQENTTFNTQEITETIKHTHNWKCPGIDNIQNFWYKQFTTTHEALTHQINKAILQPHTFPTFLTQGITYVKPKSSDTTNPSNYRPITCLPTLYKIITATISKKIEQHLTDNNILTEEQKGCRKNSRGCKEQLIIDSVIMGQTRKEHRNLHIGYIDYKKAFDSIPHSWLIRALEIYKINQHLRQFLAQIMKTWKTKIRLETQTERIQTEELYIRRGIFQGDSLSALWFCLCLNPLSNILNRTEHGFNIRHQKENQHKINHLLYMDDIKLYAATQTQLKELLKITEIFTLDVNMEFGISKCKVLHINKGQWKHHHETETINNETLDNMFDKETYKYLGFQQSTKLNHTHIKTELRTEFKNRLTKLLQTKLNSKNLTKAINTFAIPILTYSFGIIKWSQTDIENIHILIRSQFTKYRKLHPNACKERLTIERKAGGRGIIDIRSLHTKQIQTLRKFFHSKQTSLHTATVKADKNYTPLDLARADHSADTHSHTQLQQEKMKTWSEKTLHGKHRYHIEQDHVNKKQSYTWLRDGQLFPETEGFLLAIQDKVIFSRNYQKHIIKDPTIAEDRCRKCHQQKETIEHITSGCKILAGTEYTARHDSAAKAVHQALATTYRLIENTDPYYKYTPTSILENEDYKLYWDIGIHTDKTVSANRPDITFQCKKGKVTYLIDIAVPNDTNIQAKYTEKISKYTDLATEIKRLWRQEKVIIVPLIISATGLTPITFTPHLEQLGLNTDIHRNIQKSVILKTCNIVRSFLNTE

SEQ ID NO: 19771 - protein, 807 aa, Pachyrhynchus sulphureomaculatus
MYNKQIAVTEPPNKQELTDYWKSIWSEPKLHNNNTPWIKAEEDKHKHVTEQENTTLNTQEITETIKHTHNWKCPGIDNIQNFWYKQFTTTHEALTHQINKAILQPHTFPTFLTQGITYVKPKSSDTTNPSNYRPITCLPTLYKIITATISKKIEQHLTDNNILTEEQKGCRKNSRGCKEQLIIDSVIMGQTRKEHRNLHIGYIDYKKAFDSIPHSWLIRALEIYKINQHLRQFLAQIMKTWKTKIRLETQTERIQTEELYIRRGIFQGDSLSALWFCLCLNPLSNILNRTEHGFNIRHQKVNQHKINHLLYMDDIKLYAATQTQLKKLLKITEIFTLDVNMEFGISKCKVLHINKGQWKCHHETETINNETLDNMFDKETYKYLGFQQSTKLNHTHIKTELRTEFKNRLTKLLQTKLNSKNLTKAINTFTIPILTYSFGIIKWSQTDIENINILIRSQFTKYRKLHPNACKERLTIERKAGGRGIIDIRSLHTKQIQALRKFFHSKQTSLHTATVKADKNYTPLDLSRADNSADTHSHTQLQQEKMKTWSEKTLHRKHRYHIEQDHVNKKQSYTWLQDGQLFPETEGFLLAIQDKVILTRNYQKHIIKDPTIAEDRCRKCHQQKETIEHITSGCSILAGTEYTARHDSAAKVVHQALATTYELIENTDPYYKYTPTSILENEDYKLYWDISIHTDKTVSANRPDITFQCKKGKLTYLIDIAVPNDTNIQTKYTEKISKYTDLATEIKRLWKQEKVIIVPLIISATGLTPITFTPHLVQLGLNTNIHKNIQKSVILKTCNIVRSFLNT

SEQ ID NO: 19772 - protein, 1481 aa, Pachyrhynchus sulphureomaculatus
MLKNNNYNNENGRVLRRRTPVVQTAIATPQQQQLQTNQTTASVETTPDSFTRSDIVGDGNCLFRAVSLHLYGHQNHHEKLREVALRYLQQNWSELHTFSLIEVDDIKDFNNYYNYMRKNGTYGTSLEILALSETQNSNFHIFSKQRRTRHTKITFTDRPTIISTGKYNKTIYLLLTGDPMSGHFELLTPQNIENIPENNRSIKEASGERRNGRGRRGKWQLDQNDEDQATENGHAKSVVSATKPTPTKAGKSQQRMSCTTGINEHAMRCCNENTKPDKEITEKRITRRLDPPTSIPSATDVDTGQTQPPKPGQGPYVLQGQHATTKAGKPRQRLKWTDEMNRTVMRCYYTATKLETITSGYRQQLHRLFLTEYPHLQLLVSEQRVVDQKRVITKNNRLTPLELQTIKEPVAVELNTDQPNNRNNKADSEPASHTQPPSRTQQYPPPRRSITQNNIASTAQHHITDNNMNHSPPSTTSTQHHPESPLIQTLKAKMESHLARWSGTDPTTRNPIPRLIFRQSTQPILNTLNKHIIPQYITDSSTIEDIHTIIYAAAITALTQNNQKLPQRQGNPNRTKPKFKWQIRIENKINNIRRDLGHLTQFISGNASKRVTQGANKIKSKSPNRTLPEILDTLKQKLSVYAARLRRYKESNERKDTNNLFRRSEKQFYRKTMYNKQIAVTEPPNKQELTDYWKSIWSEPKQHNNNTPWIKAEEDKHKHVTEQENTTFNTQEITETIKHTHNWKCPGIDNIQNFWYKQFTTTHEALTHQINKAILQPHTFPTFLTQGITYVKPKSSDTTNPSNYRPITCLPTLYKIITATISKKIEQHLTDNNILTEEQKGCRKNSRGCKEQLIIDSVIMGQTRKEHRNLHIGYIDYKKAFDSIPHSWLIRALEIYKINQHLRQFLAQIMKTWKTKIRLETQTERIQTEELYIRRGIFQGDSLSALWFCLCLNPLSNILNRTEHGFNIRHQKENQHKINHLLYMDDIKLYAATQTQLKELLKITEIFTLDVNMEFGISKCKVLHINKGQWKHHHETETINNETLDNMFDKETYKYLGFQQSTKLNHTHIKTELRTEFKNRLTKLLQTKLNSKNLTKAINTFAIPILTYSFGIIKWSQTDIENIHILIRSQFTKYRKLHPNACKERLTIERKAGGRGIIDIRSLHTKQIQTLRKFFHSKQTSLHTATVKADKNYTPLDLARADHSADTHSHTQLQQEKMKTWSEKTLHGKHRYHIEQDHVNKKQSCTWLRDGQLFPETEGFLLAIQDKVILTRNYQKHIIKDPTIAEDRCRKCHQQKETIEHITSGCKILAGTEYTARHDSAAKVVHQALATTYRLIENTDPYYKYTPTSILENEDYKLYWDIGIHTDKTVSANRPDITFQCKKGKVTYLIDIAVPNDTNIQAKYTEKISKYTDLATEIKRLWRQEKVIIVPLIISATGLTPITFTPHLVQLGLNTDIHRNIQKSVILKTCNIVRSFLNTEW

SEQ ID NO: 19773 - protein, 1225 aa, Pachyrhynchus sulphureomaculatus
MSCTTGINEHAMRCCNENTKPDKEITEKRITRRLDPPTSIPSATDVDTGQTQPPKPGQGPYVLQGQHATTKAGKPRQRLKWTDEMNRTVMHCYYTATKLETITSGYRPELHRLFLTEYPHLQLLVSEQRVIDQKRVITKNNRLTPLELQTIKDTVAVELNADQPSNRNNKADSEPASHTQPPSRTQQDPSPRRSITQNNIASTAQHHITDNNMNHSPPSTTSTQHHPESPLIQTLTAKMESHLARWSGTDPTTRNPIPRLIFRQSTQPILNTLNKHIIPQYITDLSTIEDIHTIIYAAAITTLTQNNQKLPQRQGNPNRTKPKFKWQIRIENKINNIRRDLGHLTQFISGNASKRVTQGANKIKSKSPNRTLPEILDTLKQKLSVYAARLRRYKESNERKDTNNLFRRSEKQFYRKTMYNKQIAVTEPPNKQELTDYWKSIWSEPKLHNNNTPWIRAEEDKHKHVTEQENTTLNTQEITETIKHTHNWKCPGIDNIQNFWYKQFTTTHEALTHQINKAILQPHTFPTFLTQGITYVKPKSSDTTNPSNYRPITCLPTLYKIITATISKKIEQHLTDNNILTEEQKGCRKNSRGCKEQLIIDSVVMGQTRKEHRNLHIGYIDYKKAFDSIPHSWLIRALEIYKINQHLRQFLAQIMKTWKTKIRLETPTERIETEELYIRRGIFQGDSLSALWFCLCLNPLSNILNRTEHGFNIRHQKVNQHKINHLLYMDDIKLYAATQTQLKELLKTTEIFTLDVNMEFGISKCKVLHINKGQWKCHHETETINNETLDNMFDKETYKYLGFQQSTKLNHTHIKTELRTEFKNRLTKLLQTKLNSKNLTKAINTFAIPVLTYSFGIIKWSQTDIENIHILIRSQFTKYRKLHPNACKERLTIERKAGGRGIIDIRSLHTKQIQTLRKFFHSKQTSLHTATVKADKNYTPLDLARADHSADTHSHTQLQQEKMKTWSEKTLHGKQRYHIEQDHVNKKQSYTWLQDGQLFPETEGFLLAIQDKVILTRNYQKHIIKDPTIAEDRCRKCHQQKETIEHITSGCKILAGTEYTARHDSAAKVVHQALATTYKLIENTDPYYKYTPTSILENEEYKLYWDIGIHTDKTVPANRPDITFQCKKEKVTYLIDIAVPNDTNIQTKYTEKISKYTDLATEIKRLWKQEKVIIVPLIISATGLTPTTFTPHLVQLGLNTNIHKNIQKSVILKTCNIVRSFLNTQ

SEQ ID NO: 19774 - protein, 1302 aa, Pachyrhynchus sulphureomaculatus
MSGHFELLTPQNTENIPENNRPIKEASGERRNGRGRRGKWQLDQNDEDQATENGPAKSVVLATKPTPTKAGKSQQRMSCTTGINEHAMRCCNENTKPDKEITEKRITRRLDPPTSIPSATDVDTGQTQPPKPGRGPYVLQGQHATTKAGKPRQRLKWTDEMNRTVMRCYYTATKLETITSGYRQQLHRLFLTEYPHLQLLVSEQRVVDQKRVITKNNRLTPLELQTIKDTVAVELNTDQPNNRNNKADSEPASHTQPPSRTQQYPPPRRSITQNNIASTAQHHITDNNMNHSPPSTTSTQHHPESPLIQTLKAKMESHLARWSGTDPTTRNPIPRLIFRQSTQPILNTLNMHIIPQYITDSSTIEDIHTIIYAAAITTLTQNNQKLPQRQGNPNRTKPKFKWQIRIENKINNIRRDLGHLTQFISGNASKRVTQGANKIKSKSPNRTLPEILDTLKQKLSVYAARLRRYKESNERKDTNNLFRRSEKQFYRKTMYNKQIAVTEPPNKQELTDYWKSIWSEPKQQNNNTPWIKAEEDKHKHVTEQENTTFNTQEITETIKHTHNWKCPGIDNIQNFWYKQFTTTHEALAHQINKAILQPHTFPTFLTQGITYVKPKSSDTTNPSNYRPITCLPTLYKIITATISKKIEQHLTDNNILREEQKGCRKNSRGCKEQLIIDSVIMGQTRKEHRNLHIGYIDYKKAFDSIPHSWLIRALEIYKINQHLRQFLAQIMKTWKTKIRLETQTERIQTEELYIRRGIFQGDSLSALWFCLCLNPLSNILNRTEHGFNIRHQKENQHKINHLLYMDDIKLYAATQTQLKELLKITEIFTLDVNMEFGISKCKVLHINKGQWKHHHETETINNETLDNMFDKETYKYLGFQQSTKLNHTHIKTELRTEFKNRLTKLLQTKLNSKNLTKAINTFAIPILTYSFGIIKWSQTDIENIHILIRSQFTKYRKLHPNACKERLTIERKAGGRGIIDIRSLHTKQIQTLRKFFHSKQTSLHTATVKADKNYTPLDLARADHSADTHSHTQLQQEKMKTWSEKTLHGKHRYHIEQDHVNKKQSYTWLRDGQLFPETEGFLLAIQDKVILTRNYQKHIIKDPTIAEDRCRKCHQQKETIEHITSGCKILAGTEYTARHDSAAKVVHQALATTYRLIENTDPYYKYTPTSILENEDYKLYWDIGIHTDKTVSANRPDITFQCKKGKVTYLIDIAVPNDTNIQAKYTEKISKYTDLATEIKRLWRQEKVIIVPLIISATGLTPITFTPHLVQLGLNTDIHRNIQKSVILKTCNIVRSFLNTEW

SEQ ID NO: 19775 - protein, 902 aa, Pachyrhynchus sulphureomaculatus
MANKNRKQNQQHQERSRTSYPVFISGNASKRVTQGANKIKSKSPNRTLPEILDTLKQKLSVYAARLRRYKESNERKDTNNLFRRSEKQFYRKTMYNKQIAVTEPPNKQELTDYWKSIWSEPKQHNNNTPWIKAEEDKHKHVTEQENTTFNTQEITETIKHTHNWKCPGIDNIQNFWYKQFTTTHEALTHQINKAILQPHTFPTFLTQGITYVKPKSSDTTNPSNYRPITCLPTLYKIITATISKKIEQHLTDNNILTEEQKGCRKNSRGCKEQLIIDSVIMGQTRKEHRNLHIGYIDYKKAFDSIPHSWLIRALEIYKINQHLRQFLAQIMKTWKTKIRLETQTERIQTEELYIRRGIFQGDSLSALWFCLCLNPLSNILNRTEHGFNIRHQKENQHKINHLLCMDDIKLYAATQIQLKELLKITEIFTLDVNMEFGISKCKVLHINKGQWKHHHETETINNETLDNMFDKETYKYLGFQQSTKLNHTHIKTELRTEFKNRLTKLLQTKLNSKNLTKAINTFAIPILTYSFGIIKWSQTDIENIHILIRSQFTKYRKLHPNACKERLTIERKAGGRGIIDIRSLHTKQIQTLRKFFHSKQTSLHTATVKADKNYTPLDLARADHSADTHSHTQLQQEKMKTWSEKTLHGKHRYHIEQDHVNKKQSYTWLRDGQLFPETEGFLLAIQDKVILTRNYQKHIIKDPTIAEDRCRKCHQQKETIEHITSGCKILAGTEYTARHDSAAKVVHQALATTYRLTENTDPYYKYTPTSILENEDYKLYWDIGIHTDKTVSANRPDITFQCKKGKVTYLIDIAVPNDTNIQAKYTEKISKYTDLATEIKRLWRQEKVIIVPLIISATGLTPITFTPHLVQLGLNTDIHRNIQKSVILKTCNIVRSFLNTEW

SEQ ID NO: 19776 - protein, 981 aa, Pachyrhynchus sulphureomaculatus
MVRHRPHNKKSHPSFNLQTEHATNPQHTKQAHNTSVYNRLKHNRRHSHNNIRSSNHHSNQNNQKLPQRQGNPNRTKPKFKWQIRIENKINNIRRDLGHLTQFISGNASKRVTQGANKIKSKSPNRTLPEILDTLKQKLSVYAARLRRYKESNERKDTNNLFRRSEKQFYRKTMYNKQIAVTEPPNKQELTDYWKSIWSEPKQHNNNTPWIKAEEDKHKHVTEQENTTFNTQEITETIKHTHNWKCPGIDNIQNFWYKQFTTTHEALAHQINKAILQPHTFPTFLTQGITYVKPKSSDTTNPSNYRPITCLPTLYKIITATISKKIEQHLTDNNILTEEQKGCRKNSRGCKEQLIIDSVIMGQTRKEHRNLHIGYIDYKKAFDSIPHSWLIRALEIYKINQHLRQFLAQIMKTWKTKIRLETQTERIQTEELYIRRGIFQGDSLSALWFCLCLNPLSNILNRTEHGFNIRHQKENQHKINHLLYMDDIKLYAATQTQLKELLKITEIFTLDVNMEFGISKCKVLHINKGQWKHHHETETINNETLDNMFDKETYKYLGFQQSTKLNHTHIKTELRTEFKNRLTKLLQTKLNSKNLTKAINTFAIPILTYSFGIIKWSQTDIENIHILIRSQFTKYRKLHPNACKERLTIERKAGGRGIIDIRSLHTKQIQTLRKFFHSKQTSLHTATVKADKNYTPLDLARADHSADTHSHTQLQQEKMKTWSEKTLHGKHRYHIEQDHVNKKQSYTWLRDGQLFPETEGFLLAIQDKVILTRNYQKHIIEDPTIAEDRCRKCHQQKETIEHITSGCKILAGTEYTARHDSAAKVVHQALATTYRLIENTDPYYKYTPISILENEDYKLYWDIGIHTDKTVSANRPDITFQCKKGKVTYLIDIAVPNDTNIQAKYTEKISKYTDLATEIKRLWRQEKVIIVPLIISATGLTPITFTPHLVQLGLNTDIHRNIQKSVILKTCNIVRSFLNTEW

SEQ ID NO: 19777 - protein, 1231 aa, Pachyrhynchus sulphureomaculatus
MNTPCVAVMKSHLTKKSLTRESRRLDPPPPIPSATDVDAGQIQPPKPGQTAYVLQGQHATTKAGKPRQRLKWTDEMNRTVMRCYYTATKLETVTSGYRLELHRLFLTEYPYLQLLVTEQRVIDQKRVITKNNRLTPFELQTIKDTVAAELSTDQVAAELNTDQPNNRNSRANTEPISHTQLPSRKQQDPPPSRSITQNNISIQITSTTQHHITDDKMNNSPSSRTSAQHNPESSLIQTLKAEMQSHLARWSGTDPTTRNPIPRLIFKQSTQIILNTINNHIIPQYITDLSTIEDIHTIIYAAAITTITQNNQKLPQRQRVPNSRKSKFKWQIRIENKINNIRRDLGHLTQFMNGNASKRVTQGVDKIKSKSLNRTLPEIVDTLKQKLSVYAARLRRYKESNERKDTNNLFRRSEKQFYRKTMYNEQTVVTEPPNKQELADYWKTVWSEPKLHNNNTPWIKAEEDKHKRVTEQENSTLTTEEITETIKHTHNWKCPGIDNIQNFWYKQFTTTHEALTHQINKAILQPHTFPTFLTQGITYIKPKSSDTTNPSNYRPITCLPTLYKIITATISKKIEQHLIDNNILTEEQKGCRKKNSRGCKEQLIIDSVIMGQTRKEHRNLHIGYIDYKKAFDSIPHSWLIRALEIYKINQHLRQFLAQIMKTWKTKIRLETQTERIQTEELYIRRGIFQGDSLSALWFCLCLNPLSNILNRTEHGFNIRHQKVNQHKINHLLYMDDIKLYAATKTQLKELLKITEIFTLDVNMEFGISKCKVLHINKGQWKYHHETETINNETLDNMFDKETYKYLGFQQSTKLNHTHIKTELRTEFKNRLTKLLQTKLNSKNLTKAINTFAIPILTYSFGIIKWSQTDIENIHILIRSQFTKYRKLHPNACKERLTIERKAGGRGIIDIRSLHTKQIQALRKFFHTKQTSLHTATIKADKNYTPLDLSRVDHAADTHSHTQLQQEKMKTWSEKTLHGKHRYHIEQDHVNKKQSYTWLRDGQLFPETEGFLLAIQDKVILTRNYQKHIIKDPTITEDRCRKCHQQKATIEHITSGCKILAGTEYTARHDSAAKVVHQALATTYKLIENTDPYYKYTPTSVLENKDYKLYWDISIHTDKTVSANRPDITFQCKKRKVTYLIDIAVPNDTNIQTKYTEKISKYTDLATEIKRLWKQEKVIIVPLIISATGLTPTTFTPHLEQLGLNTNIHKNIQKSVILKTCNIVRSFLNTQW

SEQ ID NO: 19778 - protein, 1164 aa, Pachyrhynchus sulphureomaculatus
MKTRQPKMDLPKVLCWRLSRHHQGGGKSQQRMSCTTGINEHAMRCCNENTKPDKEITEKRITRRLDPPTSSATDVDTGQTQPPKPGQGPYVLQGQHATTKAGKPRQRLKWTDEMNRTVMRCYYTATKLETITSGYRQQLHRLFLTEYPHLQLLVSEQRVVDQKRVITKNNRLTPLELQTIKDTVAVELNTDQPNNRNNKADSEPASHTQPPSRTQQYPPPRRSITQNNIASTAQHHITDNNMNHSPPSTTSTQHHPESPLIQTLKAKMESHLARWSGTDPTTRNPIPRLIFRQSTQPILNTLNKHIIHQYITDSSTIEDIHTIIYAAAITTLTQNNQKLPQRQGNPNRTKPKFKWQIRIENKINNIRRDLGHLTQFISGNASKRVTQGANKIKSKSPNRTLPEILDTLKQKLSVYAARLRRYKESNERKDTNNLFRRSEKQFYRKTMYNKQIAVTEQPNKQELTDYWKSIWSEPKQHNNNTPWIKAEEDKHKHVTEQENTTFNTQEITETIKHTHNWKCPGIDNIQNFWYKQFTTTHEALTHQINKAILQPHTFPTFLTQGITYVKPKSSDTTNPSNYRPITCLPTLYKIITATISKKIEQHLTDNNILTEEQKGCRKNSRGCKEQLIIDSVIMGQTRKEHRNLHIGYIDYKKAFDSIPHSWLIRALEIYKINQHLRQFLAQIMKTWKTKIRLETQTERIQTEELYIRRGIFQGDSLSALWFCLCLNPLSNILNRTEHGFNIRHQKENQHKINHLLYMDDIKLYAATQTQLKELLKITEIFTLDVNMEFGISKCKVLHINKGQWKHHHETETINNETLDNMFDKETYKYLGFQQSTKLNHTHIKTELRTEFKNRLTKLLQTKLNSKNLTKAINTFAIPILTYSFGIIKWSQTDIENIHILIRSQFTKYRKLHPNACKERLTIERKAGGRGIIDIRSLHTKQIQTLRKFFHSEQTSLHTATVKADKNYTPLDLARADHSADTHSHTQLQQEKMKTWSEKTLHGKHRYHIEQDHVNKKQSYTWLRDGQLFPETEGFLLAIQDKVILTRNYQKHIIKDPTIAEDRCRKCHQQKETIEHITSGCKILAGTEYTARHDSAAKVVHQALATTYRLIENTDPYYKYTPTSILENEDYKLYWNIGIHTDKTVSANRPDITFSVQKRKSHLSD

SEQ ID NO: 19779 - protein, 1306 aa, Pachyrhynchus sulphureomaculatus
MIYNIYKMQCLSVCLSVCPLVRLSCENHLSDLPVFFNSYLYSLARLYNNNNNNNNNSLPPAKSVVSATKPTPTKAGKSQQRMSCTTGINEYAMRCCNENTKPDKEITEKRITRRLDPPTSIPSTTDVDTGQTQPPKPGQGPYVLQGQHATTKAGKPRQRLKWTDEMNRTVMRCYYTATKLETITSGYRQQLHRLFLTEYPHLQLLVSEQRVIDQKRVITKNNRLTPLELQTIKDTVAVELNTDQPNNRNNKADSEPASHTQPPSRTQQYPPPRRSITQNNIASTAQHHITDNNMNHSPPSTTSTQHHPESPLIQTLKAKMESHLARWSGTDPTTRNPIPRLIFRQSTQPILNTLNKHIIPQYITDLSTIEDIHTIIYAAAITTLTQNNQKLPQRQGNPNRTKPKFKWQIRIENKINNIRRDLGHLTQFISGNASKRVTQGANKIKSKSPNRTLPEILDTLKQKLSVYAARLRRYKESNERKDTNNLFRRSEKQFYRKTMYNKQIAVTEPPNKQELTDYWKSIWSEPKLHNNNTPWIKAEEDKHKHVTEQEDTTFNTQEITETIKHTHNWKCPGIDNIQNFWYKQFTTTHEALTHQINKAILQPHTFPNFLTQGITYVKPKSSDTTNPSNYRPITCLPTLYKIITATISKKIEQHLTDNNILTEEQKGCRKNSRGCKEQLIIDSVIMGQTRKEHRNLHIGYIDYKKAFDSIPHSWLIRALEIYKINQHLRQFLAQIMKTWKTKIRLETQTERIQTEELYIRRGIFQGDSLSALWFCLCLNPLSNILSRTEHGFNIRHQKVNQHKINHLLYMDDIKLYAATQTQLKELLKITEIFTLDVNMEFGISKCKVLHINKGQWKGHHETETINNETLDNMFDKETYKYLGFQQSTKLNHTHIKTELRTEFKNRLTKLLQTKLNSKKLTKAINTFAIPILTYSFCIIKWSQTDIENIHILIRSQFTKYRKLHPNACKERLTIERKAGGRGIIDIRSLHTKQIQTLRKFFHSKQTSLHTATVKADKNYTPLDLARADHSADTHSHTQLQQEKMKTWSEKTLHGKHRYHIEQDHVNKKQSYTWLRDGQLFPETEGFLLAIQDKVILTRNYQKYIIKDPTIAEDRCRKCHQQKETIEHITSGCKILAGTEYTARHDSAAKVVHQALATTYRLIENTDPYYKYTPTSILENEDYKLYWDIGIHTDKTVSANRPDITFQCKKGKVTYLIDIAVPNDTNIQAKYTEKISKYTDLATEIKRLWRQEKVIIVPLIISATGLTPITFTPHLVQLGLNTDIHRNIQKSVILKTCNIVRSFLNTE

SEQ ID NO: 19780 - protein, 1142 aa, Pachyrhynchus sulphureomaculatus
MNKTVMRCYYTATKLETVTSGYRLELHRLFLTEYPHLQLLVTEQRVIDQKRVITKNNRLTPFELQTIKDTVAAELNADQVAAELNTDQLNNRNSRADTEPISHTKPPSRKQQDPPPSRSITQNNISEQIASTTRHSTTSIQHHPESPLIQTLKAEMQSHLARWSGTDPTTRNPIPRLTFKQSTQMILNTINKHIIPQYITDLSTIEDIHTIIYAAAITTITQNNQKLPQRQRDPNSRKPKFKWQIRIENKINNIRRDLGHLTQFMNGNASKRVTQGVDKIKSKSLNRTLPEIVDTLKQKLSVYAARLRRYKESNERKDTNNLFRRSEKQFYRKTMYNEQTVVTEPPNKQELADYWKTVWSEPKIHNNNTSWIKAEEDKHKRVTEQENSTLTTEEITETIKHTHNWKCPGIDNIQNFWYKQFTTTHEALTHQINKAILQPHTFPTFLTQGITYVKPKSSDTTNPSNYRPITCLPTLYKIITAAISKKIEQHLTDNNIITEEQKGCRKNSRGCKEQLIIDSVIMGQTRKEHRNLHIGYIDYKKAFDSIPHSWLIRALEIYKINQHLRQFLAQIMKTWKTKIRLETQTERIQTEELYIRRGIFQGDSLSALWFCLCLNPLSNILNRTEHGFNIRHQKGNQHKINHLLYMDDIKLYAATKAQLKELLKITEIFTLDVNMEFGISKCKVLHINKGQWKYHHETETINNETLDNMFDKETYKYLGFQQSTKLNHTHIKTELRTEFKNRLTKLLQTKLNSKYLTKAINTFAIPILTYSFGIIKWSQTDLENIHILIRSQFTKYRKLHPNACKERLTIERKAGGRGIIDIRSLHTKQIQALRKFFHTKQTSLHTATVKADKNYTPLDLSRVDHPADTHSHIQLQQEKMKTWSEKTLHGKHRYHIEQDHVNKKQSYTWLRDGQLFPETEGFLLAIQDKVILTRNYQKHIIKDPTITEDRCRKCHQQKETIEHITSGCKILAGTEYTARHDSAAKVVHQALATTYKLIENTDPYYKYTPTSVLENKDYKLYWDISIHTDKTVSANRPDITFQCKKEKVTYLIDIAVPNDTNIQTKYTEKISKYTDLATEIKRLWKQEKVIIVPLIISATGLTPTTFTPHLVQLGLNTNIHKNIQKSVILKTCNIVRSFLNTQ

SEQ ID NO: 19781 - protein, 1480 aa, Pachyrhynchus sulphureomaculatus
MSKNNNYSNDNGRVLRRRTPVVQTAIATPQQQQPQTTQTTASAETTPDSFTRSDIVGDGNCLFRAVSLHLYGHQNHHEKLREVALRYLQQNWSELHTFSLIEVDDIKDFNNYYNYMRKNGTYGTSLEILALSETQNSNFHIFSKQRRTRHTKITFTDRPTIISTGKYNKTIYLLLTGNPMSGHFELLTPQNIENIPDNSRPIKEASGERRNGRGRRGKWQLDQNDEDQATENGPAQSVVPASKPTPTKAGKSQQRMSFTTGINEHAMRCCNEITPDKEITDKRITRRLDPPPPIPNATDVNAGQIQPPKPGQTTYVLQGQHATTKAGKPRQRLKWTDEMNKTVMRCYYTATKLETVTSGYRLELHRLFLTEYPHLQLLVTEQRVIDQKRVITKNNRLTPFELQTIKDTVAAELNADQVAAELNTDQLNNRNDRADTEPISHTQPPSRKQQDPPPSRSITQNNISEQIASTTRHSTTSIQHHPESPLIQTLKAQMQSHLARWSGTDPTTRNPIPRLIFKQSTQMILNTINKHIIPQYITDLSTIEDIHTIIYAAAITTITQNNQKLPQRQRDPNSRKPKFKWQIRIENKINNIRRDLGHLTQFMNGNASKRVTQGVDKIKSKSLNRTLPEIVDTLKQKLSVYAARLRRYKESNERKDTNNLFRRSEKQFYRKTMYNEQTVVTEPPNKQELADYWKTVWSEPKLHNNNTSWIKAEEDKHKRVTEQENSTLTTEEITETIKHTHNWKCPGIDNIQNFWYKQFTTTHEALTYQINKAILQPHTFPTFLTQGITYVKPKSSDTTNPSNYRPITCLPTLYKIITAAISKKIEQHLTDNNIITEEQKGCRKNSRGCKEQLIIDSVIMGQTRKEHRNLHIGYIDYKKAFDSIPHSWLIRALEIYKINQHLRQFLAQIMKTWKTKIRLETQTERIQTEELYIRRGIFQGDSLSALWFCLCLNPLSNILNRTEHGFNIRHQKGNQHKINHLLYMDDIKLYAATKTQLKELLKITEIFTLDVNMEFGINKCKVLHINKGQWKYHHETETINNETLDNMFDKETYKYLGFQQSTKLNHTHIKTELRTEFKNRLTKLLQTKLNSKYLTKAINTFAIPILTYSFGIIKWSQTDLENIHILIRSQFTKYRKLHPNACKERLTIERKAGGRGIIDIRSLHTKQIQALRKFFHTKQTSLHTATVKADKNYTPLDLSRVDHPADTHSHIQLQQEKMKTWSEKTLHGKHRYHIEQDHVNKKQSYTWLRDGQLFPETEGFLLAIQDKVILTRNYQKHIIKDPTITEDRCRKCHQQKETIEHITSGCKILAGTEYTARHDSAAKVVHQALATTYKLIENTDPYYKYTPTSVLENKDYKLYWDISIHTDKTVSANRPDITFQCKKEKVTYLIDIAVPNDTNIQTKYTEKISKYTDLATEIKRLWKQEKVIIVPLIISATGLTPTTFTPHLVQLGLNTNIHKNIQKSVILKTCNIVRSFLNTQ

SEQ ID NO: 19782 - protein, 1014 aa, Pachyrhynchus sulphureomaculatus
MNHSPPSTTSTQHQPESRLIQTLKAKMESHLARWSGTDPTTRNPIPRLIFRQSTQPILNTLNKHIIPQYITDSSTIEDIHTIIYAAAITTLTQNNQKLPQRQGNPNRTKPKFKWQIRIENKINNIRRDLGHLTQFISGNASKRVTQGSNKIKSKSPNRTLSEILDTLKQKLCVYAARLRRYKESNERKDTNNLFRRSEKQFYRKTMYNKQIAVTEPPNKQELTDYWKSIWSEPKQHNNNTPWIKADEDKHKHVTEQENTTFNTQEITETIKHTHNWKCPGIDNIQNFWYKQFTTTHEALTHQINKAILQPHTFPTFLTQGITYVKPKSSDTTNPSNYRPITCLPTLYKIITATISKKIEQHLTDNNILTEEQKGCRKNSRGCKEQLIIDSVIMGQTRKEHRNLHIGYIDYKKAFDSIPHSWLIRALEIYKINQHLRQFLAQIMKTWKTKIRLETQTERIQTEELYIRRGIFQGDSLSALWFCLCLNPLSNILNRTEHGFNIRHQKENQHKINHLLYMDDIKLYAATQTQLKELLKITETFTLDVNMEFGISKCKVLHINKGQWKHHHETETINNETLDNMFDKETYKYLGFQQSTKLNHTHIKTELRTEFKNRLTKLLQTKLNSKNLTKAINTFAIPILTYSFGIIKWSQTDIENIHILIRSQFTKYRKLHPNACKERLTIERKAGGRGIIDIRSLHTKQIQTLRKFFHSKQTSLHTATVKADKNYTPLDLARADHSADTHSHTQLQQEKMKTWSEKTLHGKHRYHIEQDHVNKKQSYTWLRDGQLFPETEGFLLAIQDKVILTRNYQKHIIKDPTIAEDRCRKCHQQKETIEHITSGCKILAGTEYTARHDSAAKVVHQALATTYRLIENTDPYYKYTPTSILENEDYKLYWDIGIHTDKTVSANRPDITFQCKKGKVTYLIDIAVPNDTNIQAKYTEKISKYTDLATEIKRLWRQEKVIIVPLIISATGLTPITFTPHLVQLGLNTDIHRNIQKSVILKTCNIVRSFLNTEW

SEQ ID NO: 19783 - protein, 1256 aa, Pachyrhynchus sulphureomaculatus
MKTRQPKMDLPKVLCRRLSRHPPRREKSQQRMSCTTGINEHAMRCCNENTKLDKEITEKRITRRLDPPTSIPSTTDVDTGQTQPPKPGQGPYVLQGQHATTKAGKPRQRLKWTDEMNRTVMRCYYTATKLETITSGYRQQLHRLFLTEYPHLQLLVSEQRVIDQKRVITKNNRLTPLELQTIKDIVAVELNTDQPNNRNNKADSEPASHTQPPSRTQQYPPPRRSITQNNITSTAQHHITDNNMNHSPPSTTSTQHHPESPLIQTLKAKMESHLARWSGTDPTNKKSHPSFNLQTEHATNPQHTKQAHNTSVYNNLSTIEDIHTIIYAAAITTLTQNNQKLPQRQGNPNRTKPKFKWQIRIENKINNIRRDLGHLTQFISGNASKRVTQGANKIKSKSPNRTLSEILDTLKQKLSVYAARLRRYKESNERKDTNNLFRRSEKQFYRKTMYNKQIAVTEPPNKQELTDYWTSIWSEPKLYNNNTLWIKAEEDKHKHVTEQEDTTFNTQEITETIKHTHNWKCPGIDNIQNFWYKQFTTTHEALTHQINKAILQPHTFPTFLTQGITYVKPKSSDTTNPSNYRPITCLPTLYKIITATISKKIEQHLTDNNILTEEQKGCRKNSRGCKEQLIIDSVIMGQTRKEHRNLHIGYIDYKKAFDSIPHSWLIRALEIYKINQHLRQFLAQIMKTWKTKIRLETQTERIQTEELYIRRGIFQGDPLSALWFCLCLNPLSNILSRTEHGFNIRHQKVNQHKINHLLYMDDIKLYAATQTQLKELLKITEIFTLDVNMEFGISKCKVLHINKGQWKGHHETETINNETLDNMFDKETYKYLGFQQGTKLNHTHIKTELRTEFKNRLTKLLQTKLNSKNLTKAINTFAIPILTYSFGIIKWSQTDIENIHILIRSQFTKYRKLHPNACKERLTIERKAGGRGIIDIRSLHTKQIQTLRKFFHSKQTSLHTATVKADKNYTPLDLARADHSADTHSHTQLQQEKMKTWSEKTLHGKHRYHIEQDHVNKKQSYTWLRDGQLFPETEGFLLAIQDKVILTRNYQKYIIKDPTIAEDRCRKCHQQKETIEHITSGCKILAGTEYTARHDSAAKVVHQALATTYRLIENTDPYYKYTPTSILENEDYKLYWDIGIHTDKTVSANRPDITFQCKKGKVTYLIDIAVPNDTNIQAKYTEKISKYTDLATEIKRLWRQEKVIIVPLIISATGLTPITFTPHLVQLGLNTNIHRNIQKSVILKTCNIVRLFLNTE

SEQ ID NO: 19784 - protein, 1480 aa, Pachyrhynchus sulphureomaculatus
MSKNNNYSNDNGRVLRRRTPVVQTAIATPQQQQPQTTQTTASAETTPDSFTRSDIVGDGNCLFRAVSLHLYGHQNHHEKLREVALRYLEQNWSELHTFSLIEVNDIKDFNNYYNYMRKNGTYGTSLEILALSETQNSNFHIFSKQRRTRHTKITFTDRPTIISTGKYNKTIYLLLTGNPMSGHFELLTPQNIENIPDNSRPIKEASGERRNGRGRRGKWQLDQNDEDQATENGPAQSVVPASKPTPTKAGKSQQRMSCTTGINEHAMRCCNEMTPDKEITDKRITRRLDPPPPIPSAIDVNAGQIQPPKPGQTAYVLQGQHATTKAGKPRQRLKWTDEMNKTVMRCYYTATKLETLTSGYRLELHRLFLTEYPHLQLLVTEQRVIDQKRVITKNNRLTPFELQTIKDTVAAELNADQVAAELNTDQLNNRNSRADTEPISHTQPPSRKQQDPPPSRSITQNNISEQIASTTRHSTTSIEHHPESPLIQTLKAEMQSHLARWSGTDPTTRNPIPRLIFKQSTQMILNTINKHIIPQYITDLSTIEDIHIIIYAAAITTITQNNQKLPQRQRDPNSRKPKFKWQIRIENKINNIRRDLGHLTQFMNGNASKRVTQGVDKIKSKSLNRTLPEIVDTLKQKLSVYAARLRRYKESNERKDTNNLFRRSEKQFYRKTMYNEQRVVTEPPNKQELADYWKTVWSEPKLHNNNTSWIKAEEDKHKRVTEQENSTLTTEEITETIKHTHNWKCPGIDNIQNFWYKQFTTTHEALTHQINKAILQPHTFPTFLTQGITYVKPKSSDTTNPSNYRPITCLPTLYKIITAAISKKIEQHLTDNNIITEEQKGCRKNSRGCKEQLIIDSVIMGQTRKEHRNLHIGYIDYKKAFDSIPHSWLIRALEIYKINQHLRQFLAQIMKTWKTKIRLETQTERIQTEELYIRRGIFQGDSLSALWFCLCLNPLSNILNRTEHGFNIRHQKGNQHKINHLLYMDDIKLYAATKAQLKELLKITEIFTLDVNMEFGISKCKVLHINKGQWKYHHETETINNETLDNMFDKETYKYLGFQQSTKLNHTHIKTELRTEFKNRLTKLLQTKLNSKYLTKAINTFAIPILTYSFGIIKWSQTDLENIHILIRSQFTKYRKLHPNACKERLTIERKAGGRGIIDIRSLHTKQIQALRKFFHTKQTSLHTATVKADKNYTPLDLSRVDHPADTHSHIQLQQEKMKTWSEKTLHGKHRYHIEQDHVNKKQSYTWLRDGQLFPETEGFLLAIQDKVILTRNYQKHIIKDPTITEDRCRKCHQQKETIEHITSGCKILAGTEYTARHDSAAKVVHQALATTYKLIENTDPYYKYTPTSVLENKDYKLYWDISIHTDKTVSANRPDITFQCKKEKVTYLIDIAVPNDTNIQTKYTEKISKYTDLATEIKRLWKQEKVIIVPLIISATGLTPTTFTPHLVQLGLNTNIHKNIQKSVILKTCNIVRSFLNTQ

SEQ ID NO: 19785 - protein, 798 aa, Pachyrhynchus sulphureomaculatus
MYNKQIAVTEPPNKQELTDYWKSIWSEPKLHNNNTPWIKAEEDKHKHVTEQENTTFNTQEITETIKHTHNWKCPGIDNIQNFWYKQFTTTHEALTHQINKAILQPHTFPTFLTQGITYVKPKSSDTTNPSNYRPITCLPTLYKIITATISKKIEQHLTDNNILTEEQKGCRKNSRGCKEQLIIDSVIMGQTRKEHRNLHIGYIDYKKAFDSIPHSWLIRVLEIYKINQHLRQFPAQIMKTWKTKIRLETQTERIQTKELYIRRGIFQGDSLSALWFCLCLNPLSNILNRTEHGFNIRHQKVNQHKINHLLYMDDIKLYAATQTQLKELLKITEIFTLDVNMEFGISKCKVLHIYKGQWKCHHETETINNETLDNMFDKETYKYLGFQQSTKLNHSHIKTELRTEFKSRLTKLLQTKLNSKNLTKAINTFAIPILTYSFGIIKWSQTDIENIHILIRSQFTKYRKLHPNACKERLTIERKAGGRGIIDIRSLHAKQIQTLRKFFHSKQTSLHTATVKADKNYTPLDLARADHSADTHSHTQLQQEKMKTWSEKTLHGKHRYHIEQDHVNKKQSYTWLRDGQLFPETEGFLLAIQDKVILTRNYQKYIIKDPTIAEDRCRKCHQQKETIEHITSGCKILAGTEYTARHDSAAKVVHQALATTYRLIENTDPYYKYTPTSILENEDYKLYWDIGIHTDKTVSANRPDITFQCKKGKVTYLIDIAVPNDTNIQAKYTEKISKYTDLATEIKRLWRQEKVIIVPPHYISHRPYTNNIHTTFSTIGTQHRHTQKHSEVSDFENM

SEQ ID NO: 19786 - protein, 1480 aa, Pachyrhynchus sulphureomaculatus
MLKNNNYNNENGRVLRRRTPVVQTAIATPQQQQLQTNQTTASVETTPDSFTRSDIVGDGNCLFRAVSLHLYGHQNHHEKLREVALRYLQQNWSELHTFSLIEVDDIKDFNNYYNYMRKNGTYGTSLEILALSETQNSNFHIFSKQRRTRHTKITFTDRPTIISTGKYNKTIYLLLTGNPMSGHFELLTPQNIENIPENNRPIKEASGERRNGRGRRGKWQLDQNDEDQATENGPAKSVVSATKPTPTKAGKSQQRMSCTTGINEHAMRCCNNNTKPDKEITEKRITRRLDPPTSIPSTTDVDTGQTQPPKPGQGPYVLQGQHATTKAGKPRQRLKWTDEMNRTVMRCYYTATKLETITSGYRQQLHRLFLTEYPHLQLLVSEQRVIDQKRVITKNNRLTPLELQTIKDTVAVELNTDQPNNRNNKADSEPASHTQPPSRTQQYPPPRRSITQNNIASTAQHHITDNNMNHSPPSTTSTQYHPESPLIQTLKAKMESHLARWSGTDPTTRNPIPRLIFRQSTQPILNTLNKHIIPQYITDLSTIEDIHTIIYAAAITTLTQNNQKLPQRQGNPNRTKPKFKWQIRIENKINNIRRDLGHLTQFISGNASKRVTQGANKIKSKSPNRTLPEILDTLKQKLSVYAARLRRYKESNERKDTNNLFRRSEKQFYRKTMYNKQIAVTEPPNKQELTDYWKSIWSEPKLHNNNTPWIKAEEDKHKHVTEQENTIFNTQEITETIKHTHNWKCPGIDNIQNFWYKQFTTTHEALTHQINKAILQPHTFPTFLTQGITYVKPKSSDTTNPSNYRPITCLPTLYKIITATISKKIEQHLTDNNILTEEQKGCRKDSRGCKEQLIIDSVIMGQTRKEHRNLHIGYIDYKKAFDSIPHSWLIRALEIYKINQHLRQFLAQIMKTWKTKIRLETQTERIQTEELYIRRGIFQGDSLSALWFCLCLNPLSNILNRTEHGFNIRHQKVNRHKINHLLYMDDIKLYAATQTQLKELLKITEIFTLDVNMEFGISKCKVLHINKGQWKCHHETETINNETLDNMFDKETYKYLGFQQSTKLNHTHIKTELRTEFKNRLTKLLQTKLNSKNLTKAINTFAIPILTYSFGIIKWSQTDIENIHILIRSQFTKYRKLHPNACKERLTIERKAGGRGIIDIRSLHTKQIQTLRKFFHSKQTSLHTATVKADKNYTPLDLARADHSADTHSHTQLQQEKMKTWSEKTLHGKHRYHIEQDHVNKKQSYTWLRDGQLFPETEGFLLAIQDKVILTRNYQKYIIKDPTIAEDRCRKCHQQKETIEHITSGCKILAGTEYTARHDSAAKVVHQALATTYRLIENTDPYYKYTPTSILENEDYKLYWDIGIHTDKTVSANRPDITFQCKKGKVTYLIDIAVPNDTNIQAKYTEKISKYTDLATEIKRLWRQEKVIIVPLIISATGLTPITFTPHLVQLGLNTDIHRNIQKSVILKTCNIVRSFLNTE

SEQ ID NO: 19787 - protein, 978 aa, Pachyrhynchus sulphureomaculatus
MVRHRPHNKKSHPSFNLQTEHATNPQHTKQAHNTSDLSTIEDIHTIIYAAAITTLTQNNQKLPQRQGNPNRTKPKFKWQIRIENKINNIRRDLGHLTQFISGNASKRVTRGANKIKSKSPNRTLPEILDTLKQKLSVYAARLRRYKESNERKDTNNLFRRSEKQFYRKTMYNKQIAVTEPPNEQELTDYWKSIWSEPKLHNNNTPWIKAEEDKHKHVTEQENTTFNTQEITETIKHTHNWKCPGIDNIQNFWYKQFTTTHEALTHQINKAILQPHTFPTFLTQGITYVKPKSSDITNPSNYRPITCLPTLYKIITATISKKIEQHLTDNNILTEEQKGCRKNSRGCKEQLIIDSVIMGKTRKEHRNLHIGYIDYKKAFDSIPHSWLIRALEIYKINQHLRQFLAQIMKTWKTKIRLETQTERIQTEELYIRRGIFQGDSLSALWSCLCLNPLSNILNGTEHGFNSRHQKVNQHKINHLLYMDDIKLYAATQTQLKEHLKITEIFTLDVNMEFGISKWKVLHINKGQWKCHHETETINNVTLDNMFDKETYKYLGFQQSTKLNHTHIKTELRTEFKNRLTKLLQTKLNSKNLTKAINTFAIPILTYSFGIIKWSQTDIENIHILIRSQFTKYRKLHPNACKERLTIERKAGGRGIIDIRSLHTKQIQTLRKFFHSKQTSLHTATVKADKNYTPLDLARADHSADTHSHTQLQQEEMKTWSEKTLHGKHRYHIEQDHVNKKQSYTWLQDGQLFPETEGFLLAIQDKVILTRNYQKHIIKDPTIAEDRCRKCCQQKETIEYITSGCKILAGTEYTARHDSAAKVVHQALAITYKLIENTDPYYKYTPTSILENEDYKLYWDIGIHTDKTVSANRPDITFQCKKGKVTYLIDIAVPNDTNIQTKYTEKISKYTDLATEIKRLWRQEKVIIVPLIISATGLTPITFTPHLVQLGLNTDIDRNIQKSVILKTCNIVRSFLNTEW

SEQ ID NO: 19788 - protein, 1135 aa, Pachyrhynchus sulphureomaculatus
MSCTTGINEHAMRCCNENTKPDKEITEKRITRRLEPPTSIPSATDVDTGQTQPPKPGQGPYVLQGQHATTKAGKPRQRLKWTDEMNRTVMRCYYTATKLETITSGYRQQLHRLFLTEYPHLQLLVSEQRVVDQKRVITKNNRLTPLELQTIKDTVAVELNTDQPNNRNNKADSEPASHTQPPSRTQQYPPPRRSITQNNIASTAQHRITDNNMNHSPPSTTSTQHHPESPLIQTLKAKMESHLARWSGTDPTTRNPIPRLIFRQSTQPILNTLNKHIIPQYITDSSTIEDIHTIIYATAITTLTQNNQKLPQRQGNPNRTKPTFKWQIRIENKINNIRRDLGHLTQFISGNASKRVIQGANKIKSKSPNRTLPEILDTLKQKLSVYAARLRRYKESNERKDTNNLFRRSEKQFYRKTMYNKQIAVTEPPNKQELTDYWKSIWSEPKQHNNNTPWIKAEEDKHKHVTEQENTTFNTQEITETIKHTHNWKCPGIDNIQNFWYKQFTTTHEALAHQINKAILQPHTFPTLLTQGITYVKPKSSDTTNPSNYRPITCLPTLYKIITATISKKIEQHLTDNNILTEEQKGCRKNSRGCKEQLIIDSVIMGQTRKEHRNLHIGYIDYKKAFDSIPHSWLIRALEIYKINQHLRQFLAQIMKTWKTKIRLETQTERIQTEELYIRRGIFQGDSLSALWFCLCLNPLSNILNRTEHGFNIRHQKENQHKINHLLYMDDIKLYAATQTQLKELLKITEIFTLDVNMEFGISKCKVLHINKGQWKHHHETETINNETLDNMFDKETYKYLGFQQSTKLNHTHIKTELRTEFKNRLTKLLQTKLNSKNLTKAINTFAIPILTYSFGIIKWSQTDIENIHILIRSQFTKYRKLHPNACKERLTIERKAGGRGIIDIRSLHTKQIQTLRKFFHSKQTSLHTATVKADKNYTPLDLARADHSADTHSHTQLQQEKMKTWSEKTLHGKHRYHIEQDHVNKKQSYTWLRDGQLFPETEGFLLAIQDKVILTRNYQKHIIKDPTIAEDRCRKCHQQKETIEHITSGCKILAGTEYTARHDSAAKVVHQALATTYRLIENTDPYYKYTPTSILENEDYKLYWDIGIHTDKTVSANRPDITFSVQKRKSHLSD

SEQ ID NO: 19789 - protein, 1475 aa, Pachyrhynchus sulphureomaculatus
MLKNNNYNNENGRVLRRRTPVVQTAIATPQQQQLQTNQTTASVETIPDSFTRSDIVGDGNCLFRAVSLHLYGHQNHHEKLREVALRYLQQNWSELHTFSLIEVNDIKDFNNYYNYMQKNGTYGTSLEILALSETQNSNFHIFSKQRRTRHTKITFTDRPTIISTGKYNKTIYLLLTGNPMSGHFELLTPQNIENIPENNRPIKEASGERRNGRGRRGKWQLDQNDEDQATENGPAKSVVSATKPTPTKAGKSQQRMSCTTGINEHAMRCCNENTKPDKEITEKRITRRLDPPTSIPSTTDVDTGQTQPPKPGQGPYVLQGQHATTKAGKPRQRLKWTDEMNRTVMRCYYTATKLETITSGYRQQLHRLFLTEYPHLQLLVSEQRVIDQKRVITKNNRLTPLELQTIKDTVAVELNTDQPNNRNNKADSEPASHTQPPSRTPRRSITQNNIASTAQHHITDNNMNHSPPSTTSTQHHPESPLIQTLKAKMESHLARWSGTDPTTRNPIPRLIFRQSTQPILNTLNKHIIPQYITDLSTIEDIHTIIYAAAITTLTQNNQKLPQRQGNPNRTKPKFKWQIRIENKINNIRRDLGHLTQFISGNASKRVTQGANKIKSKSPNRTLPEILDTLKQKLSVYAARLRRYKESNERKDTNNLFRRSEKQFYRKTMYNKQIAVTEPPNKQELTDYWKSIWSEPKLHNNNTPWIKAEEDKHKHVTEQEDTTFNTQEITETIKHTYNWKCPGIDNIQNFWYKQFTTTHEALTHQINKAILQPHTFPTFLTQGITYVKPKSSDTTNPSNYRPITCLPTLYKIITATISKKIEQHLTDNNILTEEQKGCRKNSRGCKEQLIIDSVIMGQTRKEHRNLHIGYIDYKKAFDSIPHSWLIRALEIYKINQHLRQFLAQIMKTWKTKIRLETQTERIQTEELYIRRGIFQGDSLSALWFCLCLNPLSNILSRTEHGFNIRHQKVNQHKINHLLYMDDIKLYAATQTQLKELLKITEIFTLDVNMEFSISKCKVLHINKGQWKCHHETETINNETLDNMFDKETYKYLGFQQSTKLNHTHIKTELRTEFKNRLTKLLQTKLNSKNLTKAINTFAIPILTYSFGIIKWSQTDIENIHILIRSQFTKYRKLHPNACKERLTIERKAGGRGIIDIRSLHTKQIQTLRKFFHSKQTSLHTATVKADKNYTPLDLARADHSADTHSHTQLQQEKMKTWSEKTLHGKHRYHIEQDHVNKKQSYTWLRDGQLFPETEGFLLAIQDKVILTRNYQKYIIKDPTIAEDRCRKCHQQKETIEHITSGCKILAGTEYTARHDSAAKVVHQALATTYRLIENTDPYYKYTPTSILENEDYKLYWDIGIHTDKTVSANRPDITFQCKKGKVTYLIDIAVPNDTNIQAKYTEKISKYTDLATEIKRLWRQEKVIIVPLIISATGLTPITFTPHLVQLGLNTDIHRNIQKSVILKTCNIVRSFLNTE

SEQ ID NO: 19790 - protein, 891 aa, Pachyrhynchus sulphureomaculatus
MANKNRKQNQQHQERSRTSYPVFISGNASKRVTQGANKIKSKSPNRTLPEILDTLKQKLSVYAARLRRYKESNERKDTNNLFRRSEKQFYRKTMYNKQIAVTEPPNKQELTDYWKSIWSEPKQHNNNTPWIKAEEDKHKHVTEQENTTFNTQEITETIKHTHNWKCPGIDNIQNFWYKQFTTTHEALTHQINTAILQPHTFPTFLTQGITYVEPKSSDTTNPSNYRPITCLPTLYKIITATISKKIEQHLTDHNILTEEQKGCRKNSRGCKEQLIIDSVIMGQTRKEHRNLHIGYIDYKKAFDSIPHSWLIRALEIYKINQHLRQFLAQIMKTWKTKIRLETQTERIQTEELYIRRGIFQGDSLSALWFCLCLNPLSNILNRTEHGFNIRHQKENQHKINHLLYMDDIKLYAATQTQLKELLKITEIFTLDVNMEFGISKCKVLHINKGQWKHHHETETINNETLDNMFDKETYKYLGFQQSTKLNHTHIKTELRTEFKNRLTKLLQTKLNSKNLTKAINTFAIPILTYSFGIIKWSQTDIENIHILIRSQFTKYRKLHPNACKERLTIERKAGGRGIIDIRSLHTKEIQTLRKFFHSKQTSLHTATVKADKNYTPLDLARADHSADTHSHTQLQQEKMKTWSEKTLHGKHRYHIEQDHVNKKQSYTWLRDGQLFPETERFLLAIQDKVILTRNYQKHIIKDPTIAEDRCRKCHQQKETIEHITSGCKILAGTEYTARHDSAAKVVHQALATTYRLIENTDPYYKYTPTSILENEDYKLYWDIGIHTDKTVSANRPDITFQCKKGKVTYLIDIAVPNDTNIQAKYTEKISKYTDLATEIKRLWRQEKSHHCPPHYISHRPYTNNIHTTFSAIGTQHEHTQKHSEVSDFENM

SEQ ID NO: 19791 - protein, 1278 aa, Pachyrhynchus sulphureomaculatus
MRKNGKYGTSLEILALSETQNSNFHIFSKQRRTRHTKISFTDRPTIISTGKYSKTIYLLLTGNPMSGHFELLTPQNIENIPDNTRPIKEASGERRNGRGRRGKWQLDQNDEDQATENGPAKSVVSASKPTPTKAGKSQQRMSCTTGINEHAMRCCNEITPDKEITDKRITRRLDPPPPIPSATDVDAGQIQPPKPGQTAYVLQGQHATTKAGKPRQRLKWTDEMNRTVMRCYYTSTKPETVTSGYRLELHRLFLTEYPHLQLLVTEQRVIDQKRVITKNNRLTPFELQTIKDTVAAELNTDQPNNRNSRADSEPVSHTQPPSRKQQDPPPSRSITQNNISMQIASTTRHHITDDKMNDTPPSTTSTQHHPESPLIQTLKAEMQSHLARWSGTDPTTRNPIPRLIFKQSTQIILNTINKHIIPQYITDLGTIEDIHTIIYAAAITTITQNNQKLPQRQRDPNSRKPKFKWQIRIENKISNIRRDLGHLTQFMNGNASKRVTQGVDKIKSKSLNRTLPEIVDTLKQKLSVYAARLRRYKESNERKDTNNLFRRSQKQFYRKTMYNEQTVVTEPPNKQELADCWKTVWSEPKLHNNNTPWIRAEEDKHKRVTEQENSTLTTEEITETIKHTHNWKCPGIDNIQNFWYKQFTTTHEALTHQINKAILQPHTFPTFLTQGITYIKPKSSDTTNPSNYRPITCLPTLYKIITATISKKIEQHLIDNNILTEEQKGCRKNSRGCKEQLIIDSVIMGQTRKEHRNLHIGYIDYKKAFDSIPHSWLIRALEIYKINQHLRQFLAQIMKTWKTKIRLETQTERIQTEELYIRRGIFQGDSLSALWFCLCLNPLSNILNRTEHGFNIRHQKVNQHKINHLLYMDDIKLYAATKTQLKELLKITEIFTLDVNMEFGISKCKVLHINKGQWKYHHETETINNETLDNMFDKETYKYLGFQQSTKLNQTHIKTELRTEFKNRLTKLLQTKLNSKNLTKAINTFAIPILTYSFGIIKWSQTDMENIHILIRSQFTKYRKLHPNACKERLTIERKAGGRGIIDIRSLHTKQIQALRKFFHTKQTSLHTTTVKADKNYTPLDLSRVDHPADTHSHTQLQQEKMKTWSEKTLHGKHRYHIEQDHVNKKQSYTWLWDGQLFPETEGFLLAIQDKVILTRNYQKHIIKDPTITEDRCRKCHQQKETIEHITGGCKILAGTEYTARHDSEAKVVHQALATAYKLIENTDPYYKYTPTSVFENKDYKLYWDISIHTDKTVSANRPDITFQCKKRKSHLSN

SEQ ID NO: 19792 - protein, 809 aa, Pachyrhynchus sulphureomaculatus
MYNKQIAVTEPPNKQELTDYWKSIWSEPKQHNNNTPWIKAEEDKHKHVTEQENTTFNTQEITETIKHTHNWKCPGIDNIQNFWYKQFTTTHEALTHQINKAILQPHTFPTFLTQGITYVKPKSSDTTNPSNYRPITCLPTLYKIITATISKKIEQHLTDNNILTEEQKGCRKNSRGCKEQLIIDSVIMGQTRKEHRNLHIGYIDYKKAFDSIPHSWLIRALEIYKINQHLRQFLAQIMKTWKTKIRLETQTERIQTEELYIRRGIFQGDSLSALWFCLCLNPLSNILNRTEHGFNIRHQKENQHKINHLLYMDDIKLYAATQTQLKELLKITEIFTLDVNMEFGLSKCKVLHINKGQWKHHHETETINNETLDNMFDKETYKYLGFQQSTKLNHTHIKTELRTEFKNRLTKLLQTKLNSKNLTKAVNTFAIPILTYSFGIIKWSQTDIENIHILIRSQFTKYRKLHPNACKERLTIERKAGGRGIIDIRSLHTKQIQTLRKFFHSKQTSLHTATVKADKNYTPLDLARADHSADTHSHTQLQQEKMKTWSEKTLHGKHRYHIEQDHVNKKQSYTWLRDGQLFPETEGFLLAIQDKVILTRNYQKHIIKDPTIAKDRCRKCHQQKETIEHITSGCKILAGTEYTARHDSAAKVVHQALATTYRLIENTDPYYKYTPTSILENEDYKLYWDIGIHTDKTVSANRPDITFQCKKGKVTYLIDIAVPNDTNIQAKYTEKISKYTDLATEIKRLWRQEKVIIVPLIISATGLTPITFTPHLVQLGLNTDIHRNIQKSVILKTCNIVRSFLNTEW

SEQ ID NO: 19793 - protein, 1470 aa, Pachyrhynchus sulphureomaculatus
MLKNNNYNNENGRVLRRRTPVVQTAIATPQQQQLQTNQTTASVETTPDSFTRSDIVGDGNCLFRAVSLHLYGHQNHHEKLREVALRYLQQNWSELHTFSLIEVDDIKDFNNYYNYMRKNGTYGTSLEILALSETQNSNFHIFSKQRRTRHTKITFTDRPTIISTGKYNKTIYLLLTGDPMSGHFELLTPQNIENIPENNRPIKEASGERRNGRGRRGKWQLDQNDEDQATENGPAKSVVSATKPTPTKAGKSQQRMSCTTGINEHAMRCCNENTKPDKEITEERITRRLDPPTSIPSTTDVDTGQTQPPKPGQGPYVLQGQHATTKAGKPRQRLKWTDEMNRTVMRCYYTATKLETITSGYRQQLHRLFLTEYPHLQLLVSEQRVIDQKRVITKNNRLTPLELQTIKDTVAVELNTDQPNNRNNKADSEPASHTQPPSRTQQYPPPRRSITQNNIASTAQHHITDNNMNHSPPSTTSTQHHPESPLIQILKAKMESHLARWSGTDPTTRNPIPRLIFRQSTQPILNTLNKHIIPQYITDISTIEDIHTIIYAAAITTLTQNNQKLPQRQGNPNRTKPKFKWQIRIENKINNIRRDLGHLTQFISGNASKRVTQGANKIKSKSPNRTLPEILDTLKQKLSVYAARLRRYKESNERKDTNNLFRRSEKQFYRKTMYNKQIAVTEPPNKQELTDYWKSIWSEPKLHNNNTPWIKAEEDKHKHVTEQEDTTFNTQEITETIKHTHNWKCPGIDNIQNFWYKQFTTTHEALTHQINKAILQPHTFPTFLTQGITYVKPKSSDTTNPSNYRPITCLPTLYKIITATISKKIEQHLTDNNILTEEQKGCRKNSRGCKEQLIIDSVIMGQTRKEHRNLHIGYIDYKKAFDSIPHSWLIRALEIYKINQHLRQFLAQIMKTWKTKIRLETQTERIQTEELYIRRGIFQGDSLSALWFCLCLNPLSNILSRTEHGFNIRHQKVNQHKINHLLYMDDIKLYAATQTQLKELLKITEIFTLDVNMEFGISKCKVLHINKGQWKGHHETETINNETLDNMFDKETYKYLGFQQSTKLNHTHIKTELRTEFKNRLTKLLQTKLNSKNLTKAINTFAIPILTYSFGIIKWSQTDIENIHILIRSQFTKYRKLHPNACKERLTIERKAGGRGIIDIRSLHTKQIQTLRKFFHSKQTSLHTATVKADKNYTPVDLARADHSADTHSHTQLQQEKMKTWSEKTLHGKHRYHIEQDHVNKKQSYTWLRDGQLFPETEGFLLAIQDKVILTRNYQKYIIKDPTIAEDRCRKCHQQKETIEHITSGCKILAGTEYTARHDSAAKVVHQALATTYRLIENTDPYYKYTPTSILENEDYKLYWDIGIHTDKTVSANRPDITFQCKKGKVTYLIDIAVPNDTNIQAKYTEKNFQIHRPCNGNKKAMETGKSHHCPPHYISHRPYTNNIHTTFNAIGTQHRHTQKHSEVSDFENM

SEQ ID NO: 19794 - protein, 1168 aa, Pachyrhynchus sulphureomaculatus
MPVCLQGQHATTKAGKPRQRLKWTDEMNRTVMRCYYTATKLETITSGYRQQLHRLFLTEYPHLQLLVSEQRVIDQKRVITKNNRLTPLELQTIKDTVAVELNTDQPNNRNNKADSEPASHTQPPSRTQQYPPPRRSITQNNIASTAQHHITDNNMNHSPPSTTSTQHHPESPLIQTLKAKMESHLARWSGTDPTTRNPIPRLIFRQSTQPILNTLNKHIIPQYITDLSTIEDIHTIIYAAAITTLTQNNQKLPQRQGNPNRTKPKFKWQIRIENKINNIRRDLGHLTQFISGNASKRVTQGANKIKSKSPNRTLPEILDTLKQKLSVYAARLRRYKESNERKDTNNLFRRSEKQFYRKTMYNKQIAVTEPPNKQELTDYWKSIWSEPKQHNNNTPWIKAEEDKHKHVTEQENTTFNTQEITETIKHTHNWKCPGIDNIQNFWYKQFTTTHEALTHQINKAILQPHTFPTFLTQGITYVKPKSSDTTNPSNYRPITCLPTLYKIITATISKKIEQHLTDNNILTEEQKGCRKNSRGCKEQLIIDSVIMGQTRKEHRNLHIGYIDYKKAFDSIPHSWLIRALEIYKINQHLRQFLAQIMKTWKTKIRLETQTERIQTEELYIRRGIFQGDSLSALWFCLCLNPLSNILNRTEHGFNIRHQKENQHKINHLLYMDDIKLYAATQTQLKELLKITEIFTLDVNMEFGISKCKVLHINKGQWKHHHETETINNETLDNMFDKETYKYLGFQQSTKLNHTHIKTELRTEFKNRLTKLLQTKLNSKNLTKAINTFAIPILTYSFGIIKWSQTDIENIHILIRSQFTKYRKLHPNACKERLTIERKAGGRGIIDIRSLHTKQIQTLRKFFHSKQTSLHTATVKADKNYTPLDLARADHSADTHSHTQLQQEKMKTWSEKTLHGKHRYHIEQDHVNKKQSYTWLRDGQLFPETEGFLLAIQDKVILTRNYQKHIIKDPTIAEDRCRKCHQQKETIEHITSGCKILAGTEYTARHDSAAKVVHQALATTYRLIENTDPYYKYTPTSILENEDYKLYWDIGIHTDKTVSANRPDITFQCKKGKVTYLIDIAVPNDTNIQAKYTEKISKYTDLATEIKRLWRQEKVIIVPLIISATGLTPITFTPHLVQLGLNTDIHRNIQKSVILKTCNIVRSFLNTEW

SEQ ID NO: 19795 - protein, 1071 aa, Pachyrhynchus sulphureomaculatus
MAVELNTDQPNNRNNKADSEPASHTQPPSRTQHYPPPRRSITQNNIASTAQHHITDNNMNHSPPSTTSTQHHPESPLIQTLKAKMESHLARWSGTDPTTRNPIPRLIFRQSTQPILNTLNKHIIPQYITDSSTIEDIHTIIYAAAITTLTQNNQKLSQRQGNPNRTKPKFKWQIRIENKINNIRRDLGHLTQFISGNASKRVTQGANKIKSKSPNRTLPEILDTLKQKLSVYAARLRRYKESNERKDTNNLFRRSEKQFYRKTMYNKQIAVTEPPNKQELTDYWKSIWSEPKQHNNNTPWIKAEEDKHKHVTEQENTTFNTQEITETIKHTHNWKCPGIDNIQNFWYKQFTTTHEALTHQINKAILQPHTFPTFLTQGITYVKPKSSDTTNPSNYRPITCLPTLYKIITATISKKIEQHLTDNNILREEQKGCRKNSRGCKEQLIIDSVIMGQTRKEHRHLHIGYIDYKKAFDSIPHSWLIRALEIYKINQHLRQFLAQIMKTWKTKIRLETQTERIQTEELYIRRGIFQGDSLSALWFCLCLNPLSNILNRTEHGFNIRHQKENQHKINHLLYMDDIKLYAATQTQLKELLKITEIFTLDVNMEFGISKCKVLHINKGQWKHHHETETINNETLDNMFDKETYKYLGFQQSTKLNHTHIKTELRTEFKNRLTKLLQTKLNSKNLTKAINTFAIPILTYSFGIIKWSQTDIENIHILIRSQFTKYRKLHPNACKERLTIERKAGGRGIIDIRSLHTKQIQTLRKFFHSKQTSLHTATVKADKNYTPLDLARADHSADTHSHTQLQQEKMKTWSEKTLHGKHRYHIEQDHVNKKQSYTWLRDGQLFPETEGFLLAIQDKVILTRNYQKHIIKDPTIAEDRCRKCHQQKETIEHITSGCKILAGTEYTARHDSAAKVVHQALATTYRLIENTDPYYKYTPTSILENEDYKLYWDIGIHTDKTVSANRPDITFQCKKGKVTYLIDIAVPNDTNIQAKYTEKISKYTDLATEIKRLWRQEKVIIVPLIISATGLTPITFTPHLVELGLNTDIHRNIQKSVILKTCNIVRSFLNTE

SEQ ID NO: 19796 - protein, 988 aa, Pachyrhynchus sulphureomaculatus
MELHLARWSGTDPTTRNPIPRLIFRQSTQPILNTLNKHIIPQYITDSSTIEDIHTIIYAAAITTLTQNNQKLPQRQGNPNRTKPKFKWQIRIENKINNIRRDLGHLTQFISGNASKRVTQEANKIKSKSPNRTLPEILDTLKQKLSVYAARLRRYKELNERKDTNNLFRRSEKQFYRKTMYNKQIAVTEPPNEQELTDYWKSIWSEPKLHNNNTPWIKAEEDKHKHVTEQENTTFNTQEITETIKHTHNWKCPGIDNIQNFWYKQFTTTHEALTHQINKAILQPHTFPTFLTQGITHVKPKSSDTTNPSNYRPITCLPTLYKIITATISKKIEQHLTDNNILTEEQKGCRKNSRGCKEQLIIDSVIMGQTRKEHRNLNIGYIDYKKAFDSIPHSWLIRALEIYKLNQHLRQFLAQIMKTWKTKIRLETQTERIQTEELYIRRGIFQGDSLSALWFCLCLNPLSNILNRTEHGFNIRHQKVNQHKINHLLYMDDIKLYAATQTQLKELLKITEIFTLDVNMEFGISKCKVLHINKGQWKCHHETETINNETLDNMFDKETYKYLGFQQSTKLNHTHIKTELRTEFKNRLTKLLQTKLNSKNLTKAINTFAIPILTYSFGIIKWSQTDIENIHILIRSQFTKYRKLHPNACKERLTIERKAGGRGIIDIGSLHTKQIQALRKFFHSKQTSFHTATVKADKNYTPLDLSRADHSADTHSHTQLQQEKMKTWSEKTLHGKHRYHIEQDHVNKKQSYTWLQDGQLFPETEGFLLAIQDKVILTRNYQKHIIKDPTIAEDRCRKCYQQKETIEHITSGCRILAGTEYTARHDSAAKVVHQALATTYKLIENTDPYYKYTPTSILENEDYKLYRDISIHTDKTVSANRPDITFQCKKGKVTYLIDIAVPNDTNIQTKYTEKISKYTDLATEIKMLWRQEKVIIVPLIISATSLTPITFTPHLVQLGLNTDIHRNIQKSVILKTCNIVRSFLNTEW

SEQ ID NO: 19797 - protein, 898 aa, Pachyrhynchus sulphureomaculatus
MANKNRKQNQQHQERSRTSYPGNASKRVTQEANKIKSKSPNRTLPEILDTLKQKLSVYAARLRRYKESNERKDTNNLFRRSEKQFYRKTMYNKQIAVTEPPTKQELTDYWKSIWSEPKLHNNNTPWIKAEEDKHKHVTEQENTALNTQEITETTKHTHNWKCPGIDNIQNFWYKQFTTTHEALTHQINKAILQPHTFPTFLTQGITYVKPKSSDTTNPSNYRPITCLPTLYKIITATNSKKIEQHLTDNNILTEEQKGCRKNSRGCKEQLIIDSVIMEQTRKEHRNLHIGYIDYKKAFDSIPHSWLIRALEIYKINQHLRQFLAQIMKTRKTKIRLETQTERIQTEELYIRRGIFQGDSLSALWFCICLNPLSNILNRTEHGFNIRHQKVNQHKINHLLYMDDIKLYAATQTQLKELLKITEIFTLDVNMEFGISKCKVLHINKGQWKCHHETETINNETLDNMFDKETYKYLGFQRSTKLNHTHIKTELRTEFKNRLAKLLQTKLNSKNLTKAINTFAIPILTYSFGIIKWSQTDIENIHILIRSQFTKYRKLHPNACKERLTIERKAGGRGIIDIRSLHTKQIQTLRKFFHSKQTSLHTATVKADKNYTPLDLARADHSADTHSHTQLQQEKMKTWSEKTLHGKHRYHIEQDHVNKKQSYTWLRDGQLFPETEGFLLAIQDKVILTRNYQKHIIKDPTIAEDRCRKCHQQKETIEHITSGCKILAGTEYTARHDSAAKVVHQALATTYKLIENTDPYYNYTPTSILENEDYKLYWDIGIHTDKTVSANRPDITFQCKKGKVTYLIDIAVPNDTNIQTKYTEKISKYTDLATEIKRLWRQEKVIIVPLIISATGLIPITFTPHLVQLGLNTDIHRNIQKSVILKTCNIVRSFLNTEW

SEQ ID NO: 19798 - protein, 1142 aa, Pachyrhynchus sulphureomaculatus
MNRTVMRCYYTATKLETITSGYRQQLHRLFWTEYPHLQLLVSEQRVIDQKRVITKNNRLTPLELQTIKDTVGVELNTDQPNNRNNRADSEPASHTQPPSRTQQYPPPRRSITQNNIAGTAQHYITDNSMNRSPPSTTSTQHHPESPLIQTLKAKMESHLARWSGTDPTTRNPIPRLIFRQSTQPILNTLNKHIIPQYITDLSTIEDIHTIIYAAAITTLTQNNQKLPQRQGNPNRTKPKFKWQIRIENKINNIRRDLGHLTQFISGNASKRVTQGANKIKSKSPNRTLPEILDTLKQKLSVYAARLRRYKESNERKDTNNLFRRSEKQFYRKTMYNKQIAVTEPPNKQELTDYWKSIWLEPKLHNNNTPWIKAEEDKHKHVTEQENTTFNTQEITETIKHTHNWKCPGIDNIQNFWYKQFTTTHEALTHQINKAILQPHTFPTFLTQGITYVKPKSSDTTNPSNYRPITCLPTLYKIITATISKKIEQHLTDNNILTEEQKGCRKNSRGCKEQLIIDSVIMGQTRKEHRNLHIGYIDYKKAFDSIPHSWLIRALEIYKINQHLRQFLVQIMKTWKTKIHLETQTERIQTEELYIRRGIFQGDSLSALWFCLCLNPLSNILNRTEHGFNIRHQKVNQHKINHLLYMDDIKLYAATQTQLKELLKITEIFTLDVNMEFGISKCKVLHINKGQWKCHHETETINNETLDNMFDKETYKYLGFQQSTKLNHTHIKTELRTEFKNRLTKLLQTKLNSKNLTKAINTFAIPILTYSFGIIKWSQTDIANIHILIRSQFTKYRKLHPNACKERLTIERKAGGRGIIDIRSLHTKQIQTLRKFFHSKQTSLHTATVKADKNYTPLDLARADHSADTHGHTQLQQEKMKTWSEKTLHGKHRYHIEQDHVNKKQSYTWLRDGQLFPETEGFLLAIQDKVILTRNYQKHIIKDPTIAEDRCRKCHQQKETIEHITSGCKILAGTEYTARHDSAAKVVHQALATTYRLIENTDPYYKYTPTSILENEDYKLYWDIGIHTDKTVSANRPDITFQCKKGKVTYLIDIAVPNDTNIQAKYTEKISKYTDLATEIKRLWRQEKVIIVPLIISATGLTPITFTPHLVQLGLNTDIHRNIQKSVILKTCNIVRSFLNTEW

SEQ ID NO: 19799 - protein, 1299 aa, Pachyrhynchus sulphureomaculatus
MSGHFELLTPQNIPENNRPINEASGERRNGRGRRGKWQLDQNDEDQATKNGPAKSVVSATKPTPTKAGKSQQRMSCTTGINEHAMRCCNENTKPDKEITEKRITRRLDPPTPIPSVTDVDAGQTQPPKPGRGPYVLQGQHATTKAGKPRQRLKWTDEMNRTVMRCYYTVTKLETITSGYRPELHRLFLTEYPHLQLLVSEQGVIDQKRVITKNNRLTPLELQTIKDTVAVELNTNQPNNRNNKADSEPVSHTQPPSRTQQDPPPRSSITQNNIASTGQHHITDNNMNHSPPSTTSTQHHLESPLIQTLKAKMESHLARWSGTDPTTRNPIPRLIFRQSTQPILNTLNKPIIPQYITDLGTIEDIHTIIYAAAITTLTQNNQKLPQQQGNPNRTKPKFKWQIRIENKINNIRRDIGHLTQFISGNASKRVTQGANKIKSKSPNRTLPEILDTLKQKLSVYAARLRRYKESNERKDTSNLSRRSEKQFYRKTMYNKQIAVTEPPNKQELTDYWKSIWSEPKLHNNNTLWIKAEEDKHKHVTEQENTTLNTQEITETIKRTHNWKCPGIDNIQNFWYKQFTTTHEALTHQINKAILQPHTFPTFLTQGITYVKPKSSDTTNPSNYRPITCFPTLYKIITATISKKIDQHLTDNNILTEEQKECRKNSRGCKEQLIINSVIMGQTRKEHRNLHIGYIDYKKAFDSIPHSWLIRALEIYKINQHLRQFLGQIMKTWKTKIRLETQTECIQTEELYIRRGIFQGDSLSALWFCLCLNPLSNILNRTEHGFNIRHQKVNQHKINHLLYMDDIKLYAATQTELKELLKITEIFTLDVNMEFGISKCKVLHINKGQWKHHHETETINNETLDNMFDKETYKYLGFQQNTKLNHTHIKTELRTEFKNRLTKLLQTKLNSKNLTKTINTFAIPIFTYSFGIIKCSQTDIENIHILIRSQFTKYRKLHPNACKERLTIERRAGGRGIIDLRSLHTKQIQTLRKFFHSKQTSLHTATVKADKNYTPLDLARADHSADTHSHTQLQQEKMKTWSEKALHGKHRYHIEQDHVNKKQSYSWLHDGQLFPETEGFLLAIQDKVILTRNYQKHIIKDPTIAEDRCRKCHQQKETIEHITSGCKILAGTEYTARHDSAAKVVHQALATTYKLIENTDPYYKYKPTSIFENEDYKLYWDIGIHTDKTVSANRPDITFQCKKGKITYLIDIAVPNDTNIQTKYTEKISKYTDLATEIKRLWRQEKVIIVPLIISATGLTPITFTPHLVQLGLNTDIHRNIQKSVILKTCNIVRSFLNTEW

SEQ ID NO: 19800 - protein, 879 aa, Pachyrhynchus sulphureomaculatus
MNGNASKRVTQGVDKIKSKSLNRTLPEIVDTFNQKLSVYAARLRRYKESNERKDTNNLFRRSEKQFYRKTMYNEQTVVTEPPNKQELADYWKTVWSEPKLHNNNTLWIKAEEDKHKRVTEQENSTLTTEEITETIKHTHNWKCPGLDNIQNFWYKQFTTTHEALTHQINKAILQPHTFPTFLTQGITYIKPKSSDTTNPSNYRPITCLPTLYKIITATISKKIEQHLIDNNILTIEQKECRKNSRGCKEQLIIDSVIMGQTRKEHRNLHIGYIDYKKAFDSIPHSWLIRALEIYKINQHLRQFLAQIMKTWKTKIRLETQTERIQTEELYIRRGIFQGDSLSALWFCLCLNPLSNILNRTEHGFNIRHQKVNQHKINHLLYMDDIKLYAATKTQLKELLKITEIFTLDVNMEFGISKCKVLHINKGQWKYHHETETINNETLDNMFDKETYKYLGFQQSTKLNHTHIKTELRTEFKNRLTKLLQTKLNSKNLTKAINTFAIPILTYSFGIIKWSQTDIENIHILIRSQFTKYRKLHPNACKERLTIERKAGGRGIIDIRSLHTKQIQALRKFFHTKQTSLHTATVKADKNYTPLDLSRVDHPADTHSHTQLQQEKMKTWSEKTLHGKHRYHIEQDHVNKKQSYTWLRDGQLFPETEGFLLAIQDKVILTRNYQKHIIKDPTITEDRCRKCHQQKETIEHITSGCKILAGTEYTARHDSAAKVVHQALATTYKLIENTDPYYKYTPTSVFENKDYKLYWDISIHTDKTVSANRPDITFQCKKEKVTYLIDIAVPNDTNIQTKYTEKISKYTDLATEIKRLWKQEKVIIVPLIISATGLTPTTFTPHLVQLGLNTNIHKNIQKSVILKTCNIVRSFLNTQW

SEQ ID NO: 19801 - protein, 1492 aa, Pachyrhynchus sulphureomaculatus
MLNNNNYNNENGRVLRRRTPVVQTATATPQQQLQTNQTTASVETTPDSFTRSDIVGDGNCLFRAVSLHLYGHQNHHEKLREVALRYLQQNWSELHTFSLIEVDDLKDFNNYYNYMRKNGTYGTSLEILALSETQNSNFHIFSKQRRTRHTKITFTDRPTIISTGKYNKTIYLLLTGNTMSGHFELLTPQNIKNIPDNSRPIKEASGERRNGRGRRGKWQLDQNDEDRATENGPAKSVVPASKPTPTQAGKSQQRMSSTTGINEHAMRCCNEITPEKEITDKRITRRLDPPPPIPSATDVDAGQIQPPKPGQTAYVLQGQHATTKAGKPRQRLKWTDEMNRTVMRCYYTATKLETVTSGYRLELHRLFLTEYPHLQLLVTEQRVIDQKRVITKNNRLTPFELQTIKDTVAAELNTDQVAAELNTDQPNNRNSRADTEPISHTQSPNRKQQDPPPSRSITQNNISKQIASTTRYHITDDKMNDSPPSTTSTQHHSESPLIQTLKAEMQLHLARWSGTDPTTRNPIPRLIFKQSTQIILNTINKHIIPQYITDLSTIEDIHTIIYAAAITTITQNNQKLPQRQRDPNSRKPKFKWQIRLENKINNIRRDLGHLTQFMNGNASKRVTHGVDKIKSKSLKRTLPEIVDTLKQKLSVYAARLRRYKESNERKDTNNLFRRSEKQFYRKPMYNEQTVVTKPPNKQEIADYWKTVWSEPKLHNNNTPWIKAEEDKHKRVTEQENSTLTTEEITETIKHTHNWKCPGIDNIQNFWYKQFTTTHEALTHQINKAILQPHTLPTFLTQGITYVKPKSSDTTNPSNYRPITCLPTLYKIITAAISKKIEQHLTDNNIITEEQKGCRKNSRGCKEQLIIDSVIMGQTRKEHRNLHIGYIDYKKAFDSLPHSWLIRALEIYKINQRLRQFLVQIMKTWKTKIRLETPTERIETEELYIRRGIFQGDSLSALWFCLCLNPLSNILNRTEHGFNIRHQKVNQHKINHLLYMDDIKLYAATQTQLKELLKITEIFTLDVNMEFGISKCKVLHINKGQWKCHHETETINNETLDNMFDKETYKYLGFQQSTKLNHTHIKTELRTEFKNRLTKLLQTKLNSKNLTKAINTFAIPVLTYSFGIIKWSQTDIENIHILIRSQFTKYRKLHPNACKERLTIERKAGGRGIIDIRSLHTKQIQTLRKFFHSKQTSLHTATVKADKNYTPLDLARADHSADTHSHTQLQQEKMKTWSEKTLHGKHRYHIEQDHVNKKQSYTWLQDGQLFPETEGFLLAIQDKVILTRNYQKHIIKDPTIAEDRCRKCHQQKETIEHITSGCKILAGTEYTARHDSAAKVVHQALATTYKLIENTDPYYKYTPTSILENEDYKLYWDIGIHTDKTVSANRPDITFQCKKEKVTYLIDIAVPNDTNIQTKYTEKISKYTDLATEIKRLWKQEKVIIVPLIISATGLTPTTFTPHLVQLGLNTNIHKNIQKSVILKTCNIVRSFLNTQW

SEQ ID NO: 19802 - protein, 1301 aa, Pachyrhynchus sulphureomaculatus
MSGHFELLTPQNIENIPENNRPIKEASGERRNGRGRRGKWQLDQNDEDQATENGPAKSVVSATKPTPTKAGKSQQRMSCTTGINEHAMRCCNKNTKPDKEITEKRITRRLDPPTSIPSTTDVDTGQTQPPKPGQGPYVLQGQHATTKAGKPRQRLKWTDEMNRTVMRCYYTATKLETITSGYRQQLHRLFLTEYPHLQLLVSEQRVIDQKRVITKNNRLTPLELQTIKDTVAVELNTDQPNNRNNKADSEPASHTQPPSRTQQYPPPRRSITQNNIASTAQHHITDNNMNHSPPSTTSTQHHPESPLIQTLKAKMESHLARWSGTDPTTRHPIPRLIFRQSTQPILNTLNKHIIPQYITDLSTIEDIHTIIYAAAITTLTQNNQKLPQRQGNPNRTKPKFKWQIRIENKINNIRRDLGHLTQFISGNASKRVTQGANKIKSKSPNRTLPEILDTLKQKLSVYAARLRRYKESNERKDTNNLFRRSEKQFYRKTMYNKQIAVTEPPNKQELTDYWKSIWSEPKLHNNNTPWIKAEEDKHKHVTEQENTTFNTQEITETIKNTHNWKCPGIDNIQNFWYKQFTTTHEALTHQINKAILQPHTFPTFLTQGITYVKPKSSDTTNPSNYRPITCLPTLYKIITATISKKIEQHLTDNNILTEEQKGCRKNSRGCKEQLIIDSVIMGQTRKEHRNLHIGYIDYKKAFDSIPHSWLIRALEIYKINQHLRQFLAQIMKTWKTKIRLETQTERIQTEELYIRRGIFQGDSLSALWFCLCLNPLSNILNRTEHGFNIRHQKVNQHKINHLLYMDDIKLYAATQTQLKELLKITEIFTLDVNMEFGISKCKVLHINKGQWKCHHETETINNETLDNMFDKETYKYLGFQQSTKLNHTHIKTELRTEFKNRLTKLLQTKLNSKNLTKAINTFAIPILTYSFGIIKWSQTDIENIHILIRSQFTKYRKLHPNACKERLTIERKAGGRGIIDIRSLHIKQIQTLRKFFHSKQTSLHTATVKADKNYTPLDLARADHSADTHSHTQLQQEKMKTWSEKTLHGKHRYHIAQDHVNKKQSYTWLRDGQLFPETEGFLLAIQDKVILTRNYQKYVIKDPTIAEDRCRKCHQQKETIEHITSGCKILAGTEYTARHDSAAKVVHQALATTYRLIENTDPYYKYTPTSILENEDYKLYWDIGIHTDKTVSANRPDITFQCKKGKVTYLIDIAVPNDTNIQAKYTEKISKYTDLATEIKRLWRQEKVIIVPLIISATGLTPITFTPHLVQLGLNTDIHRNIQKSVILKTCNIVRSFLNTE

SEQ ID NO: 19803 - protein, 1226 aa, Pachyrhynchus sulphureomaculatus
MSCTTGINEHAMRCCNENTKPDKEITEKRITRRLDPPTSIPSATDVNTGQTQPPKPGQGPYVLQGQHATTKAGKPRQRLKWTDEMNRTVMRCYYTATKLETITSGYRQQLHRLFLTEYPHLQLLVSEQRVVDQKRVITKNNRLTPLELQTIKDTVAVELNTDQPNNRNNKADSEPASHTQPPSRTQQYPPPRRSITQNNIASTAQHHITDNNMNHSPPSTTSTQHHPESPLIQTLKAKMESHLARWSGTDPTTRNPIPRLIFRQSTQPILNTLNKHIIPQYITDSSTIEDIHTIIYAAAITTLTQNNQKLPQRQGNPNRTKPKFKWQIRIENKINNIRRDLGHFTQFISGNASKRVTQGANKIKSKSPNRTLPEILDTLKQKLSVYAARLRRYKESNERKDTNNLFRRSEKQFYRKTMYNKQIAVTEPPNKQELTDYWKSIWSEPKQHNNNTPWIKAEEDKHKHVTEQENTTFNTQEITETIKHTHNWKCPGIDNIQNFWYKQFTTTHEALAHQINKAILQPHTFPTFLTQGITYVKPKSSDTTNPSNYRPITCLPTLYKIITATISKKIEQHLTDNNILTEEQKGCRKNSRGCKEQLIIDSVIMGQTRKEHRNLHIGYIDYKKAFDSIPHSWLIRALEIYKINQHLRQFLAQMMKTWKTKIRLETQTERIQTEELYIRRGIFQGDSLSALWFCLCLNPLSNILNRTEHGFNIRHQKENQHKINHLLYMDDIKLYAATQTQLKELLKITEIFTLDVNMEFGISKCKVLHINKGQWKHHHETETINNETLDNMFDKETYKYLGFQQSTKLNHTHIKTELRTEFKNRLTKLLQTKLNSKNLTKAINTFAIPILTYSFGIIKWSQTDIENIHILIRSQFTKYRKLHPNACKERLTIERKAGGRGIIDIRSLHTKQIQTLRKFFHSKQTSLHTATVKADKNYTPLDLARADHSADTHSHTQLQQEKMKTWSEKTLHGKHRYHIEQDHVNKKQSYTWLRDGQLFPETEGFLLAIQDKVILTRNYQKHIIKDPTIAEDRCRKCHQQKETIEHITSGCKILAGTEYTARHDSAAKVVHQALATTYRLIENTDPYYKYTPTSILENEDYKLYWDIGIHTDKTVSANRPDITFQCKKGKVTYLIDIAVPNDTNIQAKYTEKISKYTDLATEIKRLWRQEKVIIVPLIISATGLTPITFTPHLVQLGLNTDIHRNIQKSVILKTCNIVRSFLNTEW

SEQ ID NO: 19804 - protein, 1014 aa, Pachyrhynchus sulphureomaculatus
MNHSPPSTTSTQHHPESPLIQTLKAKMESHLARWSGTDPTTRNPIPRLIFRQSTQPILNTLNKHIIPQYITDSSTIEDIHTIIYAAAITTLTQNNQKLPQRQGNPNRTKPKFKWQIRIENKINNIRRDLGHLTQFISGNASKRVTQGANKIKSKSPNRTLPEILDTLKQKLSVYAARLRRYKESNDRKDTNNLFRRSEKQFYRKTMYNKQIAVTEPPNKQELTDYWKSIWSEPKQHNNNTPWIKAEEDKHKHVTEQENTTFNTQEITETIKHTHNWKCPGIDNIQNFWYKQFTTTHEALTHQINKAILQPHTFPTFLTQGITYVKPKSSDTTNPSNYRPITCLPTLYKIITATISKKIEQHLTDNNILTEEQKGCRKNSRGCKEQLIIDSVIMGQTRKEHRNLHIGYIDYKKAFDSIPHSWLIRALEIYKINQHLRQFLAQIMKTWKTKIRLETQTERIQTEELYIRRGIFQGDSLSALWFCLCLNPLSNILNRTEHGFNIRHQKENQHKINHLLYMDDIKLYAATQTQLKELLKITEIFTLDVNMEFGISKCKVLHINKGQWKHHHETETINNETLDNMFDKETYKYLGFQQSTKLNHTHIKTELRTEFKNRLTKLLQTKLNSKNLTKAINTFAIPILTYSFGIIKWSQTDIENIHILIRSQFTKYRKLHPNACKERLTIERKAGGRGIIDIRSLHTKQIQTLRKFFHSKQTSLHTATVKADKNYTPLDLARADHSADTHSHTQLQQEKMKTWSEKTLHGKHRYHIEQDHVNKKQSYTWLRDGQLFPETEGFLLAIQDKVILTRNYQKHIIKDPTIAEDRCRKCHQQKETIEHITSGCKILAGTEYTARHDSAAKVVHQALATTYRLIENTDPYYKYTPTSVLENEDYKLYWDIGIHTDKTVSANRPDITFQCKKGKVTYLIDIAVPNDTNIQAKYTEKISKYTDLATEIKRLWRQEKVIIVPLIISATGLTPITFTPHLVQLGLNTDIHRNIQKSVILKTCNIVRSFLNTEW

SEQ ID NO: 19805 - protein, 902 aa, Pachyrhynchus sulphureomaculatus
MANKNIENKINHIRRDLGHLTQFISGNASKRVTQGANKIKSKSPNRTLPEILDTLKQKLSVYAARLRRYKESNERKDTNNLFRRSEKQFYRKTMYNKQISVTEPPNRQELTDYWKSIWSEPKLHNNNTPWIKAEEDKHKHVTEQENTTFNTQEITETIKHTHNWKCPGIDNIQNFWYKQFTTTHEALTHQNNKAILQPHTFPTFLTQGITYVKPKSSDTTNPSNYRPITCLPTLYKIITATISKKIEQHLTDNNILTEEQKGCRKNSRGCKEQLIIDSVIMGQTRKEHRNLHIGYIDYKKAFDFIPHSWLIRALEIYKINQHLRQFLAQIMKTWKTKIRLETQTERIQTEELYIRRGIFQGDSLSALWFCFCLNPLSNILNRTEHGFNIRHQKENQHKINHLLYMDDIKLYAATQTQLKELLKITEIFTLDVNMEFGISKCKVLHINKGQWKHHHETETINNETLDNMFDKETYKYLGFQQSTKLNHTHIKTELRTEFKNRLTKLLQTKLNSKNLTKAINTFAIPILTYSFGIIKWSQTDIENIHILIRSQFTKYRKLHPNACKERLTIERKAGGRGIIDIRSLHTKQIQTLRKFFHSKQTSLHTATVKADKNYTPLDLARADHSADTHSHTQLQQAKMKTWSEKTLHGKHRYHIEQDHVNKKQSYTWLRDGQLFPETEGFLLAIQDKVILTRNYQKHIIKDPTIAEDRCRKCHQQKETIEHITSGCKILAGTEYTARHDSAAKVVHQALATTYRLIENTDPYYKYTPTSILENEDYKLYWDIGIHTDKTVSANRPDITFQCKKGKVTYLIDIAVSNDTNIQAKYTEKISKYTDLATEIKRLWRQEKVIIVPLIISATGLTPITFTPHLVQLGLNTDIHRNIQKSVILKTCNIVRSFLNTEW

SEQ ID NO: 19806 - protein, 936 aa, Pachyrhynchus sulphureomaculatus
MSLVRPTATFLKNGKQRTVIKYLFKKRLIPKEIHDDIIIIIIIIIIRERDLGHLTQFISGNASKRVTQGANKIKSKSPNRTLPEILDTLKQKLSVYAARLRRYKESNERKDTNNLFRRSEKQFYRKTMYNKQIAVTEPPNKQELTDYWKSIWSEPKQHNNNTPWIKAEEDKHKHVTEQENTTFNTQEITETIKHTHNWKCPGIDNIQNFWYKQFTTTHEAFTHQINKAILQPHTFPTFLTQGITYVKPKSSDTTNPSNYRPITCLPTLYKIITATVSKKIEQHLTDNNILTEEQKGCRKNSRGCKEQLIIDSVIMGQTRKEHRNLHIGYIDYKKAFDSIPHSWLIRALEIYKINQHLRQFLAQIMKTWKTKIRLETQTERIQTEELYIRRGIFQGDSLSALWFCLCLNPLSNILNRTEHGFNIRHQKENQHKINHLLYMDDIKLYAATQTQLKELLKITEIFTLDVNMEFGISKCKVLHINKGQWKHHHETETINNETLDNMFDKETYKYLGFQQSTKLNHTHIKTELRTEFKNRLTKLLQTKLNSKNLTKAINTFAIPILTYSFGIIKWSQTDIENIHILIRSQFTKYRKLHPNACKERLTIERKAGGRGIIDIRSLHTKQIQTLRKFFHSKQTSLHTATVKADKNYTPLDLARADHSADTHSHTQLQQEKMKTWSEKTLHGKHRYHIEQDHVNKKQSYTWLRDGQLFPETEGFLLAIQDKVILTRNYQKHIIKDPTIAEDRCRKCHQQKETIEHITSGCKILAGTEYTARHDSAAKVVHQALATTYRLIENTDPYYKYTPTSILENEDYKLYWDIGIHTDKTVSANRPDITFQCKKGKVTYLIDIAVPNDTNIQAKYTEKISKYTDLATEIKRLWRQEKVIIVPLIISATGLTPITFTPHLVQLGLNTDIHRNIQKSVILKTCNIVRSFLNTEW

SEQ ID NO: 19807 - protein, 980 aa, Pachyrhynchus sulphureomaculatus
MVRHRPTTRNPIPRLIFKQSTQMILNTINKHIIPQYITDLSTIEDIHTIIYAAAITTITQNNQKLSQRQRDPNSRKPKFKWQIRIENKINNIRRDLGHLTQFMNGNASKRVTQGVDKIKSKSLNRTLPEIVDTLKQKLSVYAARLRRYKESNERKDTNNLFRRSEKQFYRKTMYNEQRVVTEPPNKQELADYWKTVWSEPKLHNNNTSWIKAEEDKHKRVTEQENSTLTTEEITETIKHTHNWKCPGIDNIQNFWYKQFTTTHEALTHQINKAILQPHTFPTFLTEGITYVKPKSSDTTNPSNYRPITCLPTLYKIITAAISKKIEQHLTDNNIITEEQKGCRKNSRGCKEQLIIDSVIMGQTRKEHRNLHIGYIDYKKAFDSIPHSWLIRALEIYKINQHLRQFLAQIMKTWKTKIRLETQTERIQTEELYIRRGIFQGDSLSALWFCLCLNPLSNILNRTEHGFNIRHQKGNQHKINHLLYMDDIKLYAATKAQLKELLKITEIFTLDVNMEFGISKCKVLHINKGQWKYHHETETINNETLDNMFDKETYKYLGFQQSTKLNHTHIKTELRTEFKNRLTKLLQTKLNSKYLTKAINTFAIPILTYSFGIIKWSQTDLENIHILIRSQFTKYRKLHPNACKERLTIERKTGGRGIIDIRSLHTKQIQALRKFFHTKQTSLHTATVKADKNYTPLDLSRVDHPADTHSHIQLQQEKMKTWSEKTLHGKHRYHIEQDHVNKKQSYTWLRDGQLFPETEGFLLAIQDKVILTRNYQKHIIKDPTITEDRCRKCHQQKETIEHITSGCKILAGTEYTARHDSAAKVVHQALATTYKLIENTDPYYKYTPTSVLENKDYKLYWDISIHTDKTVSANRPDITFQCKKEKVTYLIDIAVPNDTNIQTKYTEKISKYTDLATEIKRLWKQEKVIIVPLIISATGLTPTTFTPHLVQLGLNTNIHKNIQKSVILKTCNIVRSFLNTQ

SEQ ID NO: 19808 - protein, 901 aa, Pachyrhynchus sulphureomaculatus
MANKNRKQDQQHQKRSGTHLTQFMNGNASKRVTQGVDKIKSKSLNRTLPEIVDTLKQKLSVYAARLRRYKESNERKDTNNLFRRSEKQFYRKTMYNEQTVVTEPPNKQELADYWKTVWSEPKLHNNNTSWIKAEEDKHKRVTEQENSTLTTEEITETIKHTHNWKCPGIDNIQNFWYKQFTTTHEALTYQINKAILQPHTFPTFLTQGITYVKPKSSDTTNPSNYRPITCLPTLYKIITAAISKKIEQHLTDNNIITEEQKGCRKNSRGCKEQLIIDSVIMGQTRKEHRNLHIGYIDYKKAFDSIPHSWLIRALEIYKINQHLRQFLAQIMKTWKTKIRLETQTERIQTEELYIRRGIFQGDSLSALWFCLCLNPLSNILNRTEHGFNIRHQKGNQHKINHLLYMDDIKLYAATKTQLKELLRITEIFTLDVNMEFGKSKCKVLHINKGQWKYHHETETINNETLDNMFDKETYKYLGFQQSTKLNHTHIKTELRTEFKNRLTKLLQTKLNSKYLTKAINTFAIPILTYSFGIIKWSQTDLENIHILIRSQFTKYRKLHPNACKERLTIERKAGGRGIIDIRSLHTKQIQALRKFFHTKQTSLHTATVKADKNYTPLDLSRVDHPADTHSHIQLQQEKMKTWSEKTLHGKHRYHIEQDHVNKKQSYTWLRDGQLFPETEGFLLAIQDKVILTRNYQKHIIKDPTITEDRCRKCHQQKETIEHITSGCKILAGTEYTARHDSAAKVVHQALATTYKLIENTDPYYKYTPTSVLENKDYKLYWDISIHTDKTVSANRPDITFQCKKEKVTYLIDIAVPNDTNIQTKYTEKISKYTDLATEIKRLWKQEKVIIVPLIISATGLTPTTFTPHLVQLGLNTNIHKNIQKSVILKTCNIVRSFLNTQ

SEQ ID NO: 19809 - protein, 1479 aa, Pachyrhynchus sulphureomaculatus
MLNNNNYNNENGRVLRRRTPVVQTATATPQQQLQTNQTTASVETTPDSFTRSDIVGDGNCLFRAVSLYLYGHQNHHEKLREVALRYLQQNWSELHTFSLIEVDDIKDFNNYYNYMRKNGTYGTSLEILALSETQNSNFHIFSKQRRTRHTKITFTDRPTIISTGKYNKTIYLLLTGNPMSGHFELLTPQNTEHIPENNRPIKEASGERRNGRGRRGKWQLDQNDEDQATENGPAKSVVLATKPTPTKAGKSQQRMSCTTGINEHAMRCCDENTKPDKEITEKRITRRLDPPTSIPSATDVDTGQTQPPEPGQGPYVLQGQHATTKAGKPRQRLKWTDEMNRTVMRCYYTATKLETITSGYRQQLHRLFLTEYPHLQLLVSEQRVVDQKRVITKNNRLTPLELQTIKDTVAVELNTDQPNNRNNKADSEPASHTQPPSRTQQYPPPRRSITQNNIASTAQHHITDNNMNHSPPSTTSTQHHPESPLIQTLKAKMESHLARWSGTDPTTRNPIPRLIFRQSTQPILNTLNKHIIPQYITDSSTIEDIHTIIYAAAITTLTQNNQKLPQRQGNPNRTKPKFKWQIRIENKINNIRRDLGHLTQFISGNASKRVTQGANKIKSKSPNRTLPEILDTLKQKLSVYAARLRRYKESNERKDTNNLFRRSEKQFYRKTMYNKQIAVTEPPNKQELTDYWKSIWSEPKLHNNNTPWIKAEEDKHKHVTEQENTTFNTQEITETIKHTHNWKCPGIDNIQNFWYKQFTTTHEALTHQINKAILQPHTFPTFLTQGITYVKPKSSDTTNPSNYRPITCLPTLYKIITATISKKIEQHLTDNNILTEEQKGCRKNSRGCKEQLIIDSVIMGQTRKEHRNLHIGYIDYKKAFDSIPHSWLIRALEIYKINQHLRQFLAQIMKTWKTKIRLETQTERIQTEELYIRRGIFQGDSLSALWFCLCLNPLSNILNRTEHGFNIRHQKVNQHKINHLLYMDDIKLYAATQTQLKELLKITEIFTLDVNMEFGINKCKVLHINKGQWKCHHETETINNETLDNMFDKETYKYLGFQQSTKLNHTHIKTELRTEFKNRLTKLLQTKLNSKNLTKAINTFAIPILTYSFGIIKWSQTDIENIHILIRSQFTKYRKLHPNACKERLTIERKAGGRGIIDIRSLHTKQIQTLRKFFHSKQTSLHTATVKADKNYTPLDLARADHSADTHSHTQLQQEKMKTWSEKTLHGKHRYHIEQEHVNKKQSYTWLRDGQLFPETEGFLLAIQDKVILTRNYQKHIIKDPTIAEDRCRKCHQQKETIEHITSGCKILAGTEYTARHDSAAKVVHQALATTYRLIENTDPYYKYTPTSILENEDYKLYWDIGIHTDKTVSANRPDITFQCKKGKVTYLIDIAVPNDTNIQAKYTEKISKYTDLATEIKRLWRQEKVIIVPLIISATGLTPITFTPHLVQLGLNTDIHRNIQKSVILKTCNIVRSFLNTQ

SEQ ID NO: 19810 - protein, 1365 aa, Pachyrhynchus sulphureomaculatus
MRKNGTYGTSLEILALSETQNSNFHIFSKQRRTRHTKITFTDRPTIISTGKYNKTIYLLLTGNPMSGHFELLTPQNIENIPDNSRPIKEASGERRNGRGRRGKWQLDQNDEDQATENGPAQSVVPASKPTPTKAGKSQQRMSCTTGINEHAMRCCNEMTPDKEITDKRITRRLDPPPPIPSAIDVNAGQIQPPKPGQTAYVLQGQHATTKAGKPRQRLKWTDEMNKTVMRCYYTATKLETLTSGYRLELHRLFLTEYPHLQLLVTEQRVIDQKRVITKNNRLTPFELQTIKDTVAAELNADQVAAELNTDQLKNRNSRADTEPISHTQPPSRKQQDPPPSRSITQNNISEQIASTTRHSTTSIQHHPESPLIQTLKAEMQSHLARWSGTDPTTRNPIPRLIFKQSTQMILNTINKHIIPQYITDLSTIEDIHTIIYAAAITTITQNNQKLPQRQRDPNSRKPKFKWQIRIENKINNIRRDLGHLTQFMNGNASKRVTQGVDKIKSKSLNRTLPEIVDTLKQKLSVYAARLRRYKESNERKDTNNLFRRSEKQFYRKTMYNEQRVVTEPPNKQELADYWKTVWSEPKLHNNNTSWIKAEEDKHKRVTEQENSTLTTEEITETIKHTHNWKCPGIDNIQNFWYKQFTTTHEALTHQINKAILQPHTFPTFLTQGITYVKPKSSDTTNPSNYRPITCLPTLYKIITAAISKKIEQHLTDNNIITEEQKGCRKNSRGCKEQLIIDSVIMGQTRKEHRNLHIGYIDYKKAFDSIPHSWLIRALEIYKINQHLRQFLAQIMKTWKTKIRLETQTERIQTEELYIRRGIFQGDSLSALWFCLCLNPLSNILNRTEHGFNIRHQKGNQHKINHLLYMDDIKLYAATKAQLKELLKITEIFTLDVNMEFGISKCKVLHINKGQWKYHHETETINNETLDNMFDKETYKYLGFQQSTKLNHTHIKTELRTEFKNRLTKLLQTKLNSKYLTKAINTFAIPILTYSFGIIKWSQTDLENIHILIRSQFTKYRKLHPNACKERLTIERKAGGRGIIDIRSLHTKQIQALRKFFHTKQTSLHTATVKADKNYTPLDLSRVDHPADTHSHIQLQQEKMKTWSEKTLHGKHRYHIEQDHVNKKQSYTWLRDGQLFPETEGFLLAIQDKVILTRNYQKHIIKDPTITEDRCRKCHQQKETIEHITSGCKILAGTEYTARHDSAAKVVHQALATTYKLIENTDPYYKYTPTSVLENKDYKLYWDISIHTDKTVSANRPDITFQCKKEKVTYLIDIAVPNDTNIQTKYTEKISKYTDLATEIKRLWKQEKVIIVPLIISATGLTPTTFTPHLVQLGLNTNIHKNIQKSVILKTCNIVRSFLNTQ

SEQ ID NO: 19811 - protein, 998 aa, Pachyrhynchus sulphureomaculatus
MNHSPPSTTSTQHHPESPLIQTLKAKMESHLARWSGTDPTTRNPIPRLIFRQSTQPILNTLNKHIIPQYITDLSTIEDIHTIIYAAAITTLTQNNQKLPQRQGNPNRTKPKFKWQIRIENKINNIRRDLGHLTQFISGNASKRVTQGANKIKSKSPNRTLPEILDTLKQKLSVYAARLRRYKESNERKDTNNLFRRSEKQFYRKTMYNRQIAVTEPPNKQELTDYWKSIWSEPKLHNNNTPWIKAEEDKHKHVTEQENTTFNTQEITETIKHTHNWKCPGIDNIQNFWYKQFTTTHEALTHQINKAILQPHTFPTFLTQGITYVKPKSSDTTNLSNYRPITCLPTLYKIITATISKKIEQHLTDNNILTEEQKGCRKNSRGCKEQLIIDSVIMGQTRKEHRNLHIGYIDYKKAFDSIPHSWLIRALEIYKINQHLRQFLAQIMKTWKTKIRLETQTERIQTEELYIRRGIFQGDSLSALWFCLCLNPLSNILNRTEHGFNIRHQKVNQHKINHLLYMDDIKLYAATQTQLKELLKITEIFTLDVNMEFGISKCKVLHINKGQWKCHHETETINNETLDNMFDKETYKYLGFQQSTKLNHTHIKTELRTEFKNRLTKLLQTKLNSKNLTKAINTFAIPILTYSFGIIKWSQTDIENIHILIRSQFTKYRKLHPNACKERLTIERKAGGRGIIDIRSLHTKQIQTLRKFFHSKQTSLHTATVKADKNYTPLDLARANHSADTHSHTQLQQEKMKTWSAKTLHGKHRYHIEQDHVNKKQSYTWLRDGQLFPETEGFLLAIQDKVILTRNYQKHIIKDPTIAEDRCRKCHQQKETIEHITSGCKILAGTEYTARHDSAAKVVHQALATTYRLIENTDPYYKYTPTSILENEDYKLYWDIGIHTDKTVSANRPDITFQCKKGKVTYLIDIAVPNDTNIQAKYTEKISKYTDLATEIKRLWRQGKVIIVPLIISATGLTPITFTPHLVQLGLNTRTYTETFRSQ

SEQ ID NO: 19812 - protein, 1481 aa, Pachyrhynchus sulphureomaculatus
MLNNNNYNNKNRRVLRRRTPVVQTATATPQQQQLQTNQTTASVETTPDSFTRSDIVGDGNCLFRAVSLHLYGHQNHHEKLREVALRYLQQNWSELHTFSLIEVDDIKDFNNYYNYMRKNGTYGTSLEILALSETQNSNFHIFSKQRRTRHTKITFTDRPTIISTGKYNKTIYLLLTGNPMSGHFELLTPQNIENIPENNRPIKEASGERRNGRGRRGKWQLDQNDEDQATENGPAKSVVSATKPTPTKAGKSQQRMSCTTGINEHAMRCCNENTKPDKEITERRITRRLDPPTSILSTTDVDTGQTQPPKPGQGPYVLQGQHATTKAGKPRQRLKWTDEMNRTVMRCYYTATKLETITSGYRQQLHRLFLTEYPHLQLLVSEQRVIDQKRVITKNNRLTPLELQTIKDTVAVELSTDQPNNRNNKADSEPASHTQPPSRTQQYPPPRRSITQNNIASTAQHHITDNNMNHSPPSTTSTQHHPESPLIQTLKAKMESHLARWSGTDPTTRNPIPRLIFRQSTQPILNTLNKHIIPQYITDLSTIEDIHTIIYAAAITTLTQNNQKLPQRQGNPNRTKPKFKWQIRIENKINNIRRDLGHLTQFISGNASKRVTQGANKIKSKSPNRTLPEILDTLKQKLSVYATRLRRYKESNERKDTNNLFQRSEKQFYRKTMYNRQIAVTEPPNKQKLTDYWKSIWSEPKLHNNNIPWIKAEEDKHKHVTEQENTTFNTQEITETIKHTHNWKCPGIDNIQNFWYKQFTTTHEALTHQINKAILQPHTFPTFLTQGITYVKPKSSDTTNPSNYRPITCLPTLYKIITATISKKIEQHLTDNNILTEEQKGCRKNSRGCKEQLIIDSVIMGQTRKEHRNLHIGYIDYKKAFDSIPHSWLIRALEIYKINQHLRQFLAQIMKTWKTKIRLETQTERIQTEELYIRRGIFQGESLSALWFCLCLNPLSNILNRTEHGFNIRHQKVNQHKINHLLYMDDIKLYAATQTQLKELLKITEIFTLDVNMEFGISKCKVLHINKGQWKCHHETETINNETLDNMFDKEKYKYLGFQQSTKLNHTHIKTELRTEFKNRLTKLLQTKLNSKNLTKAINTFAIPILTYSFGIIKWSQTDIENIHILIRSQFTKYRKLHPNACKERLTIERKAGGRGIIDIRSLHTKQIQTLRKFFHSKQTSLHTATVKADKNYTPLDLARADHSADTHSHTQLQQEKMKTWSEKTLHGKHRYHIEQDHVNKKQSYTWLRDGQLFPETEGFLLAIQDKVILTRNYQKHIIKDPTIAEDRCRKCHQQKETIEHITSGCKILAGTEYTARHDSAAKVVHQALATTYRLIENTDPYYKYTPTPILENEDYKLYWDIGIHTDKTVSANRPDITFQCKKGKITYLIDIAVPNDTNIQAKYTEKISKYTDLATEIKRLWRQEKVIIVPLIISATSLTPITFTPHLVQLGLNTDIHKNIQKSVILKTCNIVRSFLNTEW

SEQ ID NO: 19813 - protein, 1262 aa, Pachyrhynchus sulphureomaculatus
MSGHFELLTPQNTENIPENNRPIKEASGERRNGRGRRGKWQLDQNDEDQATENGPAKSVVLATKPTPTKAGKSQQRMSCTTGINEHAMRCCNENTKPDKEITEKRITRRLDPPTSIPSATDVDTGQTQPPKPGQGPYVLQGQHATTKAGKPRQRLKWTDEMNRTVMRCYYTATKLETITSGYRQQLHRLFLTEYPHLQLLVSEQRVVDQKRVITKNNRLTPLELQTIKDTVAVELNTDQPNNRNNKADSEPASHTQPPSRTEQYPPPRRSITQNNIASTEQHHITDNNMNHSPPSTTSTQHHPESPVIQTLKAKMESNLARWSGTDPTTRNPIPRLIFRQSTQPILNTLNKHIIPQYITDSSTIEDIHTIIYAAAITALTQNNQKLPQRQGNPNRTKPKFKWQIRIENKINNIRRDLGHLTQFISGNASKRVTQGANKIKSKSPNRTLPEILDTLKQKLSVYAARLRRYKESNERKDTNNLFRRSEKQFYRKTKYNKQIAVTEPPNKQELTDYWKSIWSEPKQHNNNTPWIKAEEDKHKHVTEQEDTTFNTQEITETIKHTHNWKCPGIDNIQNFWYKQFTTTHEALTHQINKAILQPHTFPTFLTQGITYVKPKSSDTTNPSNYRPITCLPTLYKIITATISKKIEQHLTDNNILTEEQKGCRKNSRGCKEQLIIDSVIMGQTRKEHRNLHIGYIDYKKAFDSIPHSWLIRALEIYKINQHLRQFLAQIMKTWKTKIRLETQTERIQTEELYIRRGIFQGDSLSALWFCLCLNPLSNILSRTEHGFNIRHQKVNQHKINHLLYMDDIKLYAATQTQLKELLKITEIFTLDVNMEFGISKCKVLHINKGQWKHHHETETINNETLDNMFDKETYKYLGFQQSTKLNHTHIKTELRTEFKNRLTKLLQTKLNSKNLTKAINTFAIPILTYSFGIIKWSQTDIENIHILIRSQFTKYRKLHPNACKERLTIERKAGGRGIIDIRSLHTKQIQTLRKCFHNKQTSLHTATVKADKNYTPLDLARADHSADTHSHTQLQQEKMKTWSEKTLHGKHRYHIEQDHVNKKQSYTWLRDGQLFPETEGFLLAIQDKVILTRNYQKHIIKDPTIAEDRCRKCHQQKETIEHITSGCKILAGTEYTARHDSAAKVVHQALATTYRLIENTDPYYKYTPTSILENEDYKLYWDIGIHTDKTVSANRPDITFQCKKGKVTYLIDIAVPNDTNIQAKYTEKISKYTDLATEIKRLWRQKKSSLSPSLYQPQALHQ

SEQ ID NO: 19814 - protein, 1475 aa, Pachyrhynchus sulphureomaculatus
MLNNNNYNNENGRVLRRRTPVVQTATATPQQQLQTNQTTASVETTPDSFTRSDIVGDGNCLFRAVSLYLYGHQNHHEKLREVALRYLQQNWSELHTFSLIEVDDIKDFNNYYNYMRKNGTYGTSLEILALSETQNSNFHIFSKQRRTRHTKITFTDRPTIISTGKYNKTIYLLLTGNPMSGHFELLTPQNTENIPENNRPIKEASGERRRGKWQLDQNDEDQATENGPAKSVVLATKPTPTKAGKSQQRMSCTTGINEHAMRCCNENTKPDKEITAKRITRRLDPPTSIPSATDVDTGQTQPPKPGQGPYVLQGQHATTKAGKPRQRLKWTDEMNRTVMRCYYTATKLETITSGYRQQLHRLFLTEYPHLQLLVSEQRVVDQKRVITKNNRLTPLELQTIKDTVAVELNTDQPNNRNNKADSEPASHTQPPSRTQQYPPPRRSITQNNIASTAQHHITDNNMNHSPPSTTSTQHHPESPLIQTLKAKMESHLARWSGTDPTTRNSIPRLIFRQSTQPILNTLNKHIIPQYITDSSTIEDIHTIIYAAAITTLTQNNQKLPQRQGNPNRTKPKFKWQIRIENKINNIRRDLGHLTQFISGNASKRVTQGANKIKSKSPNRTLPEILDTLKQKLSVYAARLRRYKESNERKDTNNLFRRSEKQFYRKTMYNKQIAVTEPPNKQELTDYWKSIWSEPKQHNNNTPWIKAEEDKHKHVTEQENTTFNTQEITETIKHTHNWKCPGIDNIQNFWYKQFTTTHEALAHQINKAILQPHTFPTFLTQGITYVKPKSSDTTNPSNYRPITCLPTLYKIITATISKKIEQHLTDNNILTEEQKGCRKNSRGCKEQLIIDSVIMGQTRKEHRNLHIGYIDYKKAFDSIPHSWLIRALEIYKINQHLRQFLAQIMKTWKTKIRLETQTERIQTEELYIRRGIFQGDSLSALWFCLCLNPLSNILNRTEHGFNIRHQKENQHKINHLLYMDDIKLYAATQTQLKELLKITEIFTLDVNMEFGISKCKVLHINKGQWKHHHETETINNETLDNMFDKERYKYLGFQQSTKLNHTHIKTELRTEFKNRLTKLLQTKLNSKNLTKAINTFAKPILTYSFGIIKWSQTDIENIHILIRSQFTKYRKLHPNACKERLTIERKAGGRGIIDIRSLHTKQIQTLRKFFHSKQTSLHTATVKADKNYTPLDLARADHSADTHSHTQLQQEKMKTWSEKTLHGKHRYHIEQDHVNKKQSYTWLRDGQLFPETEGFLLAIQDKVILTRNYQKHIIKDPTIAEDRCRKCHQQKETIEHITSGCKILAGTEYTARHDSAAKVVHQALATTYRLIENTDPYYKYTPTSILENEDYKLYWDIGIHTDKTVSANRPDITFQCKKGKVTYLIDIAVPNDTNIQAKYTEKISKYTDLATEIKRLWRQEKVIIVPLIISATGLTPITFTPHLVQLGLNTDIHRNIQKSVILKTCNIVRSFLNTEW

SEQ ID NO: 19815 - protein, 958 aa, Pachyrhynchus sulphureomaculatus
MILNTINKHIIPQYITDLSTIEDIHTIIYAAAITTITQNNQKLPQRQRGPNSRKPKFKWQIRIENKINNIRRDLGHLTQFMNGNASKRVTQGVDKIKSKSLNRTLPEIVDTLKQKLSVYAARLRRYKESNERKDTNNLFRRSEKQFYRKTMYNEQTVVTEPPNKQELSDYWKTVWSEPKLNNNNASWIRAEEDKHKRVTEQENSTLTTEEIAETIKHTHNWKCPGIDNIQNFWYKQFTTTHEALTHQINKAILQPHTFPTFLTQGITYVKPKSSDTTNPSNYRPITCLPTLYKIITAAISKKIEQHLTDNNIITEEQKGCRKNSRGCKEQLIIDSVIMGQTRKEHRNLHIGYIDYKKAFDSIPHSWLSRALEIYKINQHLRQFLAQIMKTWKTKIRLETQTERIQTEELYIRRGIFQGDSLSALWFCLCLNPLSNILKRTEHGFNIRHQKGNQHKINHLLYMDDIKLYAATKTQLKELLKITEIFTLDVNMEFGISKCKVLHINKGQWKYHHETETINNETLDNMFDKETYKYLGFQQSTKLNHTHIKTELRTEFKNRLTKLLQTKLNSKYLTKAINTFAIPILTYSFGIIKWSQTDLENIHILIRSQFTKYRKLHPNACKERLTIERKAGGRGIIDIRSLHTKQIQALRKFFHTKQTSLHTATVKADKNYTPLDLSRVDHPADTHRHIQLQQEKMKTWSEKTLHGKHRYHIEQDHVNKKQSYTWLRDGQLFPETEGFLLAIQDKVILTRNYQKHIIKDPTITEDRCRKCHQQKETIEHITSGCKILAGTEYTARHDSAAKVVHQTLATTYKLIENTDPYYKYTPTSVLENKDYKLYWDISIHTDKTVSANRPDITFQCKKEKVTYLIDIAVPNDTNIQTKYTEKISKYTDLATEIKRLWKQEKVIIVPLIISATGLTPTTFTPHLVQLGLNTNIHKNIQKSVILKTCNIVRSFLNTQ

SEQ ID NO: 19816 - protein, 1480 aa, Pachyrhynchus sulphureomaculatus
MLNNNNYNNENGRVLRRRTPVVQTATATPQQQLQTNQTTASVETTPDSFTRSDIVGDGNCLFRAVSLYLYGHQNHHEKLREVALRYLQQNWSELHTFSLIEVDDIKDFNNYYNYMRKNGTYGTSLEILALSETQNSNFHIFSKQRRTRHTKITFTDRPTIISTGKYNKTIYLLLTGNPMSGHFELLTPQNTENIPENNRPIKEASGERRNGRGRRGKWQLDKNDEDQATENGPAKSVVLATKPTPTKAGKSQQRMSCTTGINEHAMRCCNENTKPDKEITEKRITRRLDPPTSIPSATDVDTGQTQPPKPGQGPYVLQGQHATTKAGKPRQRLKWTDEMNRTVMRCYYTATKLETITSGYRQQLHRLFLTEYPHLQLLVSEQRVVDQKRVITKNNRLTPLELQTIKDTVAVELNTDQPNNRNNKADSEPASHTQPPSRTQQYPSPRRSITQNNIASTAQHHITDNNMNHSPPSTTSTQHHPESPLIQTLKAKMESHLARWSGTDPTTRNPIPRLIFRQSTQPILNTLNKHIIPQYITDSSTIEDIHTIIYAAAITTLTQNNQKLPQRQGNPNRTKPKFKWQIRIENKINNIRRDLGHLTQFISGNASKRVTQGANKIKSKSPNRTLPEILDTLKQKLSVYAARLRRYKESNERKDTNNLFRRSEKQFYRKTMYNRQIAVTEPPNKQELTDYWKSIWSEPKQHNNNTPWIKAEEDKHKHVTEQENTTFNTQEITETIKHTHNWKCPGIDNIQNFWYKQFTTTHEALTHQINKAILQPHTFPTFLTQGITYVKPKSSDTTNPSNYRPITCLPTLYKIITATISKKIEQHLTDNNILTEEQKGCRKNSRGCKEQLIIDSVIMGQTRKEHRNLHIGYIDYKKAFDSIPHSWLIRALEIYKINQHLRQFLAQIMKTWKTKIRLETQTERIQTEELYIRRGIFQGDSLSALWFCLCLNPLSNILNRTEHGFNIRHQKENQHKINHLLYMDDIKLYAATQTQLKELLKITEIFTLDVNMEFGISKCKVLHINKGQWKHHHETETIDNETLDNMFDKETYKYLGFQQSTKLNHTHIKTELRTEFKNRLTILLQTKLNSKNLTKAINTFAIPILTYSFGIIKWSQTDIENIHILIRSQFTKYRKLHPNACKERLTIERKAGGRGIIDIRSLHTKQIQTLRKFFHSKQTSLHTATVKADKNYTPLDLARADHSADTHSHTQLQQEKMKTWSEKTLHGKHRYHIEQDHVNKKQSYTWLRDGQLFPETEGFLLAIQDKVILTRNYQKHIIKDPTIAEDRCRKCHQQKETIEHITSGCKILAGTEYTARHDSAAKVVHQALATTYRLIENTDPYYKYTPTSILENEDYKLYWDIGIHTDKTVSANRPDITFQCKKGKVTYLIDIAVPNDTNIQAKYTEKISKYTDLATEIKRLWRQEKVIIVPLIISATGLTPITFTPHLGQLGLNTDIHRNIQKSVILKTCNIVRSFLNTEW

SEQ ID NO: 19817 - protein, 1480 aa, Pachyrhynchus sulphureomaculatus
MSKNNNYSNDNGRVLRRRTPVVQTAIATPQQQPQTTQTTASAETTPDSFTRSDIVGDGNCLFRAVSLHLYGHQNHHEKLREVALRYLQQNWSELHTFSLIEVDDIKDFNNYYNYMRKNGTYGTSLEVLALSETQNSNFHIFSKQRRTRHTKITFTDRPTIISTGKYNKTIYLLLTGNPMSGHFELLTPQNIENIPDNSRPIKEASGERRNGRGRRGKWQLDQNDEDQATENGPAQSVVPASKPTPTKAGKSQQRMSCTTGINEHAMRCCNEITPDKEITDKRITRRLDPPPPIPSATDVNAGQIQPPKPGQTAYVLQGQHATTKAGKPRQRLKWTDEMNKTVMRCYYTATKLETVTSGYRLELHRLFLTEYPHLQLLVTEQRVIDQKRVITKNNRLTPFELQTIKDTVAAELNADQVAAELNTDQLNNRNDRADTEPISHTQPPSRKQQDPPPSRSITQNNISEQIASTTRHSTTSIQHHPESPLIQTLKAQMQSHLARWSGTDPTTRNPIPRLIFKQSTQMILNTINKHIIPQYITDLSTIEDIHTIIYAAAITTITQNNQKLPQRQRDPNSRKPKFKWQIRIENKINNIRRDLGHLTQFMNGNASKRVTQGVDKIKSKSLNRTLPEIVDTLKQKLSVYAARLRRYKESNERKDTNNLFRRSEKQFYRKTMYNEQTVVTEPPNKQELADYWKTIWSEPKLHNNNTSWIKAEEDKHKRVTEQENSTLTTEEITETIKHTHNWKCPGIDNIQNFWYKQFTTTHEALTYQINKTILQPHTFPTFLTQGITYVKPKSSDTTNPSNYRPITCLPTLYKIITAAISKKIEQHLTDNNIITEEQKGCRKNSRGCKEQLIIDSVIMGQTRKEHRNLHIGYINYKKAFDSIPHSWLIRALEIYKINQHLRQFLAQIMKTWKTKIRLETQTERIQTEELYIRRGIFQGDSLSALWFCLCLNPLSNILNRTEHGFNIRHQKGNQHKINHLLYMDDIKLYAATKTQLKELLKITEIFTLDVNMEFGISKCKVLHINKGQWKYHHETETINNETLDNMFDKETYKYLGFQQSIKLNHTHIKTELRTEFKNRLTKLLQTKLNSKYLTKAINTFAIPILTYSFGIIKWSQTDLENIHILIRSQFTKYRKLHPNACKERLTIERKAGGRGIIDIRSLHTKQIQALRKFFHTKQTSLHTATVKADKNYTPLDLSRVDHPADTHSHIQLQQEKMKTWSEKTLHGKHRYHIEQDHVNKKQSYTWLRDGQLFPETEGFLIAIQDKVILTRNYQKHIIKDPTITEDRCRKCHQQKETIEHITSGCKILAGTEYTARHDSAAKVVHQALATTYKLIENTDPYYKYTPTSVLENKDYKLYWDISIHTDKTVSANRPDITFQCKKEKVTYLIDIAVPNDTNIQTKYTEKISKYSDLATEIKRLWKQEKVVIAPLIISATGLTPTTFTPHLVELGLNTNIHKNIQKSVILKTCNIVRSFLNTQW

SEQ ID NO: 19818 - protein, 1413 aa, Pachyrhynchus sulphureomaculatus
MEIAFFRAVSLYLYGHQNHHEKLREVALRYLQQNWSELHTFSLIEVDDIKDFNNYYNYMRKNGTYGTSLEILALSETQNSNFHIFSKQRRTRHTKITFTDRPTIISTGKYNKTIYLLLTGNPMSGHFELLTPQNTENIPENNRPIKEASGERRNGRGRRGKWQLDQNDEDQATENGPAKSVVLATKPTPTKAGKSQQRMSCTTGINEHAMRCCNENTKPDKEITEKRITRRLDPPTSIPSATDVDTGQTQPPKPGQGPYVLQGQHATTKAGKPRQRLKWTDEMNRTVMRCYYTATKLETITSGYRQQLHRLFLTEYPHLQLLVSEQRVVDQKRVITKNNRLTPLELQTIKDTVAVELNTDQPNNRNNKADSEPASHTQPPSRTQQYPPPRRSITQNNIASTAQHHITDNNMNHSPPSTTSTQHHPESPLIQTLKAKMESHLARWSGTDPTTRNPIPRLIFRQSTQPILNTLNKHIIPQYITDSSTIEDIHTIIYAAAITTLTQNNQKLPQRQGNPNRTKPKFKWQIRIENKINNIRRDLGHLTQFISGNASKRVTQGANKIKSKSPNRTLPEILDTLKQKLSVYAARLRRYKESNERKDTNNLFRRSEKQFYRKTMYNKQIAVTEPPNKQELTDYWKSIWSEPKQHNNNTPWIKAEEDKHKHVTEQENTTFNTQEITETIKHTHNWKCPGIDNIQNFWYKQFTTTHEALTHQINKAILQPHTFPTFLTQGITYVKPKSSDTTNPSNYRPITCLPTLYKIITATISKKIEQHLTDNNILTEEQKGCRKNSRGCKEQLIIDSVIMGQTRKEHRNLHIGYIDYKKAFDSIPHSWLIRALEIYKINQHLRQFLAQIMKTWKTKIRLETQTERIQTEELYIRRGIFQGDSLSALWFCLCLNPLSNILNRTEHGFNIRHQKENQHKINHLLYMDDIKLYAATQTQLKELLKITEIFTLDVNMEFGISKCKVLHINKGQWKHHHETETINNETLDNMFDKETYKYLGFQQSTKLNHTHIKTELRTEFKNRLTKLLQTKLNSKNLTKAINTFAIPILTYSFGIIKWSQTDIENIHILIRSQFTKYRKLHPNACKERLTIERKAGGRGIIDIRSLHTKQIQTLRKFFHSKQTSLHTATVKADKNYTPLDLARADHSADTHSHTQLQQEKMKTWSEKTLHGKHRYHIEQDHVNKKQSYTWLQDGQLFPETEGFLLAIQDKVILTRNYQKHIIKDPTIAEDRCRKCHQQKETIEHITSGCKILAGTEYTARHDSAAKVVHQALATTYKLIENTDPYYKYTPTSILENEDYKLYWDIGIHTDKTVSANRPDITFQCKKGKVTYLIDIAVPNDTNMQTKYTEKISKYTDLATEIKRLWRQEKVIIVPLIISATGLTPITFTPHLVQLGTQHRHTQKHSKVSDFENM

SEQ ID NO: 19819 - protein, 878 aa, Pachyrhynchus sulphureomaculatus
MNGNASKRVTQGVDKIKSKSLKRTLPEIVDTLKQKLSVYAARLRRYKESNERKDTNNLFRRSEKQFYRKTMYNEQTVVTKPPNKQEIADYWKTVWSEPKLHNNNTPWIKAEEDKHKRVTEQENFTLTTEEITETIKHTHNWKCPGIDNIQNFWYKQFTTTHEALTHQINKAILQPHTLPTFLTQGITYVKPKSSDTTNPSNYRPITCLPTLYKIITAAISKKIEQHLTDNNIITEEQKGCRKNSRGCKEQLIIDSVIMGQTRKEHRNIHIGYIDYKKAFDSIPHSWLIRALEIYKINQQLRQFLAQIMKTWKTKICLETPTERIETEELYIRRGIFQGDSLSALWFCLCLNPLSNILNRTEHGFNIRHQKVNQHKINHLLYMDDIKLYAATQTQLKELLKTTEIFTLDVNMEFGISKCKVLHINKGQWKCHHETETVNNETLDNMFDKETYKYLGFQQSTKLNHTHIKTELRTEFKNRLTKLLQTKLNSKNLTKAINTFAIPVLTYSFGIIKWSQTDIENIHILIRSQFTKYRKLHPNACKERLTIERKAGGRGIIDIRSLHTKQIQTLRKFFHSKQTSLHTATVKADKNYTPLDLARADHSADTHSHTQLQQEKMKTWSEKTLHGKHRYHIEQDHVNKKQSYTWLQDGQLFPETEGFLLAIQDKVILTRNYQKHIIKDPTIAEDRCRKCHQQKETIEHITSGCKILAGTEYTARHDSAAKVVHQALATTYKLIENTDPYYKYTPTSILENEDYKLYWDIGIHTYKTVSANRPDITFQCKKEKVTYLIDIAVPNDTNIQTKYTEKISKYTDLATEIKRLWKQEKVIIVPLIISATGLTPTTFTPHLVQLGLNTNIHKNIQKSVILKTCNIVRSFLNTQ

SEQ ID NO: 19820 - protein, 1481 aa, Pachyrhynchus sulphureomaculatus
MLNNNNYNNENGRVLRRRTPVIQTATATPQQQQLQTNQTTASVETTPDSFTRSDIVGDGNCLFRAVSLHLYGHQNHHEKLREVALRYLQQNWSELHTFSLIEVDDIKDFNNYYNYMRKNGTYGTSLEILALSETQNSNFHIFSKQRRTRHTKITFTDRPTIISTGKYNKTIYLLLTGNPMSGHFELLTPQNMENIPENNRPIKEASGERRNGRGRRGKWQLDQNDEDQATENGPAKSVVSATKPTPTKAGKSQQRMSCTTGINEHAMRCCNENTKPDKEITEKRITRRLDPPTSIPSTTDVGTGQTQPPKPGQGPYVLQGQHATTKAGKPRQRLKWTDEMNRTVMRCYYTATKLETITSGYRQQLHRLFLTEYPHLQLLVSEQRVIDQKRVITKNNRLTPLELQTIKDTVAVELNTDQPNNRNNKADSEPASHTQPPSRTQQYSPPRRSITQNNIASTAQHHITDNNMNHSPPSTTSTQHHPESPLIQTLKGKMESHLARWLGTDPTTRNPIPRLIFRQSTQPILNTVNKHIIPQYITDLSTIEDIHTIIYAAAITTLTQNNQKLPQRQGNPNRTKPKFKWQIRIENKINNIRRDLGHLTQFISGNASKRVTQGANKIKSKSPNRTLPEILDTLKQKLSVYAARLRRYKESNERKDTNNLFRRSEKQFYRKTMYNKQIAVTEPPNKQELADYWKSIWSEPKPHNNNTPWIKAEEDKYKHVTEQENITLNTQEITETIKHTHNWKCPGIDNIQNFWYKQFTTTHEALTHQINKAILQPHTFPTFLTQGITYVKPKSSDTTNPSNYRPITCLPTLYKIITATISKKIEQHLIDNNILTEEQKGCRKNSRGCKEQLIIDSVIMGQTRKEHRNLHISYIDYKKAFDSIPHSWLIRALEIYKINQHLRQFLAQIMKTWKTKIRLETQTERIQTEELYIRRGIFQGDSLSALWFCLCLNPLSNILNRTEHGFNIRHQKVNQHKINHLLYMDDIKLYAATQTQLKELLKITEIFTLDVNMEFGISKCKVLHINKGQWKCHHETETINSETLDNMFDKETYKYLGFQQSTKLNHTHIKTELRDEFKNRLTKLLQTKLNSKNLTKAINTFAIPILTYSFGIIKWSRTDIENIHILIRSQFTKYRKLHPNACKERLTIERKAGGRGIIDIRSLHTKQIQTLRKFFHSKQTSLHTATVKADKNYTPLDLARADHSADTHSHTQLQQEKMKTWSEKTLHRKHRYHIEQDHVNKKQSYTWLQDGQLFPETEGFLLAIQDKVILTRNYQKHIIKDPTIAEDRCRKCHQQKETIEHITSGCKILAGTEYTARHDSAAKVVHQALATTYKLIENTDPYYKYTPTSILENEDYKLYWDVGIHTDKTVSANRPDIAFQCKKGKVTYLIDIAVPNDRNIQTKYTEKISKYTDLATEIKRLWRQEKVIIVPLIISATGLTPITFTPHLVQLGLNTDIHRNIQKSVILKTCNIVRPFLNTEW

SEQ ID NO: 19821 - protein, 1461 aa, Pachyrhynchus sulphureomaculatus
MSKNNNYSNDNGRVLRRRTPVVQTAIATPQQQQPQTTQTTASAETTPDSFTRSDIVGDGNCLFRAVSLHLYGHQNHHENLREVALRYLQQNWSELHTFSLIEVDDIKDFNNYYNYMRKNGTYGTSLEILALSETQNSNFHIFSKQRRTRHTKITFTDRPTIISTGKYNKTIYLLLTGNPMSGHFELLTPQNIENIPDNSRPIKEASGERRNGRGRRGKWQLDQNDEDQATENGPAQSVVPASKPTPTKAGKSQQRMSCTTGINEHAMRCCNEITPDKEITDKRITRRLDPPPPIPSATDVNAGQIQPPKPGQTAYVLQGQHATTKAGKPRQRLKWTDEMNKTVMRCYYTATKLETVTSGYRLELHRLFLTEYPHLQLLVTEQRVIDQKRVITKNNRLTPFELQTIKDTVAAELNADQVAAELNTDQLNNRNSRADTEPISHTQPPSRKQQDPPPSRSITQNNISEQIASTTRHSTTSIQHHPESPLIQTLKAEMQSHLARWSGTDPTTRNPIPRLIFKQSTQMILNTINKHIIPQYITDLSTIEDIHTIIYAAAITTITQNKQKLPQRQRDPNSRKPKFKWQIRIENKINNIRRDLGHLTQFMNGNASKRVTQGVDKIKSKSLNRTLPEIVDNLKQKLSVYAARLRRYKESNERKDTNNLFRRSEKQFYRKTMYNEQTVVTEPPNKQELADYWKTVWSESKLHNNNTSWIKAEEDKHKRVREQENSTLTTEEITETIKHTHNWKCPGIDNIQNFWYKQFTTTHEALTHQINKAILQPHTFPTFLTQGITYVKPKSSDTTNPSNYRPITCLPTLYKIITASISKKIEQHLTDNNIITEEQKGCRKNSRGCKEQLIIDSVIMGQTRKEHRNLHIGYIDYKKAFDSIPHSWLIRALEIYKINQHLRQFLAQIMKTWKTKIRLETQTERIQTEELYIRRGIFQGDSLSALWFCLCLNPLSNILNRTEHGFNIRHQKGNQHKINHLLYMDDIKLYAATKTQLKELLKITEIFTLDVNMEFGISKCKVLHINKGQWKYHHETEAINNETLDNMFDKETYKYLGFQQSTKLNHTHIKTELRTEFKNRLTKLLQTKLNSKYLTKAINTFAIPILTYSFGIIKWSQIDLENIHILIRSQFTKYRKLHPNACKERLTIERKAGGRGIIDIRSLHTKQIQALRKFFHTKQTSLHTATVKADKNYTPLDLSRVDHPADTHSHIQLQQEKMKTWSEKTLHGKHRYHIEQDHVNKKQSYTWLRDGQLFPETEGFLLAIQDKVILTRNYQKHIIKDPTITEDRCRKCHQQKETIEHITSGCKILAGTEYTARHDSAAKVVHQALATTYKLIENTDPYYKYTPTSVLENKDYKLYWDISIHTDKTVSANRPDITFQCKKEKVTYLIDIAVPNDTNIQTKYKEKISKYTDLATEIKRLWKQEKVIIVPLIISATGLTPTTFTPHLVQLGLNTKTFRSQ

SEQ ID NO: 19822 - protein, 1301 aa, Pachyrhynchus sulphureomaculatus
MSGHFELLTPQNIENIPDNSRPIKEASGERRNGRGRRGKWQLDQNDEDQATENGPAQSVVPASKPTPTKAGKSQQRMSCTTGINEHAMRCCNEITPDKEITDKRITRRLDPPPPIPSATDVNAGQIQPPNPGQTAYVLQGQHATTKAGKPRQRLKWTDEMNKTVMRCYYTATKLETVTSGYRLELHRLFLTEYPHLQLLVTEQRVIDQKRVITKNNRLTPFELQTIKDTVAAKLNADQVAAELNTDQLNNRNSRADTEPISHTQPPSRKQQDPPPSRSITQNNISEQIASTTRHSTTSIQHHPESPLIQTLKAEMQSHLARWSGTDPTTRNPIPRLIFKRSTQMILNTINKHIIPQYITDLSTIEDIHTIIYAAAITTITQNNQKLPQRQRDPNSRKPKFKWQIRIENKINNIRRDLGHLTQFMNGNASKRVTQGVDKIKSKSLNRTLPEIVDNLKQKLSVYAARLRRYKESHERKDTNNLFRRSEKQFYRKTMYNEQTVVTEPPNKQELADYWKTVWSESKLHNNNTSWIKAEEDKHKRVTEQENSTLTTEEITETIKHTHNWKCPGIDNIQNFWYKQFTTTHEALTHQINKAILQPHTFPTFLTQGITYVKPKSSDTTNPSNYRPITCLPTLYKIITAAISKKIEQHLTDNNIITEEQKGCRKNSRGCKEQLIIDSVIMGQTRKEHRNLHIGYIDYKKAFDSIPHSWLIRALEIYKINQHLRQFLAQIMKTWKTKIRLETQTERIQTEELYIRRGIFQGDSLSALWFCLCLNPLSNILNRTEHGFNIRHQKGNQHKINHLLYMDDIKLYAATKTQLKELLKITEIFTLDVNMEFGISKCKVLHINKGQWKYHHETETINNETLDNMFDKETYKYLGFQQSTKLNHTHIKTELRTEFKNRLTKLLQTKLNSKYLTKAINTFAIPILTYSFGIIKWSQTDLENIHILIRSQFTKYRKLHPNACKERLTIERKAGGRGIIDIRSLHTKQIQALRKFFHTKQTSLHTATVKADKNYTPLDLSRVDHPADTHSHIQLQQEKMKTWSEKTLHGKHRYHIEQDHVNKKQSYTWLRDGQLFPETEGFLLAIQDKVILTRNYQKHIIKDPTITEDRCRKCHQQKETIEHITSGCKILAGTEYTARHDSAAKVVHQALATTYKLIDNTDPYYKYTPTSVLENKDYKLYWDISIHTDKTVSANRPDITFQCKKEKVTYLIDIAVPNDTNIQTKYTEKISKYTDLATEIKRLWKQEKVIIVPLIISATGLTPTTFTPHLVQLGLNTNIHKNIQKSVILKTCNIVRSFLNTQ

SEQ ID NO: 19823 - protein, 1300 aa, Pachyrhynchus sulphureomaculatus
MSGHFELLTPQNIKNIPDNSRPIKEASGERRNGRGRRGKWQLDQNDEDQATENGPAKSVVLATKPTPTKAGKSQQRMSCTTGTNEQAMRCCNENTKPDKEITEKRITRRLDPPTSIPSATDVDTGQTQPPEPGQGPYVLQGQHATTKAGKPRQRLKWTDEMNRTVMRCYYTVTKLETITSGYRQQLHRLFLTEYPHLQLLVSEQRVVDQKRVITKNNRLTPLELQTIKDTVAVELNTDQPNNGNNRADSEPASHTQPPSRTQQYPPPRRSITQNNIASTAQHHITDNNMNHSPPSTTSTQHHPESPLIQTLKAKMESHLARWSGTDPTTRNPIPRLIFRQSTQPILNTLNKHIIPQYITDSSTIEDIHTIIYAAAITTLTQNNQKLPQRQGNPNRTKPKFKWQIRIENKINNIRRDLGHLTQFISGNASKRVTQGANKIKSKSPNRTLPEILDTLKQKLSVYAARLRRYKESNERKDTINLFRRSEQQFYRKTMYNKQIAVTEPPNKQELTDYWKSIWSEPKLHNNNTPWIKAEEDKHKHVTEQENTTFNTQEITETIKHTHNWKCPGIDNIQNFWYKQFTTTHEALTHQINKAILQPHTFPTFLTQGITYVKAKSSDTANPSNYRPITCLPTLYKIITATISKKIEQHLTDNNILTEEQKGCRKNSRGCKEQLIIDSVIMEQTRKEHRNLHIGYIDYKKAFDSIPHSWLIRALEIYKINQHLRQFLAQIMKTWKTKIRLETQTERIQTEELYIRRGIFQGDSLSALWFCLCLNPLSNILNRTEHGFNIRHQKVNQHKINHLLYMDDIKLYAATKTQLKELLKITEIFTLNVNMEFGISKCKVLHINKGQWKYHHETETINNETLDNMFDKETYKYLGFQQSTKLNHTHIKTELRTEFKNRLTKLLQTKLNSKYLTKAINTFAIPILTYSFGIIKWSQTDIENIHILIRSQFTKYRKLHPNACKERLTIERKAGGRGIIDIRSLHTKQIQALRKFFHSKQTSLHTATVKADKNYTPLDLSRADHSADTHSHTQLQQEKMKTWSEKTLHGKHRFHIEQDHVNKKQSYTWLQDGQLFPETEGFLLAIQDKVILTRNYQKHIIKDPTIAEDRCRKCHQQKETIEHITSGCRILAGTEYTARHDSAAKVVHQALATTYKLIENTDPYYKYTPTSILENEDYKLYWDISIHTDKTVSANRPDITFQCKKGKVTYLIDIAVPNDTNIQTKYTEKISKYTDLATEIKRLWKQEKVIIVPLIISATGLTPITFTPHLVQLGLNTNIHKNIQKSVILKTCNIVRSFLNT

SEQ ID NO: 19824 - protein, 1302 aa, Pachyrhynchus sulphureomaculatus
MSGHFELLTPQNTENIPENNRPIKEASGERRNGRGRRGKWQLDQNDEDQATENGPAKSVVLATKPTPTKAGKSQQRMSCTTGINEHAMRCCNENTKPDKEITEKRITRRLDPPTSIPSATDVDTGQTQPPEPGQGPYVLQGQHATTKAGKPRQRLKWTDEMNRTVMRCYYTATKLETITSGYRQQLHRLFLTEYPHLQLLVSEQRVVDQKRVITKNNRLTPLELQTIKDTVAVELNTDQPNNRNNKADSEAASHTQPPSRTQQYPPPRRSITQNNIASTAQHHITDNNMNHSPPSTTSTQHHPESPLIQTLKAKMESHLARWSGTDPTTRNPIPRLIFRQSTQPILNTLNKHIIPQYITDSSTIEDIHTIIYAAAITTLTQNNQKLPQRQGNPNRTKPKFKWQIRIENKINNIRRDLGHLTQFISGNASKRVTQGANKIKSKSPNRTLPEILDTLKQKLSVYAARLRRYKESNERKDTNNLFRRSEKQFYRKTMYNRQIAVTEPPNKQELTDYWKSIWSEPKQHNNNTPWIKAEEDKHKHVTEQENTTFNTQEITETIKHTHNWKCPGIDNIQNFWYKQFTTTHEALTHQINKAILQPHTFPTFLTQGITYVKPKSSDTTNPSNYRPITCLPTLYKIITATISKKIEQHLTDNNILTEEQKGCRKNSRGCKEQLIIDSVIMGQTRKEHRNLHIGYIDYKKAFDSIPHSWLIRALEIYKINQHLRQFLAQIMKTWKTKIRLETQTERIQTEELYIRRGIFQGDSLSALWFCLCLNPLSNILNRTEHGFNIRHQKENQHKINHLLYMDDIKLYAATQTQLKELLKITEIFTLDVNMEFGISKCKVLHINKGQWKHHHETETINNETLDNMFDKETYKYLGFQQSTKLNHTHIKTELRTEFKNRLTKLLQTKLNSKNLTKAINTFAIPILTYSFGIIKWSQTDIENIHILIRSQFTKYRKLHPNACKERLTIERKAGGRGIIDIRSLHTKQIQTLRKFFHSKQTSLHTATVKADKNYTPLDLARANHSADTHSHTQLQQEKMKTWSEKTLHGKHRYHIEQDHVNKKQSYTWLRDGQLFPETEGFLLAIQDKVILTRNYQKHIIKDPTIAEDRCRKCHQQKETIEHITSGCKILAGTEYTARHDSAAKVVHQALATTYRLIENTDPYYKYTPTSILENEDYKLYWDIGIHTDKTVSANRPDITFQCKKGKVTYLIDIAVPNDTNIQAKYTEKISKYTDLATEIKRLWRQEKVIIVPLIISATGLTPITFTPHLVQLGLNTDIHRNIQKSVILKTCNIVRSFLNTEW

SEQ ID NO: 19825 - protein, 964 aa, Pachyrhynchus sulphureomaculatus
MVRHRPHNKKSHPSFNLQTKHATNPQHLNKHIIPQYITDLSTIEDIHTIIYAAAITTLTQNNQKLPQRQGNPNRTKPKFKWQIRIENKINNIRRDLGHLTQFISWNASKRVTQGANKIKSKSPNRTLPEILDTLKQKLSVYAARLRRYKESNERKDTNNLFRRNEKQFYRKTMYNRQIAVTEPPNKQKLTDYWKSIWSEPKLHNNNTPWIKAEEDKHKHVTEQENTTFNTQEITETIKHTHNWKCPGIDNIQNFWYKQFTTTHEALTHQINKAILQPHTFPTFLTQGITYVKPKSSDTTNPSSYRPITCLPTLYKIITATISKKIEQHLTDNNILTEEQKGCRKNSRGCKEQLIIDSVIMGQTRKEHRNLHIGYIDYKKAFDSIPHSWLIRALEIYKINQHLRQFLAQIMKTWKTKIRLETQTERIQTEELYIRRGIFQGDSLSALWFCLCLNPLSNILNRTEHGFNIRHQKVNQHKINHLLYMDDIKLYAATQTQLKELLKITEIFTLDVNMEFGISKCKVLHINKGQWKCHHETETINNETLDNMFDKETYKYLGFQQSTKLNHTHIKTELRTEFKNRLTKLLQTKLNSKNLTKAINTFAIPVLTYSFGIIKWSQTDIENIHILIRSQFTKYRKLHPNACKERLTIERKAGGRGIIDIRSLHTKQIQTLRKFFHSKQTSLHTATVKADKNYTPLDLARADHSADTHSHTQLQQEKMKTWSEKTLHGKHRYHIEQDHVNKKQSYTWLQDGQLFPETEGFLLAIQDKVILTRNYQKHIIKDPTIAEDRCRKCHQQKETIEHITSGCKILAGTEYTARHDSAAKIVHQALATTYKLIENTDPYYKYTPTSILENEDYKLYWDIGIHTDKTVSANRPDITFQCKKEKVTYLIDIAVPNDTNIQTKYTEKISKYTDFATEIKRLWKQEKVIIVPLIISATGLTPITFTPHLVQLGLNTNIHKTFRSQ

SEQ ID NO: 19826 - protein, 1481 aa, Pachyrhynchus sulphureomaculatus
MLKNNNYNNENGRVLRRRTPVVQTATATPQQQQLQTNQTTASVETTPDSFTRSDIVGDGNCLFRAVSLHLYGHQNHHEKLREVALRYLQQNWSELHTFSLIEVDDIKDFNNYYNYMRKNGTYGTSLEILALSETQNSNFHIFSKQRRTRHTKITFTDRPTIISTGKYNKTIYLLLTGNPMSGHFELLTPQNTENIPENNRPIKEASGERRNGRGRRGKWQLDQNDEDQATENGPAKSVVSATKPAPTKAGKSQQRMSCTTGINEHAMRCCNENTKPDKEITEKKITRRLDPPTSIPSATDVDTGQTQPPKPGQGPYVLQGQHATTKAGKPRQRLKWTDEMNRTVMRCYYTATKLETITSGYRQQLHRLFLTEYPHLQLLVSEQRVIDQKRVITKNNRLTPLELQTIKDTVAVELNTDQPNNRNNKADSEPASHTQPPSRTQQYPPPRRSITQNNIASTAQHHITDNNMNHSPPSTTSTQHHPESPLIQTLKAKMESHLARWSGTDPTTRNPIPRLIFRQSTQPILNTLNKHIIPQYITDSSTIEDIHTIIYAAAITTLTQNNQKLPQRQGNPNRTKPKFKWQIRIENKINNIRRDLGHLTQFISGNASKRVTQGANKIKSKSPNRTLPEILDTLKQKLSVYAARLRRYKESNERKDTNNLFRRSEKQFYRKTMYNKQITVTEPPNKQELTDYWKSIWSEPKQHNGNTPWIKAEEDKHKHVTEQENTTFNTQEITETIKHTHNWKCPGIDNIQNFWYKQFTTTHEALTHQINKAILQPHTFPTFLTQGITYVKPKSSDTTNPSNYRPITCLPTLYKIITATISKKIEQHLTENNILTEEQKGCRKNNRGCKEQLIIDSVIMGQTRKEHRNLHIGYIDYKKAFDSIPHSWLIRALEIYKINPHLRQFLAQIVKTWKTKIRLETQTERIQTEELYIRRGIFQGDSLSALWFCLCLNPLSNILNRTEHGFNIRHQKENQHKINHLLYMDDIKLYAATQTQLKELLKITEIFTLDVNMEFGISKCKVLHINKGQWKHHHETETINNETLDNMFDKETYKYLGFQQSTKLNHTHIKTELRTEFKNRLTKLLQTKLNSKNLTKAINTFAIPILTYSFGIIKWSQTDIENIHILIRSQFTKYRKLHPNACKERLTIERKAGGRGIIDIISLHTKQIQRLRKFFHSKQTSLHTATVKADKNYTPLDLARADHSADTHSHTQLQQEKMKTWSEKTLHGKHRYHIEQDHVNKKQSYTWLRDGQLFPETEGFLLAIQDKVILTRNYQKHIIKDPTIAEDRCRKCHQQKETIEHITSGCKILAGTEYTARHDSAAKVVHQALATTYRLIENTDPYYKYTPTSILENEDYKLYWDIGIHTDKTVSANRPDITFQCKKGKVTYLIDIAVPNDTNIQAKYTEKISKYTDLATEIKRLWRQEKVIIVPLIISATGLTPITFTPHLVQLGLNTDIHRNIQKSVILKTCNIVRSFLNTEW

SEQ ID NO: 19827 - protein, 1014 aa, Pachyrhynchus sulphureomaculatus
MNHSPPSTTSTQHHPESPLIQTLKAKMESHLARWSGTDPTTRNPIPRLIFRQSTQPILNTLNKHIIPQYITDLSTIEDIHTIIYAAAITTLTENNQKLPQRQGNPNRTKPKFKWQIRIENKINNIRRDLGHLTQFISGNASKRVTQGANKIISKSPNRTLPEILDTLKQKLSVYAARLRRYKESNERKDTNNLFRRSEKQFYRKTMYNKQIAVTEPPNKQEFTDYWKSIWSEPKLHNNNTPWIKAEEDKYKHVTEQENTTLNTQEITETIKHTHNWKCPGIDNIQNFWYKQFTTTHEALTHQINKAILQPHTFPTFLTQGITYVKPKSSDTTNPSNYRPITCLPTLYKIITATISKKIEQHLTDNNILTEEQKGCRKNSRGCKEQLIIDSVIMGQTRKEHRNLHIGYIDYKKAFDSIPHSWLIRALEIYKINQHLRQFLAQIMKTWKTKIRLETQTERIQTEELYIRRGIFQGDSLSALWFCLCLNPLSNILNRTEHGFNIKHQKVNQHKINHLLYMDDIKLYAATQTQLKELLKITEIFTLDINMEFGISKCKVLHINKGKWKGHHETETINNETLDNMFDKETYKYLGFQQSTKLNHTHIKAELRTEFKNRLTKLLQTKLNSKNLTKAINTFAIPILTYSFGIIKWSQTDIENIHILIRSQFTKYRKLHPNACKERLTIERKAGGRGIIDIRSLHTGQVQALRKFFHSKQTSLHTATVKADKNYTPLDLARADHSADTHSHVQLQQEKMKTWSEKTLHGKHRYHIEQDHVNKKQSYTWLQDGQLFPETEGFLLAIQDKVILTRNYQKHIIKDPTITEDRCRRCHQQKETIEHITSGCKILAGTEYTARHDSAAKVVHQALATTYKLIENTDPYYKYTPTSVLENKDYKLYWDISIHTDKTVSANRPDITFQCKKEKVTYLIDIAVPNDTNIQTKYTEKISKYTDLATEIKRLWKQEKVIIVPLIISATGLTPTTFTPHLVQLGLNADIHKNIQKSVILKTCNIVRSFLNTQW

SEQ ID NO: 19828 - protein, 1225 aa, Pachyrhynchus sulphureomaculatus
MSCTTGINEHAMRCCNENIKPDKEITEKRITRRLDPPTSIPSATDVDTGQTQPPKPGQGPYVLQGQHATTKAGKPRQRLKWTNEMNRTVMRCYYTATKLETITSGYRQQLHRLFLTEYPHLQLLVSEQRVVDQKRVITKNNRLTPRELQTIKDTVAVELNTDQPNNRNNKADSEPASHTQPPSRTQQYPPPRRSITQNNIASTAQHHITDNNMNHLPPSTTSTQHHPESPLIQTLKAKMESHLARWSGTDPTTRNPIPRLIFRQSTQPILNTLNKHIIPQYITDSSTIEDIHTIIYAAAITTLTQNNQKLPQRQGNPNRTKPKFKWQIRIENKINNIRRDLGHLTQFISGNASKRVTQGTNKIKSKSPSRTLPEILDTLKQKLSVYAARLRRYKESNERKDTNNLFRRSEKQFYRKTMYNKQIAVTEPPNKQELTDYWKSIWSEPKQHNNTPWIKAEEDKHKHVTEQENTTFNTQEITETIKHTHNWKCPGIDNIQNFWYKQFTTTHEALTHQINKAILQPHTFPTFLTQGITYVKPKSSDTTNPSNYRPITCLPTLYKIITATISKKIEQHLTDNNILTEEQKGCRKNSRGCKEQLIIDSVIMGQTRKEHRNLHIGYIDYKKAFDSIPHSWLIRALEIYKINQHLRQFLAQIMKTWKTKIRLETQTERIQTEELYIRRGIFQGDSLSALWFCLCLNPLSNILNRTEHGFNIRHQKENQHKINHLLYMDDIKLYAATQTQLKELLKITEIFTLDVNMEFGISKCKVLHINKGQWKHHHETETINNETLDNMFDKETYKYLGFQQSTKLNHTHIKTELRTEFKNRLTKLLQTKLNSKNLTKAINTFAIPILTYSFGIIKWSQTDIENIHILIRSQFTKYRKLHPNACKERLTIERKAGGRGIIDIRSLHTKQIQTLRKFFHSKQTSLHTATVKADKNYTPLDLARADHSADTHSHTQLQQEKMKTWSEKTLHGKHRYHIEQDHVNKKQSYTWLRDGQLFPETEGFLLAIQDKVILTRNYQKHIIKDPTIAEDRCRKCHQQKETIEHITSGCKILAGTEYTARHDSAAKVVHQALATTYRLIENTDPYYKYTPTSILENEDYKLYWDIGIHTDKTVSANRPDITFQCKKGKVTYLIDIAVPNDTNIQAKYTEKISKYTDLATEIKRLWRQEKVIIVPLIISATGLTPITFTPHLVQLGLNTDIHRNIQKSVILKTCNIVRSFLNTEW

SEQ ID NO: 19829 - protein, 807 aa, Pachyrhynchus sulphureomaculatus
MCNKQIAVTEPPNEQELTDYWKSIWSEPKLHNNNTPWIKAEEDKHKHVTEQEDTTFSAQEITETIKHTHNWKCPGIDNIQNFWYKQFTTTHEALTHQINKAILQPHTLPTFLTQGITYVKPKSSDTTNPSNYRPITCLPTLYKIITATISRKIEQHLTDNNILTEEQKGCRKNSRGCKEQLIIDSVIMGQTRKEHRNLHIGYIDYKKAFDSIPHSWLIRALEIYKINQHLRQFLAQIMKTWKTKIRLETQTERIQTEELYIRRGIFQGDSLSALWFCLCLNPLSNILNRTEHGFNIRHQKVNQHKINHLLYMDDIKLYAATQTQLKELLKITEIFTLDVNMEFGISKCKVLHINKGQWKCHHETETINNETLDNMFDKETYKYLGFQQSTKLNHTHIKTELRTEFKNRLTKLLQTKLNSKNLTKAINTFAIPILTYSFGIIKWSQTDIENIHILIRSQFTKYRKLHPNACKERLTIERKAGGRGIIDIRSLHTKQIQALRKFFHSKQTSLHTATVKADKNYTPLDLSRADHSADTHSHTQLQQEKMKTWSEKTLHGKHRYHIEQDHVNKKQSYTWLQDGQLFPETEGFLLAIQDKVILTRNYQKHIIKDPTIAEDRCRKCHQQKETIEHITSGCRILAGTEYTARHDSAAKVVHQALATTYKLIENTDPYYKYTPTSILENEDYKLYWDISIHTDKTVSANRPDITFQCKKGKVTYLIDIAVPNDTNIQTKYTEKISKYTDLATEIKRLWKQEKVIIVPLIISATGLTPITFTPHLVQLGLNTNIHKNIQKSVILKTCNIVRSFLNT

SEQ ID NO: 19830 - protein, 1360 aa, Pachyrhynchus sulphureomaculatus
MRKNGTYGTSLEILALSETQNSNFHIFSKQRRTRHTKITFTDRPTIISTGKYNKTIYLLLTGNPMSGHFELLTPQNIENIPDNSRPIKEASGERRNGRGRRGKWQLDQNDEDRATENGPAKSVVPASKPTPTKVGKSQQRMSCTTGINEHAMRCCDEITPDKEITDKRITRRLDPPPPIPSATDVDAGQIKPPKPGQTAYVLQGQHATTKAGKPRQRLKWTDEMNRTVMRCYYTATKLETVTSGYRLELHRLFLTEYPHLQLLVSEQRVIDQKRVITKNNRLTPFELQTIKDTVAAELNTDQVAAELNSSRVDTEAISHTQPPSRKQQDPPPSRSLTQNNISMQIASTTRHHITDDKMNDSPPSTTSTQHHPESPLIQTLKAEMQSHLARWSGTDPTTRNPIPRLIFKQSTQIILNTINKHIVPQYITDLSTIEDIHTIIYAAAITTITQNNQKLPQRQRDPNSRKPKFKWQIRLENKINNIRRDLGHLTQFINGNASKRVTQGVDKIKSKSLNRTLPEIVDTLKQKLSVYAARLRRYKESNERKDTNNLFRRSEKQFYRKAMYNEQTIVTEPPNKQELADYWKTVWSEPKLHNNNTLWIKAEEDKHKRMTEQENSTLTTEEITETIKHTHNWKCPGIDNIQNFWYKQFTTSHEALTHQINKAILQPHTFPTFLTQGITYIKPKSSDTTNPSNYRPITCLPTLYKIITAAISKKIEQHLTDNNILTEEQKGCRKNSRGCKEQLIIDSVIMGQTRKEHRNLHIGYIDYKKAFDSIPHSWLIKALEIYKINQHLRQFLAQIMKTWKTKIRLETQTERIQTEELYIRRGIFQGDSVSALWFCLCLNPLSNILNRTEHGFNIRHQKVNQHKINHLLYMDDIKLYAATKTQLKELLKITEIFTLDVNMEFGISKCKVLHINKGQWKGHHETETINNETLDNMFDKETYKYLGFQQSTKLNHTHIKTELRTEFQNRLTKLLQTKLNSKNLTKAINPFAIPILTYSFGIIKWSQTDIENIHILIRSQFTKYRKLHPNACKERLTIERKAGGRGIIDIRSLHTKQIQALRKFFHTKQTSLHTATVKADKNYTPLDLSRVDHPADTHSHTQLQQEKMKTWSEKTLHGKHRYHIKQDHVNKKQSYTWLRVGQLFPETEGFLLAIQDKVILTRNYQKHIIKDPTITEDRCRKCHQQKETIEHITSGCKILAGTEYTARHDSAAKVVHQALATTYKLIENTDPYYKYTPTSVLENKDYKLYWDISIHTDKTVSANRPDITFQCRKEKVTYLIDIAVPNDTNIQTKYTEKISKYTDLATEIKRLWKQEKVIIVPLIISATGLTPTTFTPHLVQLGLKHKHTQKHSEVSDFENM

SEQ ID NO: 19831 - protein, 879 aa, Pachyrhynchus sulphureomaculatus
MNGNASKRVTQGVDKIKSKSLNRTLPEIVDTLKQKLSLYAARLRRYKESNERKDTNNLFRRSEKRFYRKTMYNEQTVVTEPPNKQELADYWKTVWSEPKLHNNNTPWIKAEEDKHKRVTEQENPTLTTEEITETIKHTHNWKCPGTDNIQNFWYKQFTTTHEALTHQINKAILQPHTFPTFLTQGITYIKPKSSDTTNPSNYRPITCLPTLYKIITATISKKIEQHVIDNNILTEEQKGCRKNSRGCKEQLIIDSVIMGQTRKEHRNLHIGYIDYKKAFDSIPHSWLIRALEIYKINQHLRQFLAQIMKTWKTKIRLETQTERIQTKELYIRRGIFQGDSLSALWFCLCLNPLSNILNRTEHGFNIRHQKVNQHKINHLLYMDDIKLYAATKTQLKELLKITEIFTLDVNMEFGISKCKVLHINKGQWKYHHETETINNETLDNMFDKETYKYLGFQQSTKLNHTHIKTELRTEFKNRLTKLLQTKLNSKNLTKAINTFAIPILTYSFGIIKWSQTDIENIHILIRSQFTKYRKLHPNACKERLTIERKAGGRGIIDIRSLHTKQIQALRKFFHTKQTSLHTATIKADKNYTPLDLSRVDHAADTHSHTQLQQEKMKTWSEKTLHGKHRYHIEQDHVNKKQSYTWLRDGQLFPETEGFLLAIQDKVILTRNYQKHIIKDPTITEDRCRKCHQQKETIEHITSGCKILAGTEYTARHDSAAKVVHQALATTYKLIENTDPYYKYTPTSVLENKDYKLYWDISIHTDKTVSANRPDITFQCKKRKVTYLIDIAVPNDTNIQTKYTEKISKYTDLATEIKRLWKQEKVIIVPLIISATGLTPTTFTPHLEQLGLNTNIHKNIQKSVILKTCNIVRSFLNTQW

SEQ ID NO: 19832 - protein, 987 aa, Pachyrhynchus sulphureomaculatus
MQSHLARWSGTDPTTRNPIPRLIFKQSTQMILNTINKHIIPQYITDLSTIEDIHTIIYAAAITTMTQNNQKLPQRQRDPNSRKPKFKWQIRIENKINNIRRDLGHLTQFMNGNASKRVTQGVDKIKFKSLNRTLPEIVDTLKQKLSVYAARLRRYKESNERKDTNNLFRRSEKQFYRKAMYNEQTVVTEPPNKQELADYWKTVWSEPKLHNNNTSWIKAEEDKHKRVTEQENSTLTTEEITETIKHTHNWKCPGIDNIQNFWYKQFTTTHEALTYQINKAILQPHTFPTFLTQGITYVKPKSSDTTNPSNYRPITCLPTLYKIITAAISKKIEQHLTDNNIITEEQKGCRKNSQGCKEQLIIDSVIMGQTRKEHRNLHIGYIDYKKAFDSIPHSWLIRALEIYKINQHLRQFLAQIMKTWKTKIRLETQTERIQTEELYIRRGIFQGDSLSALWFCLCLNPLSNILNRTEHGFNIRHQKGNQHKINHLLYMDDIKLYAATKTQLKELLKITEIFTLDVNMEFGINKCKVLHINKGQWKYHHETETINNETLDNMFDKETYKYLGFQQSTKLNHTHIKTELRTEFKNRLTKLLQTKLNSKYLTKAINTFAIPILTYSFGIIKWSQTDLENIHIIIRSQFTKYRKLHPNACKERLTIERKAGGRGIIDIRSLHTKQIQALRKFFHTKQTSLHTATVKADKNYTPLDLSRVDHPADTHSHIQLQQEKMKTWSEKTLHGKHRYHIEQDHVNKKQSYTWLRDGQLFPETEGFLLAIQDKVILTRNYQKHIIKDPTITEDRCRKCHQQKETIEHITSGCKILAGTEYTARHDSAAKVVHQALATTYKLIENTDPYYKYTPTSVLENKDYKLYWDISIHTDKTVSANRPDITFQCKKEKVTYLIDIAVPNDTNIQTKYTEKISKYTDLATEIKRLWKQEKVNIVPLIISATGLTPTTFTPHLVQLGLNTNIHKNIQKSVILKTCNIVRSFLNTQ

SEQ ID NO: 19833 - protein, 899 aa, Pachyrhynchus sulphureomaculatus
MMTQRQGNPNRTKPKFKWQIRIENKINYIRRDLGHLTQFISGNASKRVTQGANKIKSKSPNRTLPEILDTLKQKLSVYAARLRRYKESNERKDTNNLFRRSEKQFYRKTMYNKQIAVTEPPNKQELTDYWKSIWSEPKLHNNNTPWIKAEEDKHKHVTEQEDTTFNTQEITETIKHTHNWKCPGIDNIQNFWYKQFTTTHEALTHQINKAILQPHTFPTFLTQGITYVKPKSSDTTNPSNYRPITCLPTLYKIITATISKKIEQHLTDNNILTEEQKGCRKNSRGCKEQLIIDSVIMGQTRKEHRNLHIGYIDYKKAFDSIPHSWLIRALEIYKINQHLRQFLAQIMKTWKTKIRLETQTERIQTEELYIRRGIFQGDSLSALWFCLCLNPLSNILSRTEHGFNIRHQKVNQHKINHLLYMDDIKLYAATQTQLKELLKITEIFTLDVNMEFGISKCKVLHINKGQWKCHHETETINNETLDNMFDKETYKYLGFQQSTKLNHTHIKTELRTEFKNRLTKLLQTKLNSKNLTKAINTFAIPILTYSFGIIKWSQTDIENIHILIRSQFTKYRKLHPNACKERLTIERKAGGRGIIDIRSLHTKQIQTLRKFFHSKQTSLHTATVKADKNYTPLDLARADHSADTHSHTQLQQEKMKTWSEKTLHGKHRYHIEQDHVNKKQSYTWLRDGQLFPETEGFLLAIQDKVILTRNYQKYIIKDPTIAEDRCRKCHQQKETIEHITSGCKILAGTEYTARHDSAAKVVHQALATTYRLIENTDPYYKYTPTSILENEDYKLYWDIGIHTDKTVSANRPDITFQCKKGKVTYLIDIAVPNDTNIQAKYTEKISKYTDLATEIKRLWRQEKVIIISATGLTPLTFTPHLVQLGLNTDIHRNIQKSVI

SEQ ID NO: 19834 - protein, 807 aa, Pachyrhynchus sulphureomaculatus
MYNKQIAVTEPPNEQELTDYWKSIWSEPKLHNNNTPWIKAEEDKHKHVTEQENTTFNTQEITETIKHTHNWKCPGIDNIQNFWYKQFTTTHEALTHQINKAILQPHTFPTFLTQGITYVKPKSSDTTNPSNYRPITCLPTLYKIITATISKKIEQHLTDNNILTEEQKGCRKNSRGCKEQLIIDSVIMGQTRKEHRNLHIGYIDYKKAFDSIPHSWLIRALEIYKINQHLRQFLAQIMKTWKTKIRLETQTERIQTEELYIKRGIFQGDSLSALWFCLCLNPLSNILNRTEHGFNIRHQKVNQHKINHLLYMDDIKLYAATQTQLKELLKITEIFTLDVNMEFGISKCKVLHINKGQWKCHHETETINNETLDNMFDKETYKYLGFQQSTKLNHTHVKTELRTEFKNRLTKLLQTKLNSKNLTKAINTFAIPILTYSFGIIKWSQTDIENIHILIRSQFTKYRKLHPNACKERLTIERKAGGRGIIDIRSLHTKQIQALRKFFHSKQTSLHTATVKADKNYTPLDLSRADHSADTHSHTQLQQEKMKTWSEKTLHGKHRYYIEQDHVKKKQSYTWLQDGQLFPETEGFLLAIQDKVILTRNYQKHIIKDPTIAEDRCRKCHQQKETIEHITSGCRILAGTEYTARHDSAAKAVHQALATTYKLIENTDPYYKYTPTSILENEDYKLYWDISIHTDKTVSANRPDITFQCKKGKVTYLIDIAVPNDTNIQTKYTEKISKYTDLATEIKRLWKQEKVIIVPLIISATGLTPITFTPHLVQLGLNTNIHKNIQKSVILKTCNIVSSFLNT

SEQ ID NO: 19835 - protein, 1474 aa, Pachyrhynchus sulphureomaculatus
MLNNNNYNNENGRVLRRRTPVVQTATATPQQQLQTNQTTASVETTPDSFTRSDIVGDGNCLFRAVSLYLYGHQNHHEKLREVALRYLQQNWSELHTFSLIEVDDIKDFNNYYNYMRKNGTYGTSLEILALSETQNSNFHIFSKQRRTRHTKITFTDRPTIISTGKYNKTIYLLLLHFELLTPQNTENIPENNRPIKEASGERRNGRGRRGKWQLDQNDEDQATENGPAKSVVLATKPTPTKAGKSQQRMSCTTGINEHAMRCCNENTKPDKEITEKRMTRRLDPPTSIPSANDVDTGQTQPPNPGQGPYVLQGQHATTKAGKPRQRLKWTDEMNRTVMRCYYTATKLETITSGYRQQLHRLFLTEYPHLQLLVSEQRVVDQKRVITKNNRLTPLELQTIKDTVAVELNTDQPNNRNNKADSEPASHTQPPSRTQQYPPPRRSITQNNIASTAQHHITDNNMNHSPPSTTSTQHHPESPLIQTLKAKMESHLARWSGTDPTTRNPIPRLIFRQSTQPILNTLNKHIIPQYITDSSTIEDIHTIIYAAAITTLTQNNQKLPQRQGNPNRTKPKFKWQIRIENKINNIRRDLGHLTQFISGNASKRVTQGANKIKSKSPNRTLPEILDTLKQKLSVYAARLRRYKESNERKDTNNLFRRSEKQFYRKTMYNKQIAVTEPPNEQELTDYWKSIWSEPKLHNNNTPWIKAEEDKHKHVTEQENTTFNTQEITETIKHTHNWKCPGIDNIQNFWYKQFTTTHEALTHQINKAILQPHTFPTFLTQGITYVKPKSSDTTNPSNYRPITCLPTLYKIITATISKKIEQHLTDNNILTEEQKGCRKNSRGCKEQLIIDSVIMGQTRKDHRNLHIGYIDYKKAFDSIPHSWLIRALEIYKINQHLRQFLTQIMKTWKTKIRLETQTERIQTEELYIRRGIFQGDSLSALWFCLCLNPLSNILNRTEHGFNIRHQKVNQHKINHLLYMDDIKLYAATQTQLKELLKITEIFTLDVNMEFGISKCKVLHINKGQWKCHHETETINNETLDNMFDKETYKYLGFQQSTKLNHTHIKTELRTEFKNRLTKLLQTKLNSKNLTKAINTFAIPILTYSFGIIKWSQTDIENIHILIRSQFTKYRKLHPNACKERLTIERKAGGRGIIDIRSLHTKQIQALRKFFHSKQTSLHTATVKADKNYTPLDLARADHSADTHSHTQLQQEKMKTWSEKTLHGKHRYHIEQDHVNKKQSYTWLQDGQLFPETEGFLLAIQDKVILTRNYQKHIIKDPTIAEDRCRKCHQQKETIEHITSGCRILAGTEYTARHDSAAKVVHQALATTYKLIENTDPYYKYTPTSILENEDYKLYWDISIHTDKTVSANRPDITFQCKKGKVTYLIDIAVPNDTNIQTKYTEKISKYTDLATEIKRLWKQEKVIIVPLIISATGLTPITFTPHLVQLGLNTNIHKNIQKSVILKTCNIVRSFLNTQW

SEQ ID NO: 19836 - protein, 1423 aa, Pachyrhynchus sulphureomaculatus
MEIAFSVQLAYTYMATRTIMRKLREVALRYLQQNWSELHTFSLIEVDDIKDFNNYYNYMRKNGTYGTSLEILALSETQNSNFHIFSKQRRTRHTKITFTDRPTIISTGKYNKTIYLLLTGDPMSGHFELLTPQNIENIPENNRPIKEASGERCNGRGRRGKWQLDQNDEDQATENGPAKSVVSATKPTPTKAGKSQQRMSCTTGINEHAMRCCNENTKPDKEITEKRITRRLDPPTSIPSTTDVDTGQTQPPKPGQGPYVLQGQHATTKAGKPRQRLKWTDEMNRTVMRCYYTATKLETITSGYRQQLHRLFLTEYPHLQLLVSEQRVIDQKRVITKNNRLTPLELQTIKDTVAVELNTDQPNNRNNKADSEPASPTQPPSRTQQYPPPRRSITQNNIASTAQHHITDNNMNHSPPSTTSTQHHPESPLIQTLKAKMESHLARWSGTDPTTRNPIPRLIFRQSTQPILNTLNKHIIPQYITDLSTIEDIHTIIYAAAITTLTQNNQKLPQRQGNPNRTKPKFKWQIRIENKINNIRRDLGHLTQFISGNASKRVTQGANKIKSKSPNRTLPEILDTLKQKLSVYAARLRRYKESNERKDTNNLFRRSEKQFYRKTMYNKQIAVTEPPNKQELTDYWKSIWSEPKLHNNNTPWIKAEEDKHKHVTEQEDTTFNTQEITETIKHTHNWKCPGIDNIQNFWYKQFTTTHEALTHQINKAILQPHTFPTFLTQGITYVKPKSSDTTNPSNYRPITCLPTLYKIITATISKKIEQHLTDNNILTEEQKGCRKNSRGCKEQLIIDSVIMGQTRKEHRNLHIGYIDYKKAFDSIPHSWLIRALEIYKINQHLRQFLAQIMKTWKTKIRLETQTERIQTEELYIRRGIFQGDSLSALWFCLCLNPLSNILSRTEHGFNIRHQKVNQHKINHLLYMDDIKLYAATQTQLKELLKITEIFTLDVNMEFGISKCKVLHINKGQWKGHHETETINNETLDNMFDKETYKYLGFQQSTKLNHTHIKTELSTEFKNRLTKLLQTKLNSKNLTKAINTFAIPILTYSFGIIKWSQTDIENIHILIRSQFTKYRKLHPNACKERLTIERKAGGRGIIDIRSLHTKQIQTLRKFFHSKQTSLHTATVKADKNYTPLDLARADHSADTHSHTQLQQEKMKTWSEKTLHGKHRYHIEQDHVNKKQSYTWLRDGQLFPETEGFLLAIQDKVILTRNYQKYIIKDPTIAEDRCRKCHQQKETIEHITSGCKILAGTEYTARHDSAAKVVHQALATTYRLIENTDPYYKYTPTSILENEDYKLYWDIGIHTDKTVSANRPDITFQCKKGKVTYLIDIAVPNDTNIQAKYTEKISKYTDLATEIKRLWRQEKVIIVPLIISATGLTPITFTPHLVQLGLNTDIHRNIQKSVILKTCNIVRSFLNTE

SEQ ID NO: 19837 - protein, 1226 aa, Pachyrhynchus sulphureomaculatus
MSCTTGINEHGMRCCNENTKPDKEITEKRITRRLDPPTSIPSATDVDTGQTQPPNPGQGPYVLQGQHATTKAGKPRQRLKWTDEMNRTVMRCYYTATKLETITYGYRQQLHRLFLTEYPHLQLLVSEQRVVDQKRVITKNNRLTPLELQTIKDTVAVELNTDQPNNRNNKADSEPASHTQPPSRTQQYPPPRRSITQNNIASTAQHHITDNNMNHSPPSTTSTQHHPESPLIQTLKAKMESHLARWSGTDPTTRNPIPRLIFRQSTQPILNTLNKHIIPQYITDSSTIEDIHTIIYAAAITTLTQNNQKLPQRQGNHNRTKPKFKWQIRIENKINNIRRDLGHLTQFISGNASKRVTQGANKIKSKSPNRTLPEILDTLKQKLSVYAARLRRYKESNERKDTNNLFRRSEKQFYRKTMYNKHIAVTEPPNKQELTDYWKSIWSEPKQHNNNTPWIKAEEDKHKHVTEQENTTFNTQEITETIKHTHNWKCPGIDNIQNFWYKQFTTTHEALTHQINKAILQPHTFPTFLTQGITYVKPKSSDTTNPSNYRPITCLPTLYKIITATISKKIEQHLTDNNILTEEQKGCRKNSRGCKEQLIIDSVIMGQTRKEHRNLHIGYIDYKKAFDSIPHSWLIRALEIYKINQHLRQFLAQIMKTWKTKIRLETQTERIQTEELYIRRGIFQGDSLSALWFCLCLNPLSNILNRTEHGFNIRHQKENQHKINHLLYMDDIKLYAATQTQLKELLKITEIFTLDVNMEFGISKCKVLHINKGQWKHHHETETINNETLDNMFDKETYKYLGFQQSTKLNHTHIKTELRTEFKNRLTKLLQTKLNSKNLTKAINTFAIPILTYSFGIIKWSQTDIENIHILIRSQFTKYRKLHPNACKERLTIERKAGGRGIIDIRSLHTKQIQTLRKFFHSKQTSLHTATVKADKNYTPLDLARADHSADTHSHTQLQQEKMKTWSEKTLHGKHRYHIEQDHVNKKQSYTWLRDGQLFPETEGFLLAIQDKVILTRNYQKHIIKDPTIAEDRCRKCHQQKETIEHITSGCKILAGTEYTARHDSAAKVVHQALATTYRLIENTDPYYKYTPTSILENEDYKLYWDIGIHTDKTVSANRPDITFQCKKGKVTYLIDIAVPNDTNIQAKYTEKISKYTDLATEIKRLWRQEKVIIVPLIISATGLTPITFTPHLVQLGLNTDIHRNIQKSVILKTCNIVRSFLNTEW

SEQ ID NO: 19838 - protein, 1480 aa, Pachyrhynchus sulphureomaculatus
MLNNNNYNNENGRVLRRRTPVVQTATATPQQQLQTNQTTASVETTPDSFTRSDIVGDGNCLFRAVSLYLYGHQNHHEKLREVALRYLQQNWSELHTFSLIEVDDIKDFNNYYNYMRKNGTYGTSLEILALSETQNSNFHIFSKQRRTRHTKITFTDRPTIISTGKYNKTIYLLLTGNPMSGHFELLTPQNTENIPENNRPIKEASGERRNGRGRRGKWQLDQNDEDQATENGPAKSVVLATKPTPTKAGKSQQRMSCTTGINEHAMRCCNENTKLDKEITEKRITRRLDPPTSIPSATDVDTGQTQPPKPGQGPYVLQGQHATTKAGKPRQRLKWTDEMNRTVMRCYYTATKLETITSGYRQQLHRLFLTEYPHLQLLVSEQRVVDQKRVITKNNRLTPLELQTIKDTVAVELNTDQPNNRNNKADSEPASHTQPPSRTQQYPPPRRSITQNNIASTAQHHITDNNMNHSPPSTTSTQHYPESPLIQTLKAKMESHLARWSGTDPTTRNPIPRLIFRQSTQPILNTLNKHIIPQYITDSSTIEDIHTIIYAAAITALTQNNQKLPQRQGNPNRTKPKFKWQIRIENKINNIRRDLGHLTQFISGNASKRVTQGANKIKSKSPNRTLPEILDTLKQKLSVYAARLRRYKESNERKDTNNLFRRSEKQFYRKTMYNKQIVVTEPPNKQELTDYWKSIWSEPKQHNNNTPWIKAEEDKHKHVTEQENTTFNTQEITETIKHTHNWKCPGIDNIQNFWYKQFTTTHEALTHQINKAILQPHTFPTFLTQGITYVKPKSSDTTNPSNYRPITCLPTLYKIITATISKKIEQHLTDNNILTEEQKGCRKNSRGCKEQLIIDSVIMGQTRKEHRNLHIGYIDYKKAFDSIPHSWLIRALEIYKINQHLRQFLAQIMKTWKTKIRLETQTERIQTEELYIRRGIFQGDSLSALWFCLCLNPLSNILNRTEHGFNIRHQKENQHKINHLLYMDDIKLYAATQTQLKELLKITEIFTLDVNMEFGISKCKVLHINKGQWKHHHETETINNETLDNMFDKETYKYLGFQQSTKLNHTHIKTELRTEFKNRLTKLLQTKLNSKNLTKAINTFAIPILTYSFGIIKWSQTDIENIHILIRSQFTKYRKLHPNACKERLTIERKAGGRGIIDIRSLHTKQIQTLRKFFHSKQTSLHTATVKADKNYTPLDLARADHSADTHSHTQLQQEKMKTWSEKTLHGKHRYHIEQDHVNKKQSYTWLRDGQLFPETEGFLLAIQDKVILTRNYQKHIIKDPTIAEDRCRKCHQQKETIEHITSGCKILAGTEYTARHDSAAKVVHQALATTYRLIENTDPYYKYTPTSILENEDYKLYWDIGIHTDKTVSANRPDITFQCKKGKVTYLIDIAVPNDTNIQAKYTEKISKYTDLATEIKRLWRQEKVIIVPLIISATGLTPITFTPHLVQLGLNTGIHRNIQKSVILKTCNIVRSFLNTEW

SEQ ID NO: 19839 - protein, 804 aa, Pachyrhynchus sulphureomaculatus
MYNKQIAVTEPPNKQELTDYWKSIWSEPKLHNNNTPWIKAEEDKHKHVTEQENTTFNTQEITETIKHTHNWKCPGIDNIQNFWYKQFTTTHEALTHQINKAILQPHTFPTFLTQGITYVKPKSSDTTNPSNYRPVTCLPTLYKIITATISKKIEQHLTDNNILTEEQKGCRKNSRGCKEQLIMGQTRKEHRNLHIGYIDYKKAFDSIPHSWLIRALEIYKINQHLRQFLAQIMKTWKTKIRLETQTERIQTEELYIRRGIFQGDSLSALWFCLCLNPLSNILNRTEHGFNIRHQKVNQHKINHLLYMDDIKLYAATQTQLKELLKITEIFTLDVNMEFGISKCKVLHINKGQWKCHHETETINNETLDNMFDKETYKYLGFQQSTKLNHTHIKTELRTEFKNRLTKLLQTKLNSKNLTKAINTFAIPKLTYSFGIIKWSQTDIENIHILIRSQFTKYRKLHPNACKERLTIERKAGGRGIIDIRSLHTKQIQTLRKFFHSKQTSLHTATVKADKNYTPLDLARADHSADTHSHTQLQQEKMKTWSEKTLHGKHRYHIEQDHVNKKQSYTGLRDGQLFPETEGFLLAIQDKVILTRNYQKHIIKDPTITEDRCRKCHQQKETIEHITSGCKILAGTEYTARHDSAAKVVHQALATTYKLIENTDPYYKYTPTSVLENKDYKLYWDISIHTDKTVSANRPDITFQCKKEKVTYLIDIAVPNDTNIRTKYTEKISKYTDLATEIKRLWKQEKVIIVPLIISATGLTPTTFTPHLVQLGLNTNIHKNIQKSVILKTCNIVRSFLNTQW

SEQ ID NO: 19840 - protein, 1480 aa, Pachyrhynchus sulphureomaculatus
MLNNNNYNNENGRVLRRRTPVVQTATATPQQQLQTNQTTASGETTPDSFTRSDIVGDGNCLFRAVSLYLYGHQNHHEKLREVALRYLKQNWSELHTFSLIEVDDIKDFNNYYNYMRKNGTYGTSLEILALSETQNSNFHIFSKQRRTRHTKITFTDRPTIISTGKYNKTIYLLLTGNPMSGHFELLTPQNTENIPENNRPIKEASGERRNGRGRRGKWQLDQNDEDQATENGPAKSVVLATKPTPTKAGKSQQRMSCTTGINEHAMRCCDENTKPDREITEKRITRRLDPPTSIPSATDVDTGQTQPPKPGRGPYVLQGQHATTKAGKPRQRLKWTDEMNRTVMRCYYTATKLETITSGYRQQLHRLFLTEYPHLQLLVSEQRVVDQKRVITKNNRLTPLELQTIKDTVAVELNTDQPNNRNNKADSEPASHTQPPSRTQQYPPPRRSITQNNIASTAQHHITDNNMNHSPPSTTSTQHHPESPLIQTLKAKMESHLARWSGTDPTTRNPIPRLIFRQSTQPILNTLNKHIIPQYITDSSTIEDIHTIIYAAAITTLTQNNQKLPQRQGNLNRTKPKFKWQIRIENKINNIRRDLGHLTQFISGNASKRVTQGANKIKSKSPNRTLPEILDTLKQKLSVYAARLRRYKESNERKDTNNLFRRSEKQFYRKTMYNKQIAVTEPPNKQELTDYWKSIWSEPKQHNNNTPWIKAEEDKHKHVTEQENTTFNTQEITETIKHTHNWKCPGIDNIQNFWYKQFTTTHEALTHQINKAILQPHTFPTFLTQGITYVKPKSSDTTNPSNYRPITCLPTLYKIITATISKKIEQHLTDNNILTEEQKGCRKNSRGCKEQLIIDSVIMGQTRKEHRNLHIGYIDYKKAFDSIPHSWLIRALEIYKINQHLRQFLAQITKTWKTKIRLETQTERIQTEELYIRRGIFQGDSLSALWFCLCLNPLSNILNRTEHGFNIRHQKENQHKINHLLYMEDIKLYAATQTQLKELLKITEIFTLDVNMEFGISKCKVLHINKGQWKHHHETETINNETLDNMFDKETYKYLGFQQSTKLNHTHIKTELRTEFKNRLTKLLQTKLNSKNLTKAINTFAIPILTYSFGIIKWSQTDIENLHILIRSQFTKYRKLHPNACKERLTIERKAGGRGIIDIRSLHTKQIQTLRKFFHSKQTSLHTATVKADKNYTPLDLARADHSADTHSHTQLQQKKMKTWSEKTLHGKHRYHIEQDHVNKKQSYTWLRDGQLFPETEGFLLAIQDKVILTRNYQKHIIKDPTIAEDRCRKCHQQKETIEHITSGCKILAGTEYTARHDSAAKVVHQALATTYRLIENTDPYYKYTPTSILENEDYKLYWDIGIHTDKTVSANRPDITFQCKKGKVTYLIDIAVPNDTNIQAKYTEKISKYTDLATEIKRLWRQEKVIIVPLIISATGLTPITFTPHLVQLGLNTDIHRNIQKSVILKTCNIVRSFLNTEW

SEQ ID NO: 19841 - protein, 1139 aa, Pachyrhynchus sulphureomaculatus
MNRTVMRCYYNATKLETITSGYRPEMHRLFLTEYPYLQLLVSEQRVIDQKRVITKNNRLTPLELQTIKDTVAVGLNTDQPNNRNNKADSEPASHTQPPSRTQQEPPPKRSITQNNIASTAQHHITDNNMNHSPPSTTFTQHHLESPLIQTLKARMESHLARWSGTDPTTRNPIPRLIFRQSTQPILNKHIIPQYITDLSKIEDIHTIIYAAAITTLTQNNQKLPQRQGNSNRTKPKFKWQIIIENKMNNIRRDLGHLTQFISGNASKRVTQGANKIKSKSPNRTLPEILDTLKQKLSVYAARLRRYKESNERKDINNLFRRSEKQFYRKTIYNKQIAVTEPPNKQELTDYWKSIWSEPKLHNNNIPWIKAEEDKHKHVTEQENTTLNTQEITETIKHTHNWKCPGIDNIQNFWYKQFTTTHEALTHRINKAILQPHTFPTFLTQGITYVKPKSSDTTNPSNYRPITCLPTLYKIITATISKKIEQHLTDNNILTEEQKGCRKNGRGCKEQLIIDSVIMGQTRKEHRNLHIGYIDYKKAFDSIPHSWLIRALEIYKINQHLRQFLAQIMKTWKTKIRLETQTERIQTEELYIRRGIFQGDSLSALWFCLCLNPLSNILNRTEHGFNIRHQKVNQHKINHLLYMDDIKLYAATQTQLKELLKITEIFTLDVNMEFGISKCKVLHINKGQWKCHHETENINNETLDNMFDKETYKYLGFQQSTKLNHTHIKTELRTEFKNRLTKLLQTKLNSKNLTKAINTFAIPILTYSFGIIKWSQTDIENIHILIRSQFTKYRKLHPNACKERLTIERKAGGRGIIDIRSLHAKQIQTLRKFFHSKQTSLHTATVKADKNYTPLDLARADHSADTHSHTQLQQEKMKTWSEKTLHGKHRYHIEQDHVNKKQSYTWLQDGQLFSETEGFLLAIQDKVILTRNYQKHIIKDPTIAEDRCRKCHQQKETIEHITNGCKILAGTEYTVRHDSAAKVVHQALATTYKLIENTDPYYKYTPTSILENEDYKLYWDIGIHTDKTVSANRPDITFQCKKGKVTYLIDIAVPNDTNIQMKYTEKISKYTDLATEIKRLWRQEKVIIAPLIISATGLTPITFTPHLVQLGVNTDIHRNIQKSVILKTCNIVRSFLNTEW

SEQ ID NO: 19842 - protein, 1480 aa, Pachyrhynchus sulphureomaculatus
MLNNNNYNNENGRVLRRRTPVVQTATATPQQQLQTNQTTASVETTPDSFTRSDIVGDGNCLFRAVSLYLYGHQNHHEKLREVALRYLQQNWSELHTFSLIEVDDIKDFNNYYNYMRKNGTYGTSLEILALSETQNSNFHIFSKQRRTRHTKITFTDRPTIISTGKYNKTIYLLLTGNPMSGHFELLTPQNTENIPENNRPIKEASGERRNGRGRRGKWQLDQNDEDQATENGPAKSVVLATKPTPTKAGKSQQRMSCTTGINEHAMRCCNEDTKPDREITEKRITRRLDPPTSIPSATDVDAGQTQPPKPGQGPYVLQGQHATTKAGKPRQRLKWTDEMNRTVMRCYYTATKLETITSGYRQQLHRLFLTEYPHLQLLVSEQRVVDQKRVITKNNRLTPLELQTIKDTVAVELNTDQPNNRNNKADSEPASHTQPPSRTQQYPPPRRSITQNNIASTAQHHITDNNMNHSPPSTTSTQHHPESPHIQTLKAKMESHLARWSGTDPTTRNPIPRLIFRQSTQPILNTLNKHIIPQYITDSSTIEDIHTIIYAAAITTLTQNNQKLPQRQGNPNRTKPKFKWQIRIENKINNIRRDLGHLTQFISGNASKRVTQGANKIKSKSPNRTLPEILDTLKQKLSVYAARLRRYKESNERKDNNNLFRRSEKQFYRKTMYNKQIAVTEPPNKQELTDYWKSIWSEPKQHNNNTPWIKAEEGKHKHVTEQENTTFNTQEITETIKHTHNWKCPGIDNIQNFWYKQFTTTHEALTHQINKAILQPHTFPTFLTQGITYVKPKSSDTTNPSNYRPITCLPTLYKIITATISKKIEQHLTDNNILTEEQKGCRKNSRGCKEQLIIDSVIMGQTRKEHRNLHIGYIDYKKAFDSIPHSWLIRALEIYKINQHLRQFLAQIMKTWKTKIRLETQTERIQTEELYIRRGIFQGDSLSALWFCLCLNPLSNILNRTEHGFNIRHQKENQHKINHLLYMDDIKLYAATQTQLKELLKITEIFTLDVNMEFGISKCKVLHINKGQWKHHHETETINNETLDNMFDKETYKYLGFQQSTKLNHTHIKTELRTEFKNRLKKLLQTKLNSKNLTKAINTFAIPILTYSFGIIKWSQTDIENIHILIRSQFTKYRKLHPNACKERLTIERKAGGRGIIDIRSLHTKQIQALRKFFHSKQTSLHTATVKADKNYTPLDLARADHSADTHSHTQLQQEKMKTWSEKTLHGKHRYHIEQDHVNKKQSYTWLRDGQLFPETEGFLLAIQDKIILTRNYQKHIIKDPTIAEDRCRKCHQQKETIEHVTSGCKILAGTEYTARHDSAAKVVHQALATTYRLIENTDPYYKYTPTSILENEDYKLYWDIGIHTDKTVSANRPDITFQCKKGKVTYLIDIAVPNDTNIQAKYTEKISKYTDLATEIKRLWRQEKVIIVPLIISATGLTPITFTPHLVQLGLNTDIHRNIQKSVILKTCNIVRSFLNTEW

SEQ ID NO: 19843 - protein, 1302 aa, Pachyrhynchus sulphureomaculatus
MSGHFELLTPQNTENIPENNRPIKEASGERRNGRGRRGKWQLDQNDEDQATENGPAKSVVLATKPTPTKAGKTQQRMSCTTGINEHAMRCCNENTKPDKEITEKRITRRLDPPTSIPSATDVDTGQTQPPKPGQGPYVLQGQHATTKAGKPRQRLKWTDEMNRTVMRCYYTATKLETITSGYRQQLHRLFLTEYPHLQLLVSEQRVVDQKRVITKNNRLTPLELQTIKDTVAVELNTDQPNNRNNKADSEPASHTQPPSRTQQYPPPRRSITQNNIASTAQHHITDNNMNHSPPSTTSKQHHPESRLIQTLKAKMESHLARWSGTDPTTRNPIPRLIFRQSTQPILNTLNKHIIPQYITDSSTIEDIHTIIYAAAITTLTQNNQKLPQRQGTPNRTKPKFKWQIRIENKINNIRRDLGHLTQFISGNASKRVTQGANKIKSKSPNRTLPEILDTLKQKLSVYAARLRRYKESNERKDTNNLFRRSEKQFYRKTMYNKQIAVTEPPNKQELTDYWKSIWSEPKQHNNNTPWIKAEEDKHKHVTEQENTTFNTQEITETIKHTHNWKCPGIDNIQNFWYKQFTTTHEALTHQINKAILQPHTFPTFLTQGITYVKPKSSDTTNPSNYRPISCLPTLYKIITATISKKIEQHLTDNNILTEEQKGCRKNSRGCKEQLIIDSVIMGQTRKEHRNLHIGYIDYKKAFDSIPHSWLIRALEIYKINQHLRQFLAQIMKTWKTKIRLETQTERIQTEELYIRRGIFQGDSLSALWFCLCLNPLSNILNRTEHGFNIRHQKENQHKINHLLYMDDIKLYAATQTQLKELLKITEIFTLDVNMEFGISKCKVLHIDKGQWKHHHETETINNETLDNMFDKETYKYLGFQQSTKLNHTHIKTELRTEFKNRLTKLLQTKLNSKNLTKAINTFAIPILTYSFGIIKWSQTDIENIHILIRSQFTKYRKLHPNACKERLTIERKAGGRGIIDIRSLHTKQIQTLRKFFHSKQTSLHTATVKADKNYTPLDLARADHSADTHSHTQLQQEKMKTWSEKTLHGKHRYHIEQDHVNKKQSYTWLRDGQLFPETEGFLLAIQDKVILTRNYQKHIIKDPTIAEDRCRKCHQQKETIEHITSGCKILAGTEYTARHDSAAKVVHQALATTYRLIENTDPYYKYTPTSILENEDYKLYWDIGIHTDKIVSANRPDITFQCKKGKVTYLIDIAVPNDTNIQAKYTEKISKYTDLATEIKRLWRQEKVIIVPLIISATGLTPITFTPHLVQLGLNTDIHRNIQKSVILKTCNIVRSFLNTEW

SEQ ID NO: 19844 - protein, 1493 aa, Pachyrhynchus sulphureomaculatus
MTKNNNYSNDNGRVLRRRTPVVQKAIATPQQQQPQTTQTTASAETTPDSFTRSDIVGDGNCLFRAVSLHLYGHQNHHEKLREVALRYLQQNWSELYTFSLIEVGDIKDFNNYYNYMRKNGTYGTSLEILALSETQNSNFHIFSKQRRTRHTKITFTGRPTIISTGKFKETIYLLLTGNPMSGRFELLTPQNIENIPDNSRPIKEASGERRNGRGRRGKWQLDQNDEDRATENGPAKSVVPASKPTPTKAGKSQQRMSCTTGINEHAMRCCNEITPDKEITDKRITRRLDPPPPIPSATDVDAGQIQPPKPGQTAYVLQGQHATTKAGKPRQRLKWTDEMNRTVMRCYYTATKLETVTSGYRLELHRLFLTEYPHLQLLVTEQRVIDQKRVITKNNRLTPFELQTIKDTVAAELNTDQVAAELNTDQPNNRNSRADTEPISHTQPPSRKEQDPPPSRSITQNNISKQIASTTRHHITDDKMNDSPPSTTSTQHHPESPLIQTLKAEMQSHLARWSGTDPTTRNPIPRLIFKQNTQIILNTVNKHIIPQYITDLSTIEDIHTIIYAAAITTITQNNQKLPQRQRDPNSRKPKFKWQIRIENKINNIRRDLGHLTQFMNGNASKRVTQGVDKIKCKSLNRTLPEIVDTLKQKLSVYAARLRRYKESNERKDTNNLFRRSEKQFYRKTMYNEQTVVTEPPNKQELADYWKTVWSDPKLHNNNTPWIKAEEDKHKRVTEQENSTLTTEEITETIKHTHNWKCPGIDNIQNFWYKQFTTTHEALTHQINEAILQPHTFPTFLTQGITYVKPKSSDTTNPSNYRPITCLPTLYKIITAAISKKIEQHLTDNNIITEEQKGCRKNSQGCKEQLIIDSVIMGQTRKEHRNLHIGYIDYKKAFDSIPHSWLIRALEIYKINQHLRQFLAQIMKTWKTKIRLETQTERIQTEELYIRRGIFQGDSLSALWFCLCLNPLSNILNRTEHGFNIRHQKVNQHKINHLIYMDDIKLYAATQTQLKELLKITEIFTLDVNMEFGISKCKVLHINKGQWKCHHETETINNETLDNMFDKETYKYLGFQQSTKLNHTHIKTELRTEFKNRLTKLLQTKLNSKNLTKAINTFAIPILTYSFGIIKWSQTDIENIHILIRSQFTKYRKLHPNACKERLTIERKAGGRGIIDIRSLHAKQIQTLRKFFHSKQTSLHTATVKADKNYTPLDLARADHSADTHSHTQLQQEKMKTWSEKTLHGKHRYHIEQDHVNKKQSYTWLQDGQLFPETEGFLLAIQDKVILTRNYQKHIIKDPTIAEDRCRKCHQQKETIEHITSGCKILAGTEYTARHDSAAKVVHQALATTCKLIENTDPYYKYTPTSILENEDYKLYWDIGIHTDKTVSAHRPDITFQCKKGKVTYLIDIAVPNDTNIQTKYTEKISKYTDLATEIKRLWRQEKVIIVPLIISATGLTPITFTPHLVQLGLNTDIHRNIQKSVILKTCNIVRSFLNTEW

SEQ ID NO: 19845 - protein, 1276 aa, Pachyrhynchus sulphureomaculatus
MRKNGTYGTSLEILALSETQNSNFHIFSKQRRTRHTKITFTDRPTIISTGKYNKTIYLLLTGNPMSGHFELLTPQNIENIPENNRPIKEASGERRNGRGRRGKWQLDQNDEDQATENGPAKSVVSATKPTPTKAGKSQQRMSCTTGINEHAMRCCNANTKPDKEITEKRITCRLDPPTSIPSATDVDTGQTQPPKPGQGPYVLQGQHATTKAGKPRQRLKWTDEMNRTVMRCYYTATKLETITSGYRPELHRLFLTEYPHLQLLVSEQRVIDQKRVITKNNRLTPLELQTIKDTVAVELNTDQPNNRNNKADSEPASHTQPPSRTQQDPPPRRSITQNNIASTAQHHTTENNMNHSPPSTTSTQHHHESPVIQTLKAKMESHLARWSGTDPTTRNPIPRLIFRQSTQPIINTLNKHIIPQYITDLSTIEDIHTIIYAAAITTLTQNNQKLPQRQGNPNRTKPKFKWQIRLENKINNIRRDLGHLTQFISGNASKRVTQGANKITSKSPNRTLPEILDTLKQKLSVYAARLRRYKESNERKDTNNLFRRSEKQFYRKTVYNKQIAVTEPPNKQELTDYWKSIWSEPKLHNDNTPWIKAEEDKHKHVTEQENSTLTTEEITETIKHTHNWKCPGIDNIQNFWYKQFTTTHEALTRQINKAILQPHTFPTFLTQGITYVKPKNPDTTNPSNYRPITCLPTLYKIITATISKKIEQHLTDNNILTEEQKGCRKNSRGCKEQLIIDSVIMGQTRKEHRNLHIGYIDYKKAFDSIPHSWLIRALEIYKINQHLRQFLAQIMKAWKTKIRLETQTERIQTEELYIRRGIFQGDSLSALWFCLCLNPLSNILNRTEHGFNVRHQKVNQHKINHLLYMDDIKLYAATQTQLKELLKITEIFTLDVNMEFGISKCKVLHINKGQWKCYHETETINNETLDNMFDKETYKYLGFQQSTKLNHTHIKTELRTEFKNRLTKLLQTKLNSKNLTKAINTFAIPILTSSFGIIKWSQTDIENIHILIRSQFTKYRKLHPNACKERLTIERKAGGRGIIDIRSLHTKQIQALRKFFHSKQTSLHTATVKADKNYTPLDLSRADHSADTHSHTQLQQEKMKNVVRENTLHGKHRYHIEQDHINKKQSYTWLQDGQLFPETEGFLLAIQDKVILTRNYQKHIIKDPTIAEDRCRKCHQQKETIEHITSGCKILAGTEYTARHDSAAKVVHQALATTYKLIENTDPYYKYTPTSILENKDYKLYWDISIHTDKTVSANRPDITFQCKKGKTHLSN

SEQ ID NO: 19846 - protein, 809 aa, Pachyrhynchus sulphureomaculatus
MYNKQIAVTEPPNKQELTDYWKSIWSEPKQHNNNTPWIKAEEDKHKHVTEQENTTFNTQEITETIKHTHNWKCPGIDNIQNFWYKQFTTTHEALTHQINKAILQPHTFPTFLTQGITYVKPKSSDTTNPSNYRPITCLPTLYKIITATISKKIEQHLTDNNILTEEQKGCRKNSRGCKEQLIIDSVIMGQTRKEHRNLHIGYIDYKKAFDSIPHSWLIRALEIYKINQHLRQFLAQIMKTWKTKIRLETQTERIQTEELYIRRGIFQGDSLSALWFCLCLNPLSNILNRTEHGFNIRHQKENQHKINHLLYMDDIKLYAATQTQLKELLKITEIFTLDVNMEFGISKCKVLHINKGQWKHHHETETINNETLDNMFDKETYKYLGFQQSTKLNHTHIKTELRTEFKNRLTKLLLTKLNSKNLTKAINTFAIPILTYSFGIIKWSQTDIENIHILIRSQFTKYRKLHPNACKERLTIERKAGGRGIIDIRSLHTKQIQTLRKFFHSKQTSLHTATVKADKNYTPLDLAWADHSADTHSHTQLQQEKMKTWSEKTLHGKHRYHIEQDHVNKKQSYTWLRDGQLFPETEGFLLAIQDKVILTRNYQKHIIKDPTIAEDRCRKCHQQKETIEHITSGCKILAGTEYTARHDSAAKVVHQALATTYRLIENTDPYYKYTPTSILENEDYKLYWDIGIHTDKTVSANRPDITFQCKKGKVTYLIDIAVLNDTNIQAKYTEKISKYTDLATEIKRLWRQEKVIIVPLIISATGLTPITFTPHLVQLGLNTDIHRNIQKSVILKTCNIVWSFLNTEW

SEQ ID NO: 19847 - protein, 988 aa, Pachyrhynchus sulphureomaculatus
MESHLARWSGTDPTTRNPIPRLIFRQSTQPILNTLNKHIIPQYITDSSTIEDIHTIIYAAAITALTQNNQKLPQRQGNPNRTKPKFKWQIRIENKINNIRRDLGHLTQFISGNASKRVTQGANKIKSKSPNRTLPEILDTLKQKLSVYAARLRRYKESNERKDTNNLFRRSEKQFYRKTMYNKQIAVTEPPNKQELTDYWKSIWSEPKQHNNNTPWIKAEEDKHKHVTEQENTTFNTQEITETIKHTHNWKCPGIDNIQNFWYKQFTTTHEALTHQINKAILQPHTFPTFLTQGITYVKPKSSDTTNLSNYRPITCLPTLYKIITATISKKIEQHLTDNNILTEEQKGCRKNSRGCKEQLIIDSVIVGQTRKEHRNLHIGYIDYKKAFDYIPHSWLIRALEIYKINQHLRQFLAQIMKTWKTKIRLETQTERIQTEELYIRRGIFQGDSLSALWFCLCLNPLSNILNRTEHGFNIRHQKENQHKINHLLYMDDIKLYAATQTQLKELLKITEIFTLDVNMEFGISKCKVLHINKGQWKHHHETETIKNETLDNMFDKETYKYLGFQQSTKLNHTHIKTELRTEFKNRLTKLLQTKLNSKNLTKAINTFAIPILTYSFGIIKWSQTDIENIHILIRSQFTKYRKLHPNACKERLTIERKAGGRGIIDIRSLHTKQIQTLRKFFHSKQTSLHTATVKADKNYTPLDLARADHSADTHSHTQLQQEKMKTWSEKTLHGKHRYHIEQDHVNKKQSYTWLRDGQLFPETEGFLLAIQDKVILTRNYQKHIIKDPTIAEDRCRKCHQQKETIEHITSGCKILAGTEYTARHDSAAKVVHQALATTYRLIENTDPYYKYTPTSILENEDYKLYWDIGIHTDKTVSANRPDITFQCKKGKVTYLIDIAVPNDTNIQTKYTEKISKYTDLATEIKGLWRQEKVIIVPLIISATGLTPITFTPHLVQLGLNTDIHRNIQKSVILKTCNIVRSFLNTEW

SEQ ID NO: 19848 - protein, 1014 aa, Pachyrhynchus sulphureomaculatus
MNHSPPSTTSTQHHPESPLIQTLKAKMESHLARWSGTDPTTRNPIPRLIFRQSTQPILNTLNKHIIPQYITDLSTIEDIHTIIYAAAITTLTQNNQKLPQRQGNPNRTKPKFKWQIRIENKINNIRRDLGHLTQFISGNASKRVTQGANKIKSKSPNRTLPEILDTLKQKLSVYAARLRRYKESNERKDTNNLFRRSEKQFYRKTMYNKQIAVTEPTNKQELTDYWKSIWSEPKLHNNNTPWIKAEEDKHKHVTEQENTTFNTQEITETIKHTHNWKCPGIDNIQNFWYKQFTTTHEALTHQINKAILQPHTFPTFLTQGITYVKPKSSDTTNPSNYRPITCLPTLYKIITATISKKIEQHLTNNNILTEEQKGCRKNSRGCKEQLIIDSVIMGQTRKEHRNLHIGYIDYKKAFDSIPHSWLIRALEIYKINQHLRQFLAQIMKTWKTKIRLETQTERIQTEELYIRRGIFQGDSLSALWFCLCLNPLSNILNRTEHGFNIRHQKVNQRKINHLLYMDDIKLYAATQTQLEELLKITEIFTLDVNMEFGISKCKVLHINKGQWKHHHETETINNETLDNMFDKETYKYLGFQQSTKLNHTHIKTELRSEFKNRLTKLLQTKLNSKNLTKAINTFAIPILTYSFGIIKWSQTDIENIHILIRSQFTKYRKLHPNACKERLTIERKAGGRGIIDIRSLHTKQIQTLRKFFHSKQTSLHTATVKADKNYTPLDLARADHSADTHSHTQLQQEKMKTWSEKTLHGKHRCHIEQDHVNKKQSYTWLRDGQLFPETEGFLLAIQDKIILTRNYQKHIIKDPTIAEDRCRKCHQQKETIEHITSGCKILAGTEYTARHDSAAKVVHQALATTYKLIENTDPYYKYTPTSILENEDYKLYWDIGIHTDKTVSVNRPDITFQCKKGKVTYLIDIAVPNDTNIQTKYTEKISKYTDLATEIKRLWRQEKVIIVPLIISATGLTPITFTPHLMQLGLNADIQRNIQQSVILKTCNIVRSFLNTEW

SEQ ID NO: 19849 - protein, 1165 aa, Pachyrhynchus sulphureomaculatus
MFCKDNMQLPRLENQDSGLKWTDEMNRTMMRCYYTATKLETITSGYRQQLHRLFLTEYPHLQLLVSEQRVIDQKRVITKNNRLTPLELQTIKDTVAVELNTDQPNNRNNKADSEPASHTQPPSRTQQYPPPRRSITQNNIASTAQHHITDNNMNHSPPSTTSTQHHPESPLIQTLKAKMESHLARWSGTDPTTRNPIPRLIFRQSTQPILNTLNKHIIPQYITDLSTIEDIHTIIYAAAITTLTQNNQKLPQRQGNPNRTKPKFKWQIRIENKINNIRRDLGHLTQFISGNASKRVTQGANKIKSKSPNRTLPEILDILKQKLSVYAARLRRYKESNERKDTNNLFRRSEKQFYRKTMYNKQIAVTEPPNKQELTDYWKSIWSKPKLHNNNTPWIKAEEDKHKHVTEQEDTTFNTQEITETIKHTHNWKCPGIDNIQNFWYKQFTTTHEALTHQINKAILQPHTFPTFLTQGITYVKPKSSDTTNPSNYRPITCLPTLYKIITATISKKIEQHLTDNNILTEEQKGCRKNSRGCKEQLIIDSVIMGQTRKEHRNLHIGYIDYKKAFDSIPHSWLIRALEIYKINQHLRQFLAQIMKTWKTKIRLETQTERIQTEELYVRRGIFQGDSLSALWFCLYLNPLSNILSRTEHGFNIRHQKVNQHKINHLLYMDDIKLYAATQTQLKELLKITEIFTLDVNMEFGISKCKVLHINKGQWKCYHETETINNETLDNMFDKETYKYLGFQQSTKLNHTHIKTELRTEFKNRLTKLLQTKLNSKNLTKAINTFAIPILTYSFGIIKWSQTDIENIHILIRSQFTKYRKLHPNACKERLTIERKAGGRGIIDIRSLHTKQIQTLRKFFHSKQTSLHTATVKADKNYTPLDLARADHSADTHSHTQLQQEKMKTWSEKTLHGKHRYHIEQDHVNKKQSYTWLRDGQLFAETEGFLLAIQDKVILTRNYQKYIIKDPTIAEDRCRKCHQQKETIEHITSGCKILAGTEYTARHDSAAKVVHQALATTYRLIENTDPYYKYTPTSILENEDYKLYWDIGIHTDKTVSANRPDITFQCKKGKVTYLIDIAVPNDTNIQAKYTEKISKYTDLATEIKRLWRQEKVIIVPLIISATGLTPITFTPHLVQLGLNTDIHRNIQKSVILKTCNIVRSFLNTE

SEQ ID NO: 19850 - protein, 1132 aa, Pachyrhynchus sulphureomaculatus
MNKTVMRCYYTATKLETLTSGYRLELHRLFLTEYPHLQLLVTEQRVIDQKRVITKNNRLTPFELQTIKDTVAAELNADQVAAELNTDQLKNRNSRADTEPISHTQPPSRKQQDPPPSRSITQNNISEQIASTTRHSTTSIQHHPESPLIQTLKAEMQSHLARWSGTDPTTRNPIPRLIFKQSTQMILNTINKHIIPQYITDLSTIEDIHTIIYAAAITTITQNNQKLPQRQRDPNSRKPKFKWQIRIENKINNIRRDLGHLTQFMNGNASKRVTQGVDKIKSKSLNRTLPEIVDTLKQKLSVYAARLRRYKESNERKDTNNLFRRSEKQFYRKTMYNEQRVVTEPPNKQELADYWKTVWSEPKLHNNNTSWIKAEEDKHKRVTEQENSTLTTEEITETIKHTHNWKCPGIDNIQNFWYKQFTTTHEALTHQINKAILQPHTFPTFLTQGITYVKPKSSDTTNPSNYRPITCLPTLYKIITAAISKKIEQHLTDNNIITEEQKGCRKNSRGCKEQLIIDSVIMGQTRKEHRNLHIGYIDYKKAFDSIPHSWLIRALEIYKINQHLRQFLAQIMKTWKTKIRLETQTERIQTEELYIRRGIFQGDSLSALWFCLCLNPLSNILNRTEHGFNIRHQKGNQHKINHLLYMDDIKLYAATKAQLKELLKITEIFTLDVNMEFGISKCKVLHINKGQWKYHHETETINNETLDNMFDKETYKYLGFQQSTKLNHTHIKTELRTEFKNRLTKLLQTKLNSKYLTKAINTFAIPILTYSFGIIKWSQTDLENIHILIRSQFTKYRKLHPNACKERLTIERKAGGRGIIDIRSLHTKQIQALRKFFHTKQTSLHTATVKADKNYTPLDLSRVDHPADTHSHIQLQQEKMKTWSEKTLHGKHRYHIEQDHVNKKQSYTWLRDGQLFPETEGFLLAIQDKVILTRNYQKHIIKDPTITEDRCRKCHQQKETIEHITSGCKILAGTEYTARHDSAAKVVHQALATTYKLIENTDPYYKYTPTSVLENKDYKLYWDISIHTDKTVSANRPDITFQCKKEKVTYLIDIAVPNDTNIQTKYTEKNFQIHRPCNGNKKAMETRKSHHCPPHYISHRPYTNNIHTTLSTIRTQHKHTQKHSEVSDFENM

SEQ ID NO: 19851 - protein, 809 aa, Pachyrhynchus sulphureomaculatus
MYNRQIAVTEPPNKQELTDYWKSIWSEPKQHNNNTPWIKAEEDKHKHVTEQENTTFNTQEITETIKHTHNWKCPGIDNIQNFWYKQFTTTHEALTHQINKAILQPHTFPTFLTQGITYVKPKSSDTTNPSNYRPITCLPTLYKIITATISKKIEQHLTDNNILTEEQKGCRKNSRGCKEQLIIDSVIMGQTRKEHRNLHIGYIDYKKAFDSIPHSWLIRALEIYKINQHLRQFLAQIMKTWKTKIRLETQTERIQTEELYIRRGIFQGDSLSALWFCLCLNPLSNILNRTEHGFNIRHQKENQHKINHLLYMDDIKLYAATQTQLKELLKITEIFTLDVNMEFGISKCKVLHINKGQWKHHHETETINNETLDNMFDKETYKYLGFQQSTKLNHTHIKTELRTEFKNRLTKLLQTKLNSKNLTKAINTFAIPILTYSFGIIKWSRTDIENIHILIRSQFTKYRKLHPNACKERLTIERKAGGRGIIDIRSLHTKQIQTLRKFFHSKQTSLHTATVKADKNYTPLDLARADHSADTHSHTQLQQEKMKTWSEKTLHGKHRYHIEQDHVNKKQSYTWLRDGQLFPETEGFLLAIQDKVILTRNYQKHIIKDPTIAEDRCRKCHQQKETIEHITSGCKILAGTEYTSRHNSAAKVVHQALATTYRLIENTDPYYKYTPTSILENEDYKLYWDIGIHTDKTVSANRPDITFQCKKGKVTYLIDIAVPNDTNIQAKYTENISKYTDLATEIKRLWRQEKVIIVPLIISATGLTPITFTPHLVQLGLNTDIHRNIQKSVILKTCNIVRSFLNTEW

SEQ ID NO: 19852 - protein, 1226 aa, Pachyrhynchus sulphureomaculatus
MSCTTGINEHAMRCCNENTKPDKEITEKRITRRLDPPTSIPSATDVDTGQTQPPKTGQGPYVLQGQHATTKAGKPRQRLKWTYEMNRTVMRCYYTATKLETITSGYRQQLHRLFLAEYPHLQLLVSEQRVVDQKRVITKNNRLTPLELQTIKDTVAVELNTDQPNNRNNKADSEPASHTQPPSRTQQYPPPRRSITQNNIASTAQHHITDNNMNHSPPSTTSTQHHPESPLIQTLKAKMKSHLARWSGTDPTTRNPIPRLIFRQSTQPILNTLNKHIIPQYITDSSTIEDIHTIIYAAAITTLTQNNQKLPQRQGNPNRTKPKFKWQIRIENKINNIRRDLGHLTQFISGNASKRVTQGANKIKSKSPNRTLPEILDTLKQKLSVYAARLRRYKESNERKDTNNLFRRSEKQFYRKTMYNRQIAVTEPPNKQELTDYWKSVWSEPKQHNNNTPWIKAEEDKHKHVTEQENTTFNTQEITETIKHTHNWKCPGIDNIQNFWYKQFTTTHEALTHQINKAILQPHTFPTFLTQGITYVKPKSSDTTNPSNYRPITCLPTLYKIITATISKKIEQHLTDNNILTEEQKGCRKNSRGCKEQLIIDSVIMGQTRKEHRNLHIGYIDYKKAFDSIPHSWLIRALEIYKINQHLRQFLAQIMKTWKTKIRLETQTERIQTEELYIRRGIFQGDSLSALWFCLCLNPLSNILNRTEHGFNIRHQKENQHKINHLLYMDDIKLYAATQAQLKELLKITEIFTLDVNMEFGISKCKVLHINKGQWKHHHETETINNETLDNMFDKETYKYLGFQQSTKLNHTHIKTELRTEFKNRLTKLLQTKLNSKNLTKAINTFAIPILTYSFGIIKWSQTDIENIHILIRSQFTKYRKLHPNACKERLTIERKAGGRGIIDIRSLHTKQIQTLRKFFHSKQTSLHTATVKADKNYTSLDLARADHSADTHSHTQLQQEKMKTWSEKTLHGKHRYHIEQDHVNKKQSYTWLRDGQLFPETEGFLLAIQDKVILTRNYQKHIIKDPTIAEDRCRKCHQQKETIEHITSGCKILAGTEYTARHDSAAKVVHQALATTYRLIENTDPYYKYTPTSILENEDYKLYWDIGIHTDKTVSANRPDITFQSKKGKVTCLIDIAVPNDTNIQAKYTEKISKYTDLATEIKRLWRQEKVIIVPLIISATGLTPITFTPHLVQLGLNTDIHRNIQKSVILKTCNIVRSFLNTEW

SEQ ID NO: 19853 - protein, 809 aa, Pachyrhynchus sulphureomaculatus
MYNKQIAVTEPPNEQELTDYWKSIWSEPKLHNNNTPWIKAEEDKHKHVTEQENTTFNTQEITETIKHTHNWKCPGIDNIQNFWYKQFTTTHEALTHQINKAILQPHTFPTFLTQGITYVKPKSSDTTNPSNYRPITCLPTLYKIITATISKKIEQHLTDNNILTEEQKGCRKNSRGCKEQLIIDSVIMGQTRKEHRNLHIGYIDYKKAFDSIPHSWLIRALEIYKINQHLRQFLAQIMKTWKTKIRLETQTERIQTEELYIRRGIFQGDSLSALWFCLCLNPLSNILNRTEHGFNIRHQKVNQHKINHLLYMDDIKLYAATQTQLKELLKITEIFTLDVNMEFGISKCKVLHINKGQWKHHHETETINNETLDNMFDKETYKYLGFQQSTKLNHTHIKTELRTEFKNRLTKLLQTKLNSKNLTKAINTFAIPILTYSFGIIKWSQTDIENIHILIRSQFTKYRKLHPNACKERLTIERKAGGRGIIDIRSLHTKQIQALRKFFHSKQTSLHTATVKADKNYTPLDLSRADHSADTHSHTQLQQEKMKTWSEKTLHGKHRYHIEQDHVNKKQSYTWLQDGQLFPETEGFLLAIQDKVILTRNYQKHIIKDPTIAEDRCRKCHQQKETIEHITSGCRILAGTEYTARHDSAAKVVHQALATTYKLIENTDPYYKYTPTSILENEDYKLYWDISIHTDKTVSANRPDITFQCKKGKVTYLIDIAVPNDTNIQTKYTEKISKYTDLATEIKRLWKQEKVIIVPLIISATGLTPITFTPHLVQLGLNTNIHKNIQKSVILKTCNIVRSFLNTEW

SEQ ID NO: 19854 - protein, 809 aa, Pachyrhynchus sulphureomaculatus
MYNKQIAVTEPPNKQELTDYWKSIWSEPKQHNNNTPWIKAEEDKHKHVTEQENTTFNTQEITETIKHTHNWKCPGIDNIQNFWYKQFTTTHEALTHQINKAILQPHTFPTFLTQGITYVKPKSSDTTNPSNYRPITCLPTLYKIITATISKKIEQHLTDNNILTEEQKGCRKNSRGCKEQLIIDSVIMGQTRKEHRNLHIGYIDYKKAFDSITHSWLIRALEIYKINQHLRQFLAQIMKTWKTKIRLETQTERIQTEELYIRRGIFQGDSLSALWFCLCLNPLSNILNRTEHGFNIRHQKENQHKINHLLYMDDIKLYAATQTQLKELLKITEIFTLDVNMEFGISKCKVLHINKGQWKHHHETETINNETLDNMFDTETYKYLGFQQSTKLNHTHIKTELRTEFKNRLTKLLQTKLNSKNLTKAINTFAIPILTYSFGIIKWSQTDIENIHILIRSQFTKYRKLHPNACKERLTIERKAGGRGIIDIRSLHTKQIQTLRKFFHSKQTSLHTATVKADKNYTPLDLARADHSADTHSHTQLQQEKMKTWSEKTLHGKHRYHIEQDHVNKKQSYTWLRDGQLFPETEGFLLAIQDKVILTRNYQKHIIKDPTIAEDRCRKCHQQKETIEHKTSGCKILAGTEYTARHDSAAKVVHQALATTYRLIENTDPYYKYTPTSILENEDYKLYWDIGIHTDKTVSANRPDITFQCKKGKVTYLIDIAVPNDTNIQAKYTEKISKYTDLATEIKRLWRQEKVIIVPLIISATGLTPITFTPHLVQLGLNTDIHRNIQKSVILKTCNIVRSFLNTEW

SEQ ID NO: 19855 - protein, 1091 aa, Pachyrhynchus sulphureomaculatus
MFSHSGSEFLFLKTKRQVLSTLSFSLFAANQLVNSFIQSLVAICNSPSRTQQYPPPRRSITQNNIASTAQHHITDNNMNHSPPSTTSTQHHPESPLIQTLKAKMESHLARWSGTDPTTRNPIPRLIFRQSTQPILNTLNKHIIPQYITDSSTIEDIHTIIYAAAITTLTQNNQKLPQRQGNPNRTKPKFKWQIRIENKINNIRRDLGHLTQFISGNASKRVTQGANKIKSKSPNRTLPEILDTLKQKLSVYAARLRRYKESNERKDTNNLFRRSEKQFYRKTMYNKQIAVTEPPNKQELTDYWKSIWSEPKQHNNNTPWIKDEEDKHKHVTEQENTTFNTQEITETIKHTHNWKCPGIDNIQNFWYKQFTTTHEALAHQINKAILQPHTFPTFLTQGITYVKPKSSDTTNPSNYRPITCLPTLYKIITATISKKIEQHLTDNNILTEEQKGCRKNSRGCKEQLIIDSVIMGQTRKEHRNLHIGYIDYKKAFDSIPHSWLIRALEIYKINQHLRQFLAQIMKTWKTKIRLETQTERIQTEELYIRRGIFQGDSLSDLWFCLCLNPLSNILNRTEHGFNIRHQKENQHKINHLLYMDDIKLYAATQTQLKELLKITEIFTLDVNMEFGISKCKVLHINKGQWKHHHETETINNETLDNMFDKETYKYLGFQQSTKLNHTHIKTELRTEFKNRLTKLLQTKLNSKNLTKAINTFAIPILTYSFGIIKWSQTDIENIHILIRSQFTKYRKLHPNACKERLTIERKAGGRGIIDIRSLHTKQIQTLRKFFHSKQTSLHTATVKADKNYTPLDLARADHSADTHSHTQLQQEKMKTWSEKTLHGKHRYHIEQDHVNKKQSYTWLRDGQLFPETEGFLLAIQDKVILTRNYQKHIIKDPTIAEDRCRKCHQQKETIEHITSGCKILAGTEYTARHDSAAKVVHQALATTYRLIENTDPYYKYTPTSILENEDYKLYWDIGIHTDKTVSANRLDITFQCKKGKVTYLIDIAVPNDTNIQAKYTEKISKYTDLATEIKRLWRQEKVIIVPLIISATGLTPITFTPHLVQLGLNTDIHRNIQKSVILKTCNIVRSFLNTEW

SEQ ID NO: 19856 - protein, 1480 aa, Pachyrhynchus sulphureomaculatus
MLNNNNYNNENGRVLRRRTPVVQTATATPQQQLQTNQTTASVETTPDSFTRSDIVGDGNCLFRAVSLYLYGHQNHHEKLREVALRYLQQNWSELHTFSLIEVDDIKDFNNYYNYMRKNGTYGTSLEILALSETQNSNFHIFSKQRRTRHTKITFTDRPTIISTGKYNKTIYLLLTGNPMSGHLELLTPQNTENIPENNRPIKEASGERRNGRGRRGKWQLDQNDEDQATENGPAKSVVLATKPTPTKAGKSQQRMSCTTGINEHAMRCCNENTKPDKEIIEKRITRRLDPPTSIPSATDVDTGQTQPPKPGQGPYVLQGQHATTKAGKPRQRLKWTDEMNRTVMRCYYTATKLETITSGYRQQLHRLFLTEYPHLQLLVSEQRVVDQKRVITKNNRLTPLELQTIKDTVAVELNTDQPNNRNNKADSDPASHTQPPSQTQQYPPPRRSITQNNIASTAQHHITDNNMNHSPPSTTSTQHHPESLLIQTLKAKMESHLARWSGTDPTTRNPIPRLIFRQSTQPILNTLNKHIIPQYITDSSTIEDIHTIIYAAAITTLTQNNQKLPQRQGNPNRTKPKFKWQIRIENKINNIRRDLGHLTQFISGNASKRVTQGANKIKSKSPNRTLPEILDTLKQKLSVYAARLRRYKESNERKDTNNLFRRSEKQFYRKTMYNKQIAVTEPPNKQELTDYWKSIWSEPKQHNNNTPWIKAEEDKHKHVTEQENTTFNTQEITETIKHTHNWKCPGIDNIQNFWYKQFTTTHEALTHQINKAILQPHTFPTFLTQGITYVKPKSSDTTNPSNYRPITCLPTLYKIITATISKKIEQHLTDNNILTEEQKGCRKNSRGCKEQLIIDSVIMGQTRKEHRNLHIGYIDYKKAFDSIPLSWLIRALEIYKINQHLRQFLAQIMKTWKTKIRLETQTERIQTEELYIRRGIFQGDSLSALWFCLCLNPLSNILNRTEHGFNIRHQKENQHKINHLLYMDDIKLYAATQTQLKELLKITEIFTLDVNMEFGISKCKVLHINKGQWKHHHETETINNETLDNMFDKETYKYLGFQQSTKLNHTHIKTELRTEFKNRLTKLLQTKLNSKNLTKAINTFAIPILTYSFGIIKWSQTDIENIHILIRSQFTKYRKLHPNACKERLTIERKAGGRGIIDIRSLHTKQIQTLRKFFHSKQTSLHTATVKADKNYTPLDLARADHSADTHSHTQLQQEKMKTWSEKTLHGKHRYHIEQDHVNKKQSYTWLRDGQLFPETEGFLLAIQDKVILTRNYQKHIIKDPTIAEDRCRKCHHQKETIEHITSGCKILAGTEYTARHDSAAKVVHQALATTYRLIENTDPYYKYTPTSILENEDYKLYWDIGIHTDKTVSANRPDITFQCKKGKVTYLIDIAVPNDTNIQAKYTEKISKYTDLATEIKRLWRQEKVIIVPLIISATGLTPITFTPHLVQLGLNTDIHRNIQKSVILKTCNIVRSFLNTEW

SEQ ID NO: 19857 - protein, 987 aa, Pachyrhynchus sulphureomaculatus
MQSHLARWSGTDPTTRNPIPRLIFKQSTQMILNTINKHIIPQYKTDLSTIEDIHTIIYAAAITTITQNNQKLPQRQRDPNSRKPKFKWQIRIENKINNIRRDLGHLTQFMNGNASKRVTQGVDKIKSKSLNRTLPEIVDTLKQKLSVYAARLRRYKESNERKDTNNLFRRSEKQFYRKTMYNEQTVVTEPPNKQELADYWKTVWSEPKLHNNNTSWIKAEEDKQKRVTEQENSTLTTEEITETIKHTHNWKCPGIDNIRNFWYKQFTTTHEALTHQINKAILQPHTFPTFLTQGITYVKPKSSDTTNPSNYRPITCLPTLYKIITAAISKKIEQHLTDNNIITEEQKGCRKNSRGCKEQLIIDSVIMGQTRKEHRNLHIGYIDYKKAFDSIPHSWLIRALEIYKINQHLRQFLAQIMKTWKTKIRLEKQTERIQTEELYIRRGIFQGDSLSALWFCLCLNPLSNILNRTEHGFNIRHQKGNQHKINHLLYMDDIKLYAATKTQLKELLKITEIFTLDVNMEFGISKCKVLHINKGQWKYHHETETVNNETLDNMFDKETYKYLGFQQSTKLNHTHIKTELRTEFKNRLTKLLQTKLNSKYLTKAINTFAIPILTYSFGIIKWSQTDLENIHILIRSQFTKYRKLHPNACKERLTIERKAGGRGIIDIRSLHTKQIQALRKFFHNKQTSLHTATVKADKNYTPLDLSRVDHPADTHSHIQLQQEKMKTWSEKTLHGKHRYHIEQDHVNKKQSYTWLRDGQLFPETEGFLLAIQDKVILTRNYQKHIIKDPTITEDRCRKCHPQKETIEHITSGCKILAGTEYTARHDSAAKVVHQALATTYKLIENTDPYYKYTPTSVLENKDYKLYWDISIHTDKTVSANRPDITFQCKKEKVTYLIDIAVPNDTNIQTKYTEKISKYTDLATEIKRLWKQEKVIIVPLIISATGLTPTTFTPHLVQLGLNTNIHKNIQKSVILKTCNIVRSFLNTQ

SEQ ID NO: 19858 - protein, 879 aa, Pachyrhynchus sulphureomaculatus
MNGNASKRVTQGVDKIKSKSLNRTLPEIVDTLKQKLSVYAARLRRYKESNERKDTNNLFRRSQKQFYRKTMYNEQTVVTEPPNKQELADYWKTVWSEPKLHNNNTPWIKAEEDKHKRVTEQENSTLTTEEITETIKHTHNWKCPGIDNIQNFWYKQFTTTHEALTHQINKAILQPHTFPTFLTQGITYIKPKSSDTTNPSNYQPITCLPTLYKIITATISKKIEQHLIDNNILTEEQKGCRKNSRGCKEQLIIDSVIMGQTRKEHRNLHIGYIDYKKAFDSIPHSWLIRALEIYKINQHLRQFLAQIMKTWKTKIRLETQTERIQTEELYIRRGIFQGDSLSALWFCLCLNPLSNILNRTEHGFSIRHQKVNQHKINHLLYMDDIKLYAATKTQLKELLKITEIFTLDVNMEFGISKCKVLHINKGQWKYHHETETINNETLDNMFDKETYKYLGFQQSTKLNHTHIKTELRTEFKNRLTKLLQTKLNSKNLTKAINTFAIPILTYSFGIIKWSQTDIENIHILIRSQFTKYRKLHPNACKERLTIERKAGGRGIIDIRSLHTKQIQALRKFFHTKQTSLHTATIKADKNYTPLDLSRVDHAADTHSHTQLQQEKMKTWSEKTLHGKHRYHIEQDHVNKKQSYTWLRDGQLFPETEGFLLAIQDKVILTRNYQKHIIKDPTITEDRCRKCHQQKETIEHITSGCKILAGTEYTARHDSAAKVVHQALATTYKLIENTDPYYKYTPTSVLENKDYKLYWDISIYTDKTVSANRPDITFQCKKRKVTYLIDIAVPNDTNIQTKYTEKISKYTDLATEIKRLWKQEKVIIVPLIISATGLTPTTFTPHLEQLGLNTNIHKNIQKSVILKTCNIVRSFLNTQW

SEQ ID NO: 19859 - protein, 987 aa, Pachyrhynchus sulphureomaculatus
MESHLARWSGTDPTTRNPIPRLIFRQSTQPILNTLNKHIIPQYITDLSTIEDIHTIIYAAAITTLTQNNQKLPQRQGNTNRTKPKFKWQIRIENKINNIRRDLGHLTQFISGNASKRVTQGANKIKSKSPNRTLPEILDTLKQKLSVYAARLRRYKESNERKDTNNLFRRSEKQFYRKTMYNKQIAVTEPPNKQELTDYWKSIWSEPKLHNNNTPWIKAEEDKHKHLTEQENTTLNTQEITETIKHTHNWKCPGIDNIQNFWYKQFTTTHEALTHQINKAILQPHTFPTFLTQGITYVKPKSSDTTNPSNYRPITCLPTLYKIITATISKKIEQHLTDNNILTEEQKGCRKNSRGCKEQLIIDSVIMGQTRKEHRNLHIGYIDYKKAFDSIPHSWLIRALEIYKINQHLRQFLAQIMKTWKTKIRLETPTERIETEELYIRRGIFQGDSLSALWFCLCLNPLSNILNRTEHGFNIRHQKVNQHKINHLLYMDDIKLYAATQTQLKELLKTTEIFTLDVNMEFGISKCKVLHINKGQWKCHHETETINNETLDNMFDKETYKYLGFQQNTKLNHTHIKTELRTEFKNRLTKLLQTKLNSKNLTKAINTFAIPVLTYSFGIIKWSQTDIENIHILIRSQFTKYRKLHPNACKERLTIERKAGGRGIIDIRSLHTKQIQTLRKFFHTKQTSLHTATVKADKNYTPLDLARADHSADTHSHTQLQQEKMKTWSEKTLHGKHRYHIEQDHVNKKQSYTWLQDGQLFPETEGFLLAIQDKVILTRNYQKHIIKDPTIAEDKCRKCHQQKETIEHITSGCKILAGTEYTARHDSAAKVVHQALATTYKLIENTDPYYKYTPTSILENEEYKLYWDIGIHTDKTVSANRPDITFQCKKEKVTYLIDIAVPNDTNIQTKYTEKISKYTDLATEIKRLWKQEKVIIVPLIISATGLTPTTFTPHLVQLGLNTNIHKNIQKSVILKTCNIVRSFLNTQ

SEQ ID NO: 19860 - protein, 987 aa, Pachyrhynchus sulphureomaculatus
MQSHLARWSGTDPTTRNPIPRLIFKQSTQMILNTINKHIIPQYITDLSTIEDIHTIIYAAAITTITQNNQKLPQRQRDPNSRKPKLKWQIRIENKINNIRRDLGHLTQFMNGNASKRVTQGVDKIKSKSLNRTLPEIVDNLKQKLSVYAARLRRYKESNERKDTNNLFRRSEKQFYRKTMYNEQTVVTEPPNKQELADYWKTVWSESKLHNNNTSWIKAEEDKHKRVTEQENSTLTTEEITETIKHTHNWKCPGIDNIQNFWYKQFTITHEALTHQINKAILQPHTFPTFLTQGITYVKPKSSDTTNPSNYRPITCLPTLYKISTAAISKKIEQHLTDNNIITEEQKGCRKNSRGCKEQLIIDSVIMGQTRKEHRNLHIGYIDYKKAFDSIPHSWLIRALEIYKINQHLRQFLAQIMKTWKTKIRLETQTERIQTEELYIRRGIFQGDSLSALWFCLCLNPLSNILNRTEHGFNIRHQKGNQHKINHLLYMDDIKLYAATKTQLKELLKITEIFTLDVNMEFGISKCKVLHINKGQWKYHHETETINNETLDNMFDKETYKYLGFQQSTKLNHTHIKTELRTEFKNRLTKLLQTKLNSKYLTKAINTFAIPILTYSFGIIKWSQTDLENIHILIRSQFTKYRKLHPNACKERLTIERKAGGRGIIDIRSLHTKQIQALRKFFHTKQTSLHTATVKADKNYTPLDLSRVDHPADTHSHIQLQQEKMKTWSEKTLHGKHRYHIEQDHVNKKQSYTWLRDGQLFPETEGFLLAIQDKVILTRNYQKHIIKDPTITEDRCRKCHQQKETIEHITSGCKILAGTEYTARHDSAAKVVHQALATTYKLIENTDPYYKYTPTSVLENKDYKLYWDISIHTDKTVSANRPDITFQCKKEKVTYLIDIAVPNDTNIQTKYTEKISKYTDLATEIKRLWKQEKVIIVPLIISATGLTPTTFTPHLVQLGLNTNIHKNIQKSVILKTCNIVRSFLNTQ

SEQ ID NO: 19861 - protein, 1137 aa, Pachyrhynchus sulphureomaculatus
MRCYYTATKLETVTSGYRLELHRLFLTEYPHLQLLVTEQRVIDQKRVITKNNRLTPFELQTIKDTVAAELNADQVAAELNTDQLNNRNDRADTEPISHTQPPSRKQQDPPPSRSITQNNISEQIPSTTRHSTTSIQHHPESPLTQTLKAQMQSHLARWSGTDPTTRNPIPRLIFKQSTQMILNTINKHIIPQYITDLSTIEDIHTIIYAAAITTITQNNQKLPQRQRDPNSRKPKFKWQIRIENKIKNIRRDLGHLTQFMNGNASKRVTQGVDKIKSKSLNRTLPEIVDTLKQKLSVYAARLRRYKESNERKDTNNLFRRSEKQFYRKTMYNEQTVVTEPPNKQELADYWKTVWSEPKLHNNNTSWIKAEEDKHKRVTEQENSTLTTEEITETIKHTHNWKCPGIDNIQNFWYKQFTTTHEALTYQINKAILQPHTFPTFLTQGITYVKPKSSDTTNPSNYRPITCLPTLYKIITAAISKKIEQHLTDNNIITEEQKGCRKNSRGCKEQLIIDSVIMGQTRKEHRNLHIGYIDYKKAFDSIPHSWLIRALEIYKINQHLRQFLAQIMKTWKIKIRLETQTERIQTEELYIRRGIFQGDSLSALWFCLCLNPLSNILNRTEHGFNIRHQKGNQHKINHLLYMDDIKLYAATKTQLKELLKITEIFTLDVNMEFGISKCKVLHINKGQWKYHHETETINNETLDNMFDKETYKYLGFQQSTKLNHTHIKTELRTEFKNRLTKLLQTKLNSKYLTKAINTFAIPILTYSFGIIKWSQTDLENIHILIRSQFTKYRKLHPNACKERLTIERKAGGRGIIDIRSLHTKQIQALRKFFHTKQTSLHTATVKADKNYTPLDLSRVDHPADTHSHIQLQQEKMKTWSEKTLHGKHRYHIEQDHVNKKQSYTWLRDGQLFPETEGFLLAIQDKVILTRNYQKHIIKDPTITEDRCRKCHQQKETIEHITSGCKILAGTEYTARHDSAAKVVHQALATTYKLIENTDPYYKYTPTSVLENKDYKLYWDISIHTDKTVSANRPDITFQCKKEKVTYLIDIAVPNDTNIQTKYTEKISKYTDLATEIKRLWKQEKVIIVPLIISATGLTPTTFTPHLVQLGLNTNIHKNIQKSVILKTCNIVRSFLNTQ

SEQ ID NO: 19862 - protein, 1479 aa, Pachyrhynchus sulphureomaculatus
MLNNNNYNNENGRVLRRRTPVVQTATATPQQQLQTNQTTASVETTPDSFTRSDIVGDGNCLFRAVSLYLYGHQNHHEKLREVALRYLQQNWSELHTFSLIEVDDIKDFNNYYNYMRKNGTYGTSLEILALSETQNSNFHIFSKQRRTRHTKITFTDRPTIISTGKYNKTIYLLLTGNPMSGHFELLTPQNTENIPENNRPIKEASGERRNGRGRRGKWQLDQNDEDQATENGPAKSVVLATKPTPTKAGKSQQRMSCTTGINEHAMRCCNENTKPDKEITEKRITRRLDPPTSIPSATDVDTGQTQPPNPGQGPYVLQGQHATTKAGKPRQRLKWTDEMNRTVMRCYYTATKLETITSGYRQQLHRLFLTEYPHLQLLVSEQRVVDQKRVITKNNRLTPLELQTIKDTVAVELNTDQPNNRNNKADSEPASHTQPPSRTQQYPPPRRSITQNNIASTAQHHITDNNMNHSPPSTTSTQHHPESPLIQTLKAKMESHLARWSGTDPTTRNPIPRLIFRQSTQPILNTLNKHIIPQYITDSSTIEDIHTIIYAAAITTLTQNNQKLPQRQGNPNRTKPKFKWQIRIENKINNIRRDLGHLTQFISGNASKRVTQWANKIKSKSPNRTLPEILDTLKQKLSVYAARLRRYKESNERKDTNNLFRRSEKQFYRKTMYNKQIAVTEPPNKQELTDYWKGIWSEPKQHNNSTPWIKAEEDKHKHVTEQENTTFNTQEITETIKHTHNWKCPGIDNIQNFWYKQFTTTHEALTHQINKAILQPHTFPTFLTQGITYVKPKSSDTTNPSNYRPITCLPTLYKIITATISKKIEQHLTDNNILTEEQKGCRKNSRGCKEQLIIDSVIMGQTRKEHRNLHIGYIDYKKAFDSIPHSWLIRALEIYKINQHLRQFLAQIMKTWKTKIRLETATERIETEEVYIRRGIFQGDSLSALWFCLCLNPLSNILNRTEHGFNIRHQKVNQHKINHLLYMDDIKLYAATQTQLKELLKITEIFTLDVNMEFGISKCKVLHINKGQWKCHHETETINNETLDNMFDKETYKYLGFQQSTKLNHTHIKTELRTEFKNRLTKLLQTKLNSKNLTKAINTFAIPVLTYSFGIIKWSQTDIENIHILIRSQFTKYRKLHPNACKERLTIERKAGGRGIIDIRSLHTKQIQTLRKFFHSKQTSLHTATVKADKNYTPLDLARADHSADTHSHTQLQQEKMKTWSEKTLHGKHRYHIEQDHVNKKQSYTWLQDGQLFPETEGFLLAIQDKVILTRNYQKHIIKDPTIAEDRCRKCHQQKETIEHITSGCKILAGTEYTARHDSAAKVVHQALATTYKLIENTDPYYKYTPTSILENEEYKLYWDIGIHTDKTVSANRPDITFQCKKEKVTYLIDIAVPNDTNIQTKYTEKISKYTDLATEIKRLWKQEKVIIVPLIISATGLTPTTFTPHLVQLGLNTNIHKNIQKSVILKTCNIVRSFLNTQ

SEQ ID NO: 19863 - protein, 1226 aa, Pachyrhynchus sulphureomaculatus
MSCTTGINEHAMRCCNENTKPDKEITEKRITRRLDPPTSIPSATDVDTGQTQPPKPGQGPYVLQGQHATTKAGKPRQRLKWTDEMNRTVMRCYYTAAQTRNNNIGLQTATAQTFLDRISTSAITCFRTESSRPKRVITKNNRLTPLELQTIKDTVAVELNTDQPNNRNNKADSEPASHTQPPSRTQQYPPPRRSITQNNIASTEQHHITDNNMNHSPPSTTSTQHHPESPLIQTLKAKMESHLARWSGTDPTTRNPIPRLIFRHSTQPILNTLNKHIIPQYITDLSTIEDIHTIIYAAAITTLTQNNQKLPQRQGNPNRTKPKFKWQIRIENKINNIRRDLGHLTQFISGNASKRVTQGANKIKSKSPNRTLPEILDTLKQKLSVYAARLRRYKESNERKDTNNLFRRSEKQFYRKTMYNQQIAVTEPPNKQELTDYWKRIWSEPKLHNNNAPWIKAEEDKHKHVTEQENTTFNTQEITETIKHTHNWKCPGIDNIQNFWYKQFTATHEALTHQINKAILQPHTFPTFLTQGITYVKPKSSDTTNPSNYRPITCLPTLYKIITATISKKIEQHLTDNNILTEEQKGCRKNGRGCKEQLILDSVIMGQTRKEHGNLHIGYIDYKKAFDSIPHSWLIRALEIYKINQHLRQFLAQIMKTWKTKIRLETQTERIQTEELYIRRGIFQGDSLSALWFCLCLNPLSNILNRTEHGFNIRHQKVNQHKINHLLYMDDIKLYAATQTQLKELLKITEIFTLDVNMEFGISKCKVLHINKGQWKCHHETETINNETLDNMFDKETYKYLGFQQSTKLNHTHIKTELRTEFKNRLTKLLQTKLNSKNLTKAINTFAIPMLTYSFGIIKWSQTDIENIHILIRSQFTKYRKLHPNACKERLTIERKAGGRGIIDIRSLHTKQIQTLRKFFHSKQTSLHTATVKADKNYTPLDLARADHSADTHSHTQLQQEKMKTWSEKTLHGKHRYHIEQDHVNKKQSYTWLRDGQLFPETEGFLLAIQDKVILTRNYQKHIIKDPTIAEDRCRKCHQQKETIEHITSGCKILAGTEYTARHDSAAKVVHQALATTYRLIENTDPYYKYTPTSILENEDYKLYWDIGIHTDKTVSANRPDITFQCKKGKVTYLIDIAVPNDTNIQAKYTEKISKYTDLATEIKRLWRQEKVIIVPLIISATGLTPITFTPHLVQLGLNTDIHRNIQKSVILKTCNIVRSFLNTEW

SEQ ID NO: 19864 - protein, 988 aa, Callosobruchus maculatus
MNAQFNKWCGTNPALRDPLPRLIFNSNTQKILHTINTNVIPQFLTSGSNLEDIHTVIYAAAVATLIVNGQKLPKRSNNHTSKRSKPKWQMRIENKITTIRKELAHLAQYTNNNNRSKRIQTTIDILKSKSPQKSIPEITDTLKQKLAVYAARLRRYNESNDRKDANNLFQRSEKQFYKKITTENQITAIELPSKQELIEFWGSLWSEPKTHNENAPWIRQEEEKHQHIAEQGNVILTPEEIAETIKHTHNWKCPGVDNIQNFWYKQFSSVYEVLTDQINKAILQPNRLPKFLAQGITYIKPKNADTKSPANYRPITCLPTLYNIIIATICRRIEKHLTENSILTEEQKGCRKQSQGCKEQLIIDSVIMEQTRKEHRNLHTCFIDYKKAFDSVPHSWLTKTLQIYKINPGLRQFLTRTMETWRTNIHLQTEDGHIQTDELHIRRGVFQGESLSSLWFCLCLNPLSNTLNSANCGFTIRHQKANQHKINHLLYMDDLKLYAATEVQLRELLRITEVCTSDIKMEFGMSKCKVLHINKGQWKNHPEQEVVTGQALDNMDKDETYKYLGINQNAKIDHTKIKSQLTQEFKDRLIRLLKTKLNSRNLTKAINTFAIPILTYSFGIIKWSHTDIENIHILIRAELTKHRMSHPKACKERLTIDRKQGGRGIIDIQSLHAKQIKSLRHFFHSKQTNLHKAIVKADKNYTPLALSCPDHAADAHNHIQAQQEKINTWSQKALHGKHRYRVTQDHINEKQSYTWLQDGQLFPETEGFMLAIQDQVIATRNYRKYIMKDPSISDDDCRKCHQQKETIENITSGCKTLAGTAYTARHNSAAKVIHQALATTNKLIENTDPYYNYTPTSVLENNQFKLYWDIEIHTDKTIPANRPDIVFQSKTDKVTYLIDIAIPNDMNIQNTYAGKISKYTDLAIEIKRLWKQNKVVIVPLIMSVSGLTPNTFTPHLQQLGLDEKLHKTFQKSVILKTCSIVRYFLNSE

SEQ ID NO: 19865 - protein, 1365 aa, Pachyrhynchus sulphureomaculatus
MRKNGTYGTSLEILALSETQNSNFHIFSKQRRTRHTKITFTDRPTIISTGKYNKTIYLLLTGNPMSGHFELLTPQNIENIPENNRPIKEASGERRNGRGRRGKWQLDQNDEDQATENAPAKSVVSATKPTPTKAGKSQQRMSCTTGINEHAMRCCNENTKPDKEITEKRITRRLDPPISIPSTTDVDTGQTQPPKPGQGPYVLQGQHATTKAGKPRQRLKWTDEMNRTVTRCYYSATKLETITSGYRQQLHRLFLTEYPHLQLLVSEQRVTDQKRVITKNNRLTPLELQTIKDTVAVELNTDQPNNRNNKAVFEPASHTQPPSRTQQYPPPRRSITQNNIASTAQHHITDNNMNHSPPSTTSTQHHPESPLIQTLKAKMESHLARWSGTDPTTRNPIPRLIFRQSTQPILNTLNKHIIPQYITDLSTIEDIHTIIYAAAITTLTQNNQKLPQRQGNPNRTKPKFKWQIRIENKINNIRRDLGHLTQFISGNASKRVSQGANKIKSKSPNRTLPEILDTLKQKLSVYAARLRRYKESNERKDTNNLFRRSEKQFYRKTMYNKQIAVTEPPNKQELTDYWKSIWSEPKLHNNNTPWIKAEEDKHKHVTEQENTTFNTQEITETIKHTHNWKCPGIDNIQNFWYKQFTTTHEALTHQINKAILQPHTFPTFLTRGITYVKPKSSDTTNPSNYRPITCLPTLYKIITATISKKIEQHLTDNNILTEEQKGCRKNSRGCKEQLIIDSVIMGQTRKEHRNLHIGYIDYKKAFDSIPHSWLIRALEIYKINQHLRQFLAQIMKTWKTKIRLETQTERIQTEELYIRRGIFQGDSLSALWFYLCLNPLSNILNRTEHGFNIRHQNVNQHKINHLLYMDDIKLYAATQTQLKELLKITEIFTLDVNMEFGISKCKVLHINKGQWKCHHETETINNETLDNMFDKETYKYLGFQQSTKLNHTHIKTELRTEFKNRLTKLLQTKLNSKNLTKAINTFAIPILTYSFGIIKWSQTDIENIHILIRSQFTKYRKLHPNACKERLTIERKAGGRGIIDIRSLHTKQIKTLRKLFHSKQTSLHTATVKADKNYTPLDLARADHSADTHSHTQLQQEKIKTWSEKTLHGKHRYHIEQDHVNKKQSYTWFRDGQLFPETEGFLLAIQDKVILTRNYQKYIIKDPTIAEDRCRKCHQQKETIEHITSGCKILAGTEYTARHDSAAKVVHQALATTYRLIENTDPYYKYTPTSILENENYKLYWDIGIHTDKTVSANRPDITFQCKKGKVTYLIDIAVPNDTNIQVKYTEKISKYTDLATEIKRLWRQEKVIIVPLIISATGLTPITFTPHLVQLGLNTDIHRNIQKSVILKTCNIVRSFLNTE

SEQ ID NO: 19866 - protein, 1014 aa, Pachyrhynchus sulphureomaculatus
MNRSPPSTTSTQHHPESPLIQTLKAKMESHLARWSGTDPTTRNPIPRLIFRQSTQPILNTLNKHIIPQYITDSSTIEDIHTIIYAAAITTLTQNNQKLPQRQGNPNRTKPKFKWQIRIENKINNIRRDLGHLTQFISGNASKRVTQGANKIKSKSPNRTLPEILDTLKQKLSVYAARLRRYKESNERKDTNNLFRRSEKQFYRKTMYNRQIAVTEPPNKQELTDYWKSIWSEPKQHNNNTPWIKAEEDKHKHVTEQENTTFNTQEITETIKHTHNWKCPGIDNIQNFWYKQFTTTHEALTHQINKAILQPHTFPTFLTQGITYVKPKSSDTTNPSNYRPITCLPTLYKIITATISKKIEQHLTDNNILTEEQKGCRKNSRGCKEQLIIDSVIMGQTRKEHRNLHIGYIDYKKAFDSIPHSWLIRALEIYKISQHLRQFLAQIMKTWKTKIRLETQTERIQTEELYIRRGIFQGDSLSALWFCLCLNPLSNILNRTEHGFNIRHQKENQHKINHLLYMDDIKLYAATQTQLKELLKITEIFTLDVNMEFGISKCKVLHINKGQWKHHHETETINNETLDNMFDKETYKYLGFQQSTKLNHTHIKTELRTEFKNRLTKLLQTKLNSKNLTKAINTFAIPILTYSFGIIKWSQTDIENIHILIRSQFTKYRKLHPNACKERLTIERKAGGRGIIDIRSLHTKQIQTLRKFFHSKQTSLHTATVKADKNYTPLDLARADHSADTHSHTQLQQEKMKTWSEKTLHGKHRYHIEQDHVNKKQSYTWLRDGQLFPETEGFLLAIQDKVILTRNYQKHIIKDPTIAEDRCRKCHQQKETIEHITSGCKILAGTEYTARHDSAAKVVHQALATTYKLIENTDPYYKYTPTSILENEDYKLYWDIGIHTDKTVSANRPDITFQCKEGKVTYLIDIAVPNDTNIQAKYTEKISKYTDLATEIKRLWRQEKVIIVPLIISATGLTPITFTPHLVQLGLNTDIHRNIQKSVILKTCNIVRSFLNTEW

SEQ ID NO: 19867 - protein, 988 aa, Pachyrhynchus sulphureomaculatus
MESHLARWSGTDPTTRNPIPRLIFRQSTQPILNTLNKHIIPQYITDSSTIEDIHTIIYAAAITTLTQNNQKLPQRQGNPNRTKPKFKWQIRIENKINNIRRDLGHLTQFISGNASKRVTQGANKIKSKSPNSTLPEILDTLKQKLSVYAARLRRYKESNERKDTNNLFRRSEKQFYRKTMYNKQIAVTEPPNKQELTDYWKSIWSEPKQHNNNTPWIKAEEDKHKHVTEQENTTFNTQEITETIKHTHNWKCPGIDNIQNFWYKQFTTTHEALTHQINKAILQPHTLPTFLTQGITYVKPKSSDTTNPSNYRPITCLPTLYKIITATISKKIEQHLTDNNILTEEQKGCRKNSRGCKEQLIIDSVIMGQTRKEHRNLHIGYIDYKKAFDSIPHSWLIRALEIYKINQHLRQFLAQIMKTWKTKIRLETQTERIQTEELYIRRGIFQGDSLSALWFCLCLNPLSNILNRTEHGFNIRHQKENQHKINHLLYMDDIKLYAATQTQLKELLKITEIFTLDVNMEFGISKCKVLHINKGQWKHHHETETINNETLDNMFDKETYKYLGFQQSTKLNHTHIKTELRTEFKNRLTKLLQTKLNSKNLTKAINTFAIPILTYSFGIIKWSQTDIENIHILIRSQFTKYRKLHPNACKERLTIERKAGGRGIIDIRSLHTKQIQTLRKFFHSKQTSLHTATVKADKNYTPLDLARADHSADTHSHTQLQQEKMKTWSEKTLHGKHRYHIEQDHVNKKQSYTWLRDGQLFPETEGFLLAIQDKVILTRNYQKHIIKDPTIAEDRCRKCHQQKETIEHITSGCKILAGTEYTARHDSAAKVVHQALATTYRLIENTDPYYKYTPTSILENEDYKLYWDIGIHTDKTVSANRPDITFQCKKGKVTYLIDIAVPNDTNIQAKYTEKMSKYTDLATEIKRLWRQEKVIIVPLIISATGLTPITFTPHLVQLGLNTDIHRNIQKSVILKTCNIVRSFLNTEW

SEQ ID NO: 19868 - protein, 808 aa, Pachyrhynchus sulphureomaculatus
MYNKQIAVTEPPNKQELTDYWKSIWSEPKLHNNNTPWIKAEEDKHKHVTEQEDTTFNTQEITETIKHTHNWKCPGIDNTQNFWYKQFTTTHEALTHQINKAILQPHTFPTFLTQGITYVKPKSSDTTNPSNYRPITCLPTLYKIITATISKKIEQHLTDNNILTEEQKGCRKNSRGCKEQLIIDSVIMGQTRKEHRNLHIGYIDYKKAFDSIPHSWLIRALEIYKINQHLRQFLAQIMKTWKTKIRLETQTERIQTEELYIRRGIFQGDSLSALWFCLCLNPLSNILSRTEHGFNIRHQKVNQHKINHLLYMDDIKLYAATQTQLKELLKITEIFTLDVNMEFGISKCKVLHINKGQWKGHHETETINNETLDNMFDKETYKYLGFQQSTKLNHTHIKTELRTEFKNRLTKLLQTKLNSKNLTKAINTFAIPILTYSFGIIKWSQTDIENIHILIRSQFTKYRKLHPNACKERLTIERKAGGRGIIDIRSLHTKQIQTLRKFFHSKQTSLHTATVKADKNYTPLDLARADHSADTHSHTQLQQEKMKTWSEKTLHGKHRYHIEQDHVNKKQSYTWLRDGQLFPETEGFLLAIQDKVILTRNYQKYIIKDPTIAEDRCRKCHQQKETIEHITSGCKILAGTEYTARHDSAAKVVHQALATTYRLIENTDPYYKYTPTSILENEDYKLYWDIGIHTDKTVSANRPDITFQCKKGKVTYLIDIAVPNDTNIQAKYTEKISKYTDLATEIKRLWRQEKVIIVPLIISATGLTPITFTPHLVQLGLNTDIHRNIQKSVILKTCNIVRLFLNTE

SEQ ID NO: 19869 - protein, 1014 aa, Pachyrhynchus sulphureomaculatus
MNHSPPSTTSTQHHPESPLIKTLKAKMESHLARWSGTDPTTRNPIPRLIFRQSTQPILNTLNKHIIPQYITDSSTIEDIHTIIYAEAITTLTQNNQKLHQRQGNPNRTKPKFKWQIRIENKINNIRRDLGHLTQFISGNASKRVTQGANKIKSKSPNRTLPEILDTLKQKLSVYAARLRRYKESNERKDTNNLFRRSEKQFYRKTMYNKQIAVTEPPNKQELTDYWKSIWSEPKQHNNNTPWIKAEEDKHKHVTEQENTTFNTQEITETIKHTHNWKCPGIDNIQNFWYKQFTTTHEALTHQINKAILQPHTFPTFLTQGITYVKPKSSNTTNPSNYRPITCLPTLYKIITATISKKIEQHLTDNNILTEEQKGCRKNSRGCKEQLIIDSVIMGQTRKEHRNLHIGYIDYKKAFDSIPHSWLIRALEIYKINQHLRQFLAQIMKTWKTKIRLETQTERIQTEELYIRRGIFQGDSLSALWFCLCLNPLSNILNRTEHGFNIRHQKENQHKINHLLYMDDIKLYAATQTQLKELLKITEIFTLDVNMEFGISKCKVLHINKGQWKHHHETETINNETLDNMFDKETYKYLGFQQSTKLNHTHIKTELRTEFKNRLTKLLQTKLNSKNLTKAINTFAIPILTYSFGIIKWSQTDIENIHILIRSQFTKYRKLHPNACKERLTIERKAGGRGIIDIRSLHTKQIQTLRKFFHSKQTSLHTATVKADKNYTPLDLARADHSADTHSYTQLQQEKMKTWSEKTLHGKHRYHIEQDHVNKKQSYTWLRDGQLFPETEGFLLAIQDKVILTRNYQKHIIKDPTIAEDRCRKCHQQKETIEHITSGCKILAGTEYTARHDSAAKVVRQALATTYRLMENTDPYYKYTPTSILENEDYKLYWDIGIHTDKTVSANRPDITFQCKKGKVTYLIDIAVPNDTNIQAKYTEKISKYTDLATEIKRLWRQEKVIIVPLIISATGLTPITFTPHLVQLGLNTDIHRNIQKSVILKTCNIVRSFLNTEW

SEQ ID NO: 19870 - protein, 1218 aa, Pachyrhynchus sulphureomaculatus
MNTPCVAVMKSHLTKKSLTRESLAAWTQPPPIPSATNVNAGQIQPPKPGQTAYVLQGQHATTKAGKPRQRLKWTDEMNKTVMRCYYTATKLETVTSGYRLELHRLFLTEYPHLQLLVTEQRVIDQKRVITKNNRLTPFELQTIKDTVAAELNADQVAAELNTDQLNNRNDRADTEPISHTQPPSRKQQDPPPSRSITQNNISEQIPSTTRHSTTSIQHHPESPLIQTLKAQMQSHLARWSGTDPTTRNPIPRLIFKQSTQMILNTINKHIIPQYITDLSTIEDIHTIIYAAAITTITQNNQKLPQRQRDPNSRKPKFKWQIRIENKINNIRRDLGHLTQFMNGNASKRVTQGVDKIKSKSLNRTLPEIVDTLKQKLSVYAARLRRYKESNERKDTNNLFRRSEKQFYRKTMYNEQTVVTEPPNKQELADYWKTVWSEPKLHNNNTSWIKAEEDKHKRVTEQENSTLTTEEITETIKHTHNWKCPGIDNIQNFWYKQFTTTHEALTYQINKAILQPHTFPTFLTQGITYVKPKSSDTTNPSNYRPITCLPTLYKIITAAISKKIEQHLTDNNIITEEQKGCRKNSRGCKEQLIIDSVIMGQTRKEHRNLHIGYIDYKKAFDSIPHSWLIRALEIYKINQHLRQFLAQIMKTWKTKIRLETQTERIQTEELYIRRGIFQGDSLSALWFCLCLNPLSNILNRTEHGFNIRHQKGNQHKINHLLYMDDIKLYAATKTQLKELLKITEIFTLDVNMEFGISKCKVLHINKGQWKYHHETETINNETLDNMFDKETYKYLGFQQSTKLNHTHIKTELRTEFKNRLTKLLQTKLNSKYLTKAINTFAIPILTYSFGIIKWSQTDLENIHILIRSQFTKYRKLHPNACKERLTIERKAGGRGIIDIRSLHTKQIQALRKFFHTKQTSLHTATVKADKNYTPLDLSRVDHPADTHSHIQLQQEKMKTWSEKTLHGKHRYHIEQDHVNKKQSYTWLRDGQLFPETEGFLLAIQDKVILTRNYQKHIIKDPTITEDRCRKCHQQKETIEHITSGCKILAGTEYTARHDSAAKVVHQALATTYKLIENTDPYYKYTPTSVLENKDYKLYWDISIHTDKTVSANRPDITFQCKKEKVTYLIDIAVPNDTNIQTKYTEKISKYTDLATEIKRLWKQEKVIIVPLIISATGLTPTTFTPHLVQLGLNTNIHKNIQKSVILKTCNIVRSFLNTQ

SEQ ID NO: 19871 - protein, 1014 aa, Pachyrhynchus sulphureomaculatus
MNHSPPSTTSTQRHPESSLIQTLKAKMESHLARWSGTDPTTRNPIPRLIFKQSTQPILNTLNKHIIPQYITDLSTIEDIHTIIYAAAITTLTQNNQKLPQRQGNPNRTKPKFKWQIRIENKINNIRRDLGHLTQFISGNASKRVTQGANNIKCKSPNRTLPEILDTLKQKLSGYAARLRRYKESNERKDTNNLFRRSEKQFYQKTMYNKQIEVTEPPNKQELTDYWKSIWSEPKLHNNNTPWIKAEEDKHKHVTEQENFTLNTQEITETIKHTHNWKCPGIDNIQNFWYKQFTSTHKALTHQINKAILQPHTFPTFLTQGITYVKPKSSDTTNPSNYRPITCLPTLYKIITATISKKIEQHLTDNNILTEEQKGCRKNSRGCKEQLIIDNVIMGQTRKEHRNLHIGYIDYKKAFDSIPHSWLIRALEIYKINQHLRQFLAQIMKTWKTKIRLETQTERIQTEELYIRRGIFQGHSLSALWFCLCLNPLSNILNRTEHGFNIRHQKVNQHKINHLLYMDDIKLYAATQTQLKELLKITEIFTLDVNMEFGISKCKVLHINKGQWKFHHETETINNETLDNMFDKETYKYLGFQQSTKLNHTHIKTELRTEFKNRLTKLLQTKLNSKNLTKAINTFAIPILTYSFGIIKWSQTDIENIHILIRSQFTKYRKLHPNACKERLTIERKAGGRGIIDIRSLHTKQIQALRKFFHSKQTSLHTATVKADKNYTPLDLARADLSADTHSHVQLQQEKMKTWSEKTLHGKHRYHIEQDHVNKKQSYTWLQDGQLFPETEGFLLAIQDKVILTRNYQKHIIKDPTIAEDRCRKCHQQKETIEHITSGCKILAGTEYTARHDSAAKVVHQALATTYKLIENTDPYYKYTPTSILENEDYKLYWDIGIHTDKTVSANRPDITFQCKKGKVTYLIDIAVPNDTNIQTKYTEKISKYTDLAMEIKRLWKQEKVSIVPLIISATGLTPTTFTPHLVQLGLNTNIHKNIQKSVILKTCNIVRSFLNTQW

SEQ ID NO: 19872 - protein, 809 aa, Pachyrhynchus sulphureomaculatus
MYNKQIAVTEPPNKQELTDYWKSIWSEPKQHNNNTPWIKAEEDKHKHVTEQENTTFNTQEITETIKHTHNWKCPGIDNIQNFWYKQFTTTHEALTHQINKAILQPHTFPTFLTQGITYVKPKSSDTTNPSNYRPITCLPTLYKIITATISKKIEQHLTDNNILTEEQKGCRKNSRGCKEQLIIDSVIMGQTRKEHRNLHIGYIDYKKAFDSIPHSWLIRALEIYKINQHLRQFLAQIMKTWKTKIRLETQTERIQTEELYIRRGIFQGDSLSALWFCLCLNPLSNILNRTEHGFNIRHQKENQHKINHLLYMDDIKLYAATQTQLKELPKITEIFTLDVNMEFGISKCKVLHINKGQWKHHHETETINNETLDNMFDKETYKYLGFQQSTKLNHTHIKTELRTEFKNRLTKLLQTKLNSKNLTKAINTFAIPILTYSFGIIKWSQTDIENIHILIRSQFTKYRKLHPNACKERLTIERKAGGRGIIDIRSLHTKQIQTLRKFFHSKQTSLHTATVKADKNYTPLDLARADHSADTHSQTQLQQEKMKTWSEKTLHGKHRYHLEQDHVNKKQSYTWLRDGQLFPETEGFLLAIQDKVILTRNYQKHIIKDPTIAEDRCRKCHQQKETIEHITSGCKILAGTEYTARHDSAAKVVHQALATTYRLIENTDPYYKYTPTSVLENEDYKLYWDIGIHTDKTVSANRPDITFQCKKGKVTYLIDIAVPNDTNIQAKYTEKISKYTDLATEIKRLWRQEKVIIVPLIISATGLTPITFTPHLVQLGLNTDIHRNIQKSVILKTCNIVRSFLNTEW

SEQ ID NO: 19873 - protein, 988 aa, Pachyrhynchus sulphureomaculatus
MESHLARWSGTDPTTRNPIPRLIFRQSTQPILNTLNKHIIPQYITDSSTIEDIHTIIYAAAITTLTQNNQKLPQRQGNLNRTKPKFKWQIRIENKINNIRRDLGHLTQFISGNASKRVTQGANKIKSKSPNRTLPEILDTLKQKLSVYAARLRRYKESNERKDTNNLFRRSEKQFFRKTMYNKQIAVTEPPNKQELTDYWKSIWSEPKQHNNNTPWIKAEEDKHKHVTEQKNTTFNTQEITETIKHTHNWKCPGIDNIQNFWYKQFTTTHEALTHQINKAILQPHTFPTFLTQGITYVKPKSSDTTNPSNYRPITCLPTLYKIITATISKKIEQHLTDNNILTEEQKGCRKNSRGCKEQLIIDSVIMGQTRKEHRNLHIGYIDYKKAFDSIPHSWLIRALEIYKINQHLRQFLAQIMKTWKTKIRLETQTERIQTEELYIRRGIFQGDSLSALWFCLCLNPLSNILNRTEHGFNIRHQKENQHKINHLLYMDDIKLYAATQTQLKELLKITEIFTLDVNMEFGISKCKVLHINKGQWKHHHETETINNETLDNMFDKETYKYLGFQQSTKLNHTHIKTELRTEFKNRLTKLLQTKLNSKNLTKAINTFAIPILTYSFGIIKWSQTDIENIHILIRSQFTKYRKLHPNACKERLTIERKAGGRGIIDIRSLHTKQIQTLRKFFHSKQTSLHTATVKADKNYTPLDLARADHSADTHSHTQLQQEKMKTWSEKTLHGKHRYHIEQDHVNKKQSYTWLRDGQLFPETEGFLLAIQDKVILTRNYQKHIIKDPTIAEDRCRKCHQQKETIEHITSGCKILAGTEYTARHDSAAKVVHQALATVYRLIENRDPYYKYTPTSILENEDYKLYWDIGIHTDKTVSANRPDITFQCKKGKVTYLIDIAVPNDTNIQAKYTEKISKYTDLATEIKRLWRQEKVIIVPLIISATGLTPITFTPHLVQLGLNTYIHRNIQKSVILKTCNIVRSFLNTEW

SEQ ID NO: 19874 - protein, 988 aa, Pachyrhynchus sulphureomaculatus
MQSHLARWSGIDPTTRNPIPRLIFKQSTQMILNTINKHIIPQYITDLSTIEDIHTIIYAAAITTITQNNQKLPQRQRDPNSRKLKFKWQIRIENKINNIRRDLGHLTQFMNGNASKRVTQGVDKIKSKSLNRTLPEIVDTLKQKLSVYAARLRRYKESNERKDTSNLFRRSEKQFYRKTMYNEQPVVTEPPNKQELTDYWKTVWSELKLHNNNTPWIKAEEDKHKRVTEQENSTLTTEEITETIKHTHNWKCPGIDNIQNFWYKQFTTTHEALTHQINKAILQPHTFPTFLTQGITYVKPKSSDTTNPSNYRPITCLPTLYKIITAAISKKIEQRLTDNNIITEEQKGCRKNSRGCKEQLIIDSVIMGQTRKEHRNLHIGYIDYKKAFDSIPHSWLIRALEIYKINQHLRQFLAQIMKTWKTKIHQETQTERIQIEELYIRRGIFQGDSLSALWFCLCLNPLSNILNRTEHGFNIRHQKVNQHKINHLLYMDDIKLYAATKTQLKELLKITEILTLDVNMEFGISKCKVLHINKGQWKYHHETETINNETLDNMFDKETYKYLGFQQSTKLNHTHIKTELRTEFKNRLTKLLQTKLNSKYLTKAINTFAIPILTYSFGIIKWSQTDLENIHILIRSQFTKYRKLHSNACKERLTIERKAGGRGIIDIRSLHTKQIQALRKFFHTKQTSLHTATVKADKNYTPLDLSRVDHPADTHSHIQLQQEKMKTWSEKTLHGKHRYHIEQDHVNKKQSYTWLRDGQLFPETEGFLLAIQDKVILTRNYQKHIIKDPTITEDRCRKCHQQKETIEHITSGCKILAGTEYTARHDSAAKVVHQALATTYKLIENTDPYYKYTPTSVLENKDYKLYWDIGIHIDKTVSANRADITFQCKKERVTYLIDIAVPNDTNIQTKYTEKISKYTDFATEIKRLWKQEKVVIVPLIISATGLTPTTFTPHLVQLGLNTNIHKNIQKSVILKTCNIVRSFLNTQW

SEQ ID NO: 19875 - protein, 1013 aa, Pachyrhynchus sulphureomaculatus
MNHSPPSTTSTQHHPESPLIQTLTAKMESHLARWSGTDPTTRNPIPRLIFRQSTQPILNTLNKHIIPEYITDLSTIEDIHTIIYAAAITTLTQNNQKLPQRQGNPNRTKPKFKWQIRIENKINNIRRDLGHLTQFISGNASKRVTQGANKIKSKSPNRTLPEILDTLKQKLSVYAARLRRYKESNERKDTNNLFRRSEKQFYRKTMYNKQIAVTEPPNKQELTDYWKSIWSEPKLHNNNTPWIKAEEDKHKHVTEQENTTLNTQEITETIKHTHNWKCPGIDNIQNFWYKQFTTTHEALTHQINKAILQPHTFPTFLTQGITYVKPKSSDTTNPSNYRPITCLPTLYKIITATISKKIEQHLTDNNILTEEQKGCRKNSRGCKEQLIIDSVIMGQTRKEHRNLHIGYIDYKKAFDSIPHSWLIRALEIYKINQHLRQFLAQIMKTWKTKIRLETPTERIETEELYIRRGIFQGDSLSAQWFCLCLNPLSNILNRTEHGFNIRHQKVNQHKINHLLYMDDIKLYAATQTQLKELLKTTEIFTLDVNMEFGISKCKVLHINKGQWKCHHETETINNETLDNMFDKETYKYLGFQQSTKLNHTHIKTELRTEFKNRLTKLLQTKLNSKNLTKAINTFAIPVLTYSFGIIKWSQTDIENIHILIRSQFTKYRKLHPNACKERLTIERKAGGRGIIDIRSLHTKQIQTLRKFFHSKQTSLHTATVKADKNYTPLDLARADHSADTHSHTQLQQEKMKTWSEKTLHGKHRYHIEQDHVNKKQSYTWLQDGQLFPETEGFLLAIQDKVILTRNYQKHIIKDPTIAEDRCRKCHQQKETIEHITSGCKILAGTEYTARHDSAAKVVHQALATTYKLIENTDPYYKYTPTSILENEEYKLYWDIGIHTDKTVSANRPDITFQCKKEKVTYLIDIAVPNDTKIQTKYTEKISKYTDLATEIKRLWKQEKVIIAPLIISATGLTPTTFTPHLVQLGLNTNIHKNIQKSVILKTCNIVRSFLNTQ

SEQ ID NO: 19876 - protein, 1521 aa, Pachyrhynchus sulphureomaculatus
MCNKNAILRCLPCREDEWLSVYESRTVPPDTGRPPGVSSLAVASRLCRSRPFFPRILVGNTMLNNNNYNNENGRVLRRRTPVVQTATATPQQQLQTNQTTASVETTPDSFTRSDIIGDGNCLFRAVSLYLYGHQNHHEKLREVALRYLQQNWSELHTFSLIEVDDIKDFNNYYNYMRKNGTYGTSLEILALSETQNSNFHIFSKQRRTRHTKIAFTDRPTIISTGKYNKTIYLLLTGNPMSGHFELLTPQNTENIPENNRPIKEASGERRNGRGRRGKWQLDQNDEDQATENGPAKSVVLATKPTPTKAGKSQQRMSCTTGINEHAMRCCNENTIPSATDVDTGQTQPPKPGQGPYVLQGQHATTKAGKPRQRLKWTDEMNRTVMRCYYTATKLETITSSYRQQLHRLFLTEYPHLQLLVSEQRVVDQKRVITKNNRLTPLELQTIKDTVAVELNTDQPNNRNNKADSEPASHTQPPSRTQQYPPPRRSITQNNIASTAQHHITDNNMNHSPPSTTSTQHHPESPLIQALKAKMESHLARWSGTDPTTRNPIPRLIFRQSTQLILNTLNKHIIPQYITDSSTIEDIHTIIYAAAITTLTQNNQKLPQRQGNPNRTKPKFKWQIRMENKINNIRRDLGHLTQFISGNASKRVTQGANKIKSKSPNRTLPEILDTLKQKLSVYAARLRRYKESNERKDTNNLFRRSEKQFYRKTMYNKQIAVTEPPNKQELTDYWKSIWSEPKQHNNNTPWIKAEEDKHKHVTEQENTTFNTQEITETIKHTHNWKCPGIDNIQNFWYKQFTTTHEALTHQINKAILQPHTFPTFLTQGITYVKPKSSDTTNPSNYRPITCLPTLYKIITATISKKIEQHLTDNNILTEEQKGCRKNSRGCKEQLIIDSVIMGQTRKEHRNLHIGYIDYKKAFDSIPHSWLIRALEIYKINQHLRQFLAQIMKTWKTKIRLETQTERIQTEELYIRRGIFQGDSLSALWFCLCLNPLSNILNRTEHGFNIRHQKVNQHKINHLLYMDDIKLYAATQTQLKELLKITEIFTLDVNMEFGISKCKVLHINKGQWKHHHETETINNETLDNMFDKETYKYLGFQQSTKLNHTHIKTELRTEFKNRLTKLLLTKLNSKNLTKAINTFAIPILTYSFGIIKWSQTDIENIHILIRSQFTKYRKLHPNACKERLTIERKAGGRGIIDIRSLHTKQIQTLRKFFHSKQTSLHTATVKADKNYTPLDLARADHSADTHSHTQLQQEKMKTWSEKTLHGKHRYHIEQDHVNKKQSYTWLRDGQLFPETEGFLLAIQDKVILTRNYQKHIIKDPTIAEDRCRKCHQQKETIEHITSGCKILAGTEYTARHDSAAKVVHQALATTYGLIENTDPYYKYTPTSILENEDYKLYWDIGIHTDKTVSANRPDITFQCKKGKVTYLIDIAVPNDTNIQAKYTEKISKYTDLATEIKRLWRQEKVIIVPLIISATGLTPITFTPHLVQLGLNTDIHRNIQKSVILKTCNIVRSFLNTEW

SEQ ID NO: 19877 - protein, 1097 aa, Pachyrhynchus sulphureomaculatus
MPSHVYAPTTFYELNVNIQRAIIRKYVFERPAASMYIMWPETFAHINIRIIIINIRIRRIINIRIRTQNNIASTAQHHITDNNMNHSPPSTTSTQHHPESPLIQTLKAKMESHLARWSGTDPTTRNPIPRLISRQSTQPILNTLNKHIIPQYITDSSTIEDIHTIIYAAAITALTQNNQKLPQRQGNPNRTKPKFKWQIRIENKINNIRRDLGHLTQFISGNASKRVTQGANKIKSKSPNRTLPEILDTLKQKLSVYAARLRRYKESNERKDTNNLFRRSEKQFYRKTMFNKQIAVTEPPNKQELTDYWKSIWSEPKQHNNNTPWIKAEEDKHKHVTEQENTTFNRQEITETVKHTHNWKCPGIDNIQNFWYKQFTTTHEALTHQINKAILQPHTFPTFLTQGITYVKPKSSDTTNPSNYRPITCLPTLYKIITATISKKIEQHLTDNNILTEEQKGCRKNSRGCKEQLIIDSVIMGQTRKEHRNLHIGYIDYKKAFDSIPHSWLIRALEIYKINQHLRQFLGQIMKTWKTKIRLETQTERIQTEELYIRRGIFQGDSLSALWFCLCLNPLSNILNRTEHGFNIRHQKENQHKINHLLYMDDIKLYAATQTQLKELLKITEIFTLDVNMEFGISKCKVLHINKGQWKHHHETETINNETLDNMFDKETYKYLGFQQSTKLNHTHIKTELRTEFKNRLTKLLQTKLNSKNLTKAINTFAIPILTYSFGIIKWSQTDIENIHILIRSQFTKYRKLHPNACKERLTIERKAGGRGIIDIRSLHTKQIQTLRKFFHSKQTSLHTATVKADKNYTPLDLARADHSADTHSHTQLQQEKMKTWSEKTLHGKHRYHIEQDHVNKKQSYTWLRDGQLFPESEGFLLAIQDKVILTRNYQKHIIKDPTIAEDRCRKCHQQKETIEHITSGCKILAGTEYTARHDSAAKVVHQALATTYRLIENTDPYYKYTPTSILENEDYKLYWDIGIHTDKTVSANRPDITFQCKKGKVTYLIDIAVPNDTNIQAKYTEKISKYTDLATEIKRLWRQEKVIIVPLIISATGLTPITFTPHLVQLGLNTDIHRNIQKSVILKTCNIVRSFLNTEW

SEQ ID NO: 19878 - protein, 1480 aa, Pachyrhynchus sulphureomaculatus
MLNNNNYNNENGRVLRRRTPVVQTATATPQQQLQTNQTTASVETTPDSFTRSDIVGDGNCLFRAVSLYLYGHQNHHEKLREVALRYLQQNWSELHTFSLIEVDDIKDFNNYYNYMRKNGTYGTSLEILALSETQNSNFHIFSKQRRTRHTKITFTDRPTIISTGKYNKTIYLLLTGNPMSGHFELLTPQNTENIPENNRPIKEASGERRNGRGRRGKWQLDQNDEDQATENGPAKSVVLATKPTPTKAGKSQQRMSCTTGINEHAMRCCNENTKPDKEITEKRITRRLDPPTSIPSATDVDTGQTQPPKPGQGPYVLQGQHATTKAGKPRQRLKWTDEMNRTVMRCYYTATKLETITSGYRQQLHRLFLTEYPHLQLLVSEQRVVDQKRVITKNNRLTPLELQTIKDTVAVELNTDQPNNRNNKADSEPASHTQPPSRTQQYPPPRRSITQNNIASTAQHHITDNNMNHSPPSTTSTQHHPESPLIQTLKAKMESHLARWSGTDPTTRNPIPRLIFRQSTQPILNTLNKHIIPQYITDSSTIEDIHTIIYAAAITTLTQNNQKLPQRQGNPNRTKPKFKWQIRIENKINNIRRDLGHLTQFISGNASKRVTQGANKIKSKSPNRTLPEILDTLKQKLSVYAARLRRYKESNERKDTNNLFRRSEKQFYRKTMYNKQIAVTEPPNKQELTDYWKSIWSEPKQHNNNTPWIKAEEDKHKHVTEQENTTFNTQEITETIKHTHNWKCPGIDNIQNFWYKQFTTTHEALTHQINKAILQPHTFPTFLTQGITYVKPKSSDTTNPSNYRPITCLPTLYKIITATISKKIEQHLTDNNILTEEQKGCRKNSRGCKEQLIIDSVIMGQTRKEHRNLHIGYIDYKKAFDSIPHSWLIRALEIYKINQHLRQFLAQIMKTWKTKIRLETQTERIQTEELYIRRGIFQGDSLSALWFCLCLNPLSNILNRTEHGFNIRHQKENQHKINHLLYMDDIKLYAATQTQLKELLKITEIFTLDVNMEFGISKCKVLHINKGQWKHHHETETINNETLDNMFDKETYKYLGFQQSTKLNHTHIKTELRTEFKNRLTKLLQTKLNSKNLTKAINTFAIPILTYSFGIIKWSQTDIENIHILIRSQFTKYRKLHPNACKERLTIERKAGGRGIIDIRSLHTKQIQTLRKFFHSKQTSLHTATVKADKNYTPLDLARADHSADTHSHTQLQQEKMKTWSEKTLHGKHRYHIEQDHVNKKQSYTWLRDGQLFPETEGFLLAIQDKVILTRNYQKHIIKDPTIAEDRCRKCHQQKETIEHITSGCKILAGTEYTARHDSAAKVVHQALATTYRLIENTDPYYKYTPTSILENEDYKLYWDIGIHTDKTVSANRPDITFQCKKGKVTYLIDIAVPNDTNIQAKYTEKISKYTDLATEIKRLWRQEKVIIVPLIISATGLTPITFTPHLVQLGLNTDIHRNIQKSVILKTCNIVRSFLNTEW

SEQ ID NO: 19879 - protein, 1374 aa, Pachyrhynchus sulphureomaculatus
MRKNGTYGTSLEILALSETQNSNFHIFSKQRRTRHTKISFTDRPTIISTRKYSKTIYLLLTGNPMSGHFELLTPQNIENIPDNTRPIKEASGERRNGRGRRGKWQLDQNDEDQAIENGPAKSVVPASKPTPTKAGKSQQRMSCTTGINAHAMRCCDAITPDKEITDKRITRRLDPPPPIPSATDVDAGQIQPPKPGQTAYVLQGQHATTKAGKPRQRLKWTDEMNRTVMRCYYTATKLETVTSGYRLELHRLFLTEYPHLQLLVTEQRVIDQKRVITKNNRLRPFELQTIKDTVAAELNTDQPNNRNSRADTEPVSHTQPPSRKQQDPPPSRSITQNNISMQIASTTRHHITDDKMNDSPPSTTSTQHHPESPLIQTLKAEMQSHLARWSGTDPTTRNPIPRLIFKQSTQTILNTINKHIIPQYITDLGTIEDIHTIIYAAAITTITQNNQKLPQRQRDPNSRKPKFKWQIRIENKISNIRRDLGHLTQFMNGNASKRVTQGVDKIKSKSLNRTLPEIVDTLKQKLSVYAARLRRYKESNERKDTNNLFRRSEKQFYRKTMYNEQTVVIEPPNKQELADYWKTVWSEPKLHNNNTPWIKAEEDKHKRVTEQENSILTTEEITETIKHTHNWKFPGIDNIQNFWYKQFTTTHEALTHQINKAILQPHTFPTFLTQGITYIKPKSSDTTNPSNYRPITCLPTLYKIITATISKKIEQHLIDKNILTEEQKGCRKNSRGCKEQLIIDSVIMGQTRKEHRNLHIGYIDYKKAFDSIPHSWLIRALEIYKINQHLRQFLAQIMKTWKTKIRLETQTERIQTEELYIRRGIFQRDSLSALWFCLCLNPLSNILNRTEHGFNIRHQKVNQHKINHLLYMDDIKLYAATKTQLKELLKITEILTLDVNMEFGISKCKVLHINKGQWKYHHETETINNETLDNMFDKETYKYLGFQQSTKLNHTHIKTELRTEFKNRLSKLLQTKLNSKNLTKAINTFAIPILTYSFGIIKWSQTDIENIHILIRSQFTKYRKLHPNACKERLTIERKAGGRGIIDIRSLHTKQIQALRKFFHTKQTSLHTATVKADKNYTPLDLSRVDHPADTQSHTQLQQEKMKTWSEKTLHGKHRYHIEQDHVNKKQSYTWLRDGQLFPETEGFLLAIQDKVILTRNYQKHIIKDPTITEDRCRKCHQQKETIEHITSGCKILAEAEYTARHDSAAKVVHQALATTYKLIENTDPYYKYTPTSVFENKDYKLYWDISIHTDKTVSANRPDITFQCKKEKVTYLIDIAVPNDTNIQTKYTEKISKYTDLATEIKRLWKQEKVIIVPLIISATGLTPTTFTPHLVQLGLNTNIHKNIQKSVILKTCNIVRSFLNSTMVMRLC

SEQ ID NO: 19880 - protein, 809 aa, Pachyrhynchus sulphureomaculatus
MYNKQIAVTEPPNKQELTDYWKSIWSEPKQHNNNTPWIKAEEDKHKHVTEQENTTFNTQEITETIKHTHNWKCPGIDNIQNFWYKQFTTTHEALTHQINKAILQPHTFPTFLTQGITYVKPKSSDTTNPSNYRPITCLPTLYKIITATISKKIEQHLTDNNILTEEQKGCRKNSQGCKEQLIIDSVIMGQTRKEHRNLHIGYIDYKKAFDSIPHSWLIRALEMYKINQHLRQFLAQIMKTWKTKIRLETQTERIQTEELYIRRGIFQGDSLSALWFCLCLNPLSNILNRTEHGFNIRHQKVNQHKINHLLYMDDIKLYAATQTQLKELLKITEIFTLDVNMEFGISKCKVLHINKGQWKHHHETETINNETLDNMFDKETYKYLGFQQSTKLNHTHIKIELRTEFKNRLSKLLQTKLNSKNLTKAINTFVIPILTYSFGIIKWSQTDIENIHILIRSQFTKYRKLHPNACKERLTIERKAGGRGIIDIRSLHTKQIQTLRKFFHSKQTSLHTATVKADKNYTPLDLARADHSADTHSHTQLQQEKMKTWSEKTLHGKHRYHIEQDHVNKKQSYTWLRDGQLFPETEGFLLAIQDKVILTRNYQKHIIKDPTIAEDRCRKCHQQKETIEHITSGCKILAGTEYTARHDSAAKVVHQALATTYRLIENTDPYYKYTPTSILENEDYKLYWDIGIHTDKTVSANRPDITFQCKKGKVTYLIDIAVPNDTNIQTKYTEKISKYTDLATEIKRLWKQEKVIIVPLIISATGLTPITFTPHLVQLGLNTNIHKNIQKSVILKTCNIVRSFLNTEW

SEQ ID NO: 19881 - protein, 1302 aa, Pachyrhynchus sulphureomaculatus
MSGHFELLTPQNTENIPENNRPIKEASGERRNGRGRRGKWQLDQNDEDQATENGPAKSVVLATKPTPTKAGKSQQRMSCTTGINEHAMRCCNENTKPDKEITEKRITRRLDPPTSIPSATDVDTGQTQPPKPGQGPYVLQGQHATTKAGNPRQRLKWTDEMNMTVMRCYYTATKLETITSGYRQQLHRLFLTEYPHLQLLVSEQRVVDQKRVITKNNRLTPLELQTIKDTVAVELNTDQPNNRNNKADSEPASHTQPPSRTQQYPPPRRSITQNNIASTAQHHITDNDMNHSPPSTTSTHHPESPLIQTLKAKMESHLARWSGTDPTTRNPIPRLIFRQSTQPILNTLNKHIIPQYITDSSTIEDIHTIIYAAAITTLTQNNQKLPQRQGNPNRTKPKFKWQIRIENKINNIRRDLGHLTQFISGNASKRVTQGANKIKSKSPNRTLPEILDTLKQKLSVYAARLRRYKESNERKDTNNLFRRSEKNSFYRKTMYNKQIAVTEPPNKQELTDYWKSIWSEPKQHNNNTPWIKAEEDKHKNVTEQENTTFNTQEITETIKHTHNWKCPGIDNIQNFWYKQFTTTHEALTHQINKAILQPHTFPTFLTQGITYVKPKSSDTTNPSNYRPITCLPTLYKIITATISKKIEQHLTDNNILTEEQKGCRKNSRGCKEQLIIDSVIMGQTRKEHRNLHIGYIDYKKAFDSIPHSWLIRALEIYKINQHLRQFLAQIMKTWKTKIRLETQTERIQTEELYIRRGIFQGDSLSALWFCLCLNPLSNILNRTEHGFNIRHQKENQHKINHLLYMDDIKLYAATQTQLKELLKITEIFTLDVSMEFGISKCKVLHINKGQWKHHHETETINNETLDNMFDKETYKYLGFQQSTKLNHTHIKTELRTEFKNRLTKLLQTKLNSKNLTKAINTFAIPILTYSFGIIKWSQTDIENIHILIRSQFTKYRKLHPNACKERLTIERKAGGRGIIDIRSLHTKQIQTLRKFFHSKQTSLHTATVKADKNYTPLDLARADHSADTHSHTQLQQEKMKTWSEKTLHGKHRYHIEQDHVNKKQSYTWLRDGQLFPETEGFLLAIQDKVILTRNYQKHIIKDPTIAEDRCRKCHQQKETIEHITSGCKILAGTEYTARHDSAAKVVHQALATTYKLIENTDPYYKYTPTSILENEDYKLYWDIGIHTDKTVSANRPDITFQCKKGKVTYLIDIAVPNDTNIQAKYTEKISKYTDLATEIKRLWRQEKVIIVPLIISATGLTPITFTPHLVQLGLNTDIHRNIQKSVILKTCNIVRSFLNTEW

SEQ ID NO: 19882 - protein, 1479 aa, Pachyrhynchus sulphureomaculatus
MLKNNNYNNENGRVLRRRTPVVQTAIATPQQQQLQTNQTTASVETTPDSFTRSDIVGDGNCLFRAVSLHLYGHQNHHEKLREVALRYLQQNWSELHTFSLIEVDDIKDFNNYYNYMRKNGTYGTSLEILALSKTQNSNFHIFSKQRRTRHTKITFTDRPTIISTGKYNKTIYLLLTGNPMSGHFELLTPQNIENIPENNRPIKEASGERRNGRGRRGKWQLDQNDEDQATENGPAKSVVSATKPTPTKAEKSQQRMSCTTGINEHAMRCCNENTKPDKEITEKRITRRLDPPTSIPSTTDVDTGQTQPPKPGQGSYVLQGQHATTKAGKPRQRLKWTDEMNRTVMRCYYTATKLETITSGYRQQLHRLFLTEYPRLQLLVSEQRVIDQKRVITKNNCLTPLELQTIKDTVAVELNTDQPNNRNNKPDSEPASHTQPPSRTQQYPPPRRSIRQNNIASTAQHHITDNNMNHSPPSTTSTQHHPESPLIQTLKAKMESHLARWSGTDPTTRNPIPRLIFRQSTQPILNTLNKHIIPQYITDLSTIEDIHTIIYAAAITTLTQNNQKLPQRQGNPNRTKPKFKWQIRIENKINNIRRDLGHLTQFISGNASKRVTQGANKIKSKSPNRTLPEILDTLKQKLSVYAARLRRYKESNERKDTNNLFRRSEKQFYRKTMYNRQIAVTEPPNKQELTDYWKSIWSEPKLHNSNTPWIKAEEDKHKHVTEQENTTFNTQEITETIKHTHNWKCPGIDNIQNFWYKQFTTTHEALTHQINKAILQPHTFPTFLTQGITYVKPKSSDTTNPSNYRPITCLPTLYKIITATISKKIEQHLTDNNILTEEQKGCRKNSRGCKEQLIIDSVIMGQTRKEHRNLHIGYIDYKKAFDSIPHSWLIRALEIYKINQHLRQFLAQIMKTWKTKIRLETQTERIQTEELYIRRGIFQGDSLSALWFCLCLNPLSNILNRTEHGFNIRHQKVNQYKINHLLYMDDIKLYAAIQTQLKELLKITEIFTLDVNMEFSISKCKVLHINKGQWKCHHETETINNETLDNMFDKETYKYLGFQQSTKLNHTHIKTELRTEFKNKLTKLLQTKVNSKNLTKAINTFAIPILTYSFGIIKWSQTDIENIHILIRSQFTKYRKLHPNACKERLTIERKAGGRGIIDIRSLHTKQIQTLRKFFHSKQTSLHTATVKADKNYTPLELARADRSADTHSHTQLQQEKMKTWSEKTLHGTHRYHIEQDHVNKKQSYTWLRDGQLFPETEGFLLAIQDKVILTRNYQKHIIKDPTIAEDRCRKCHQQKETIEHITSGCRILAGTEYTARHDSAAKVVHQALATTYKLIENTDPYYKYTPTSILENEDYKLYWDISIHTDKTVSANRPDITFQCKKGKVTYLIDIAVPNDTNIQTKYTEKISKYTDLATEIKRLWKQEKVIIVPLIISATGLTSITFTPHLVQLGLNTNIHKNIQKSVILKTCNIVRSFLNT

SEQ ID NO: 19883 - protein, 1301 aa, Pachyrhynchus sulphureomaculatus
MSGHFELLTPQNTENIPENNRPIKEASGERRNGRGRRGKWQLDQNDEDQATENGPAKSVVLATKPTPTKAGKSQQRMSCTTGINEHAMRCCNENTKPDKEITEKRITRRLDPPTSIPSATDVDTGQTQPPKPGQGPYVLQGQHATTKAGKPRQRLKWTDEMNRTVMRSYYTATKLETITSGYRQQLHRLFLTEYPHLQLLVSEQRVVDQKRVITKNNRLTPLELQTIKDTVAVELNTDQPNHRNSKADSEPASHTQPPSRTQQYPPPRRSITQNNIASTAQHHITDNNMNHSPPSTTSTQHHPESPLIQTLKAKMESHLARWSGTDPTTRNPIPRLIFRQSTQPILNTLNKHIIPQYITDSSTIEDIHTIIYAAAITTLTQNNQKLPQRQGNPDRTKSKFKWQIRIENKINNIRRDLGHLTQFISGNASKRVTQGANKIKSKSPNRTLPEILDTLKQKLSVYAARLRRYKESNERKDTNNLFRRSEKQFYRKTMYNKQIAVTEPPNKQELTDYWKSIWSEPKQHNNNTPWIKAEEDKHKHVTEQENTTFNTQEITETIKHTHNWKCPRIDNIQNFWYKQFTTTHEALTHQINKAILQPHTFPTFLTQGITYVKPKSSDTTNLSNYRPITCLPTLYKIITATISKKIEQHLTDNNILTEEQKGCRKNSRGCKEQLIIDSVIMGQTRKEHRNLHIGYIDYKKAFDSIPHSWLIRALEIYKINQHLRQFLAQIMKTWKTKIRLETQTERIQTEELYIRRGIFQGDSLSALWFCLCLNPLSNILNRTEHGFNIRHQKVNQHKINHLLYMDDIKLYAATQTQLKELLKTTEIFTLDVNMEFGISKCKVLHINKGQWKCHHETETINNETLDNMFDKETYKYLGFQQSTKLNHTHIKTELRTEFKNRLTKLLQTKLNSKNLTKAINTFAIPVLTYSFGIIKWSQTDIENIHILIRSQFTKYRKLHPNACKERLTIERKAGGRGIIDIRSLHTKQIQTLRKFFHSKQTSLHTATVKADKNYTPLDLARADHSADTHSHTQLQQEKMKTWSEKTLHGKHRYHIEQDHVNKKQSYTWLQDGQLFPETEGFLLAIQDKVILTRNYQKHIIKDPTIAEDRCRKCHQQKETIEHITSGCKILAGTEYTTRHDSAAKVVHQALATTYKLIENTDPYYKYTPTSILENEEYKLYWDIGIHTDKTVSANRPDITFQCKKGKVTYLIDIAVPNDTNIQTKYTEKISKYTDLATEIKRLWKQEKVIIVPLIISATGLTPTTFTPHLVQLGLNTNIHKNIQKSVILKTCNIVRSFLNTQ

SEQ ID NO: 19884 - protein, 1477 aa, Pachyrhynchus sulphureomaculatus
MSKNNNYSNDNGRVLRRRTPVVQTAIATPQQQQPQTTQTTASAVTTPDSFTRSDIVGDGNCLFRAVSLHLYGHQNHHEKLREVALRYLQQNWSELHTFSLIEVDDIKDFNNYYNYMRKNGTYGTSLEILALSETQNSNFHIFSKQRRTRHTKITFTDRPTIISTGKYNKTIYLLLTGNPMSGHFELLTPQNIPDNSRPIKEASGERRNGRGRRGKWQLDQNDEDQATENGPAQSVVPASKPTPTKAGKSQQRMSCTTGINEHAMRCCNEITPDKEITDKRITRRLDPPPPIPSATDVNAGQIQPPKPGQTAYVLQGQHATTKAGKPRQRLKWTDEMNKTVMRCYYTATKLETVTSGYRLELHRLFLTEYPHLQLLVTEQRVIDQKRVITKNNRLTPFELQTIKDTVAAELNADQVAAELNTDQLNNRNSRADTEPISHTQPPSRKQQDPPPSRSITQNNISEQIASTTRHSTTSIQHHPESPLIQTLKAEMQSHLARWSGTDPTTRNPIPRLIFKQSTQMILNTINKHIIPQYITDLSTIEDIHTIIYAAAITTITQNNQKLLQRQRDPNSRKPKFKWQIRIENKINNIRRDLGHLTQFMNGNASKRVTQGVDKIKSKSLNRTLPEIVDNLKQKLSVYAARLRRYKESNERKDTNNLFRRSEKQFYRKTMYNEQTVVTEPPNKQELADYWKTVWSESKLHNNNTSWIKAEEDKHKRVTEQENSTLTTEEITETIKHTHNWKCPGIDNIQNFWYKQFTTTHEALTHQINKAILQPHTFPTFLTQGITYVKPKSSDTTNPSNYRPITCLPTLYKIITAAISKKIEQHLTDNSIIAEEQKGCRKNSRGCKEQLIIDSVIMGQTRKEHRNLHIGYIDYKKAFDSIPHSWLIRALEIYKINQHLRQFLAQIMKTWKTKIRLETQTERIQTEELYIRRGIFQGDSLSALWFCLCLNPLSNILNRTEHGFNIRHQKGNQHKINHLLYMDDIKLYAATKTQLKELLKITEIFTLDVNMEFGISKCKVLHINKGQWKYHHETETINNETLDNMFDKETYKYLGFQQSTKLNHTHIKTELRTEFKNRLTKLLQTKLNSKYLTKAINTFAIPILTYSFGIIKWSQTDLENIHILIRSQFTKYRKLHPNACKERLTIERKAGGRGIIDIRSLHTKQIQALRKFFHTKQTSLHTATVKADKNYTPLDLSRVDHPADTHSHIQLQQEKMKTWSGKTLHGKHRYHIEQDHVNKKQSYTWLRDGQIFPETEGFLLAIQDKVILTRNYQKHIIKDPTITEDRCRKCHQQKETIEHITSGCKILAGTEYTARHDSAAKVVHQALATTYKLIENTDPYYKYTPTSVLENKDYKLYWDISIHTDKTVSANRPDITFQCKKEKVTYLIDIAVPNDTNIQTKYTEKISKYTDLATEIKRLWKQEKVIIVPLIISATGLTPTTFTPHLVQLGLNTNIHKNIQKSVILKTCNIVRSFLNTQ

SEQ ID NO: 19885 - protein, 1226 aa, Pachyrhynchus sulphureomaculatus
MSCTTGINEHAMRCCNENTKPDKEITEKRITRRLDPPTSIPSATDVDTGQTQPPKPGQGPYVLQGQHATTKAGKPRQRLKWTDEMNRTVMRCYYTATKLETITSGYRQQLHRLFLTEYPHLQLLVSEQRVMDQKRVITKNNRLTPLELQTIKDTVAVELNTDQPNNRNNKADSEPASHTQPPSRTQQYSPPRRSITQNNIASTAQHHITDNNMNHSPPSTTSTQHHPESPLIQTLKAKMESHLARWSGTDPTTRNPIPRLIFRQSTQPILNTLNKHIIPQYITDLSTIEDIHTIIYAAAITTLTQNNQKLPQRQGNPNRTKPKFKWQIRIENKINNIRRDLGHLTQFISGNASKRVTQGANKIKSKSPNRTLPEILDTLKQKLSVYAARLRRYKESNERKDTNNLFRRSEKQFYRKTMYNKQIAVTEPPNKQELTDYWKSIWSEPKLHNNNTPWIKAEEDKHKHLTEQENTTFNTQEITETIKHTHNWKCPGIDNIQNFWYKQFTTTHEALTHQINKAILQPHTFPTFLTQGITYVKPKSSDTTNPSNYRPITCLPTLYKIITATISKKIEQHLTDNNILTEEQKGCRKNSRGCKEQLIIDSVIMGQTRKEHRNLHIGYIDYKKAFDSIPHSWLIRALEIYKINQHLRQFLAQIMKTWKTKIRLETQTEQIQTEELYIRRGIFQGDSLSALWFCLCLNPLSNILNRTEHGFNIRHQKVNQHKINHLLYMDDIKLYAATQTQLKELLKITEIFTLDVNMEFGISKCKVLHINKGQWKCHHETETINNETFDNMFDKETYKYLGFQQSTKLNHTHIKTELRTEFKNRLTKLLQTKLNSKNLTKAINTFAIPILTYSFGIIKWSRTDIENIHILIRSQFTKYRKLHPNACKERLTIERKAGGRGIIDIRSLHTKQIQALRKFFHSKQTSLHTATVKADKNYTPLDLSRADHSADTHSHTQLQQEKMKTWSEKTLHGKHRYHIEQDHVNKKQSYTWLQDGQLFPETEGFLLAIQDKVILTRNYQKHIIKDPTIAEDRCRKCHQQKETIEHITSGCRILAGTEYTARHDSAAKVVHQALATTYKLIENTDPYYKYTPTSILENGDYKLYWDISIHTDKTVSANRPDITFQCKKGKVTYLIDIAVPNDTNIQTKYTKKISKYTDLATEIKRLWKQEKVIIVPLIISATGLTPTTFTPHLEQLGLNTNIHKNIQKSVILKTCNIVRSFLNIQW

SEQ ID NO: 19886 - protein, 1466 aa, Pachyrhynchus sulphureomaculatus
MLNNNNYNNENGRVLRRRTPVVQTATATPQQQQLQTNQTTASVETTPYSFTRSDIVGDGNCLFRAVSLHLYGHQNHHEKLREVALRYLQQNWSELHTFSLIEVDDIKDFNNYYNYMRKNGTYGTSLEILALSETQNSNFHIFSKQRRTRHTKITFTDRPTIISTGKYNKTIYLLLTGNPMSGHFELLTPQNIENIPENNRPIKEASGERRNGRGRRGKWQLDQNDEDQATKNGPAKGVVSATKPTPTKAGKAQQRMSCTTGINEHAMRCCNKNTKPDKEITEKRITRRLDPPTSIPSATDVDTGQTQPPKTGQGPFLQGQHATTKAGKPRQRLKWTDEMNRTVMRCYYTATKLETITSGYRPELHRLFLTEYPHLQLLVSEQRVIDQKRVITKNNRLTPLELQIIKDTVAVELNTDQPNNRNNRADSEPASHTQPPSRTQQDPPPRRSITQNNIATTAQHHITDNNMNHSPPSTTSTHHPGSPLIQTLKEKMESYLARWSGTDPTTRNPIPRLIFRQSTQPILNTLNKHIIPQYITDLSTIEDIHAIIYAAAITTLTQNNQKLPQRQGNPNRTKPKFKWQIRIENKINNIRRDLGHLTQFIRGNASKRVTQGANKIKSKSPNRTLPEILNTLKQKLSVYAARLRRYKESNERKDTNNLFQRSEKQFYRKTMYNKQIAVTEPASKQELTDYWKSIWSEPKLHNNNTPWIKAEEDKHKHVTEQENSTLTTEEITETIKHTHNWKCPGIDNIQNFWYKQFTTTHEALTHQINKAILQPHTFRTFLTQGITYVKPKSSDTTNPSNYGPITCLPTLYKIITATISKKIEQHLTDNNILTEEQKGCRKNSRGCKEQLIIDSVIMGQTRKEHRNLHIGYIDYKKAFDSIPHSWLIRVLEIYKINQHLRQFLAQIMKTWKTKIRLETQTERIQTEELYIRRGIFQGDSLSALWFCLCLNPLSNILNRTEHGFGIRHQRVNQHKINHLLYMDDIKLYAATQTQLKELLKITEIFTLDVNMEFGISKCKVLHINKGQWKCHHETETINNETLDNMFDKETYKYLGFQQSTKLNHTHIKTELRTEFKNRLTKLLQTKLNSKNLTKAINTFAIPILTYSFGIIKWSQTDIENIHILIRSQFTKHRKLHPNACKERITIARKAGGRGIIDIRSLHTKQIQTLRKFFHSKQTSLHTVTVKADKNYTPLDLARADHSADTHSHTQLQQEKMKTWSEKTLHGKHRYHIEQDHVNKKQSYTWLQDGQLFPETEGFLLAIQDKVILTRNYQKHIIKDPTIAEDRCRKCHQQKETIEHITSGCKILAGTEYTARHDSAAKVVHEALATTYRLIENTDPYYKYTPTSILENEDYKLYWDIGIHTDKTVSADRPDVTFQCKKGKVTYLKYTEKISKYTDLATEIKRLWRQEKVIIVPLIISVTGLTPITFTPHLVQLGLNTDIHRNIQKSVILKTCNIVRSFLNTEW

SEQ ID NO: 19887 - protein, 1480 aa, Pachyrhynchus sulphureomaculatus
MLNNNNYNNENGRVLRRRTPVVQTATATPQQQLQTNQTTASVETTPDSFTRSDIVGDGNCLFRAVSLYLYGHQNHHEKLREVALRYLQQNWSELHTFSLIEVDDIKDFNNYYNYMRKNGTYGTSLEILALSETQNSNFHIFSKQRRTRHTKITFTDRPTIISTGKYNKTIYLLLTGNPMSGHFELLTPQNTENIPENNRPIKEASGERRNGRGRRGKWQLDQNDEDQATENGPAKSVVLATKPTPTKAGKSQQRMSCTTGINEHAMRCCNENTKPDKEITEKRMTRRLDPPTSIPSATDVDTGQTQPPNPGQGPYVLQGQHATTKAGKPRQRLKWTDEMNRTVMRCYYTATKLETITSAYRQQLHRLFLTEYPHLQLLVSEQRVVDQKRVITKNNRLTPLELQTIKDTVAVELNTDQPNNRNNKADSEPASHTQSPSRTQQYPPPRRSITQNNIASTAQHHITDNNMNHSPPSTTSTQHHPESPLIQTLKAKMESHLARWSGTDPTTRNPIPRLIFRQSTQPILNTLNKHIIPQYITDSSTIEDIHTIIYAAAITTLTQNNQKLPQRQGNPNRTKPKFKWQIRIENKINNIRRDLGHLTQFISGNASKRVTQGANKIKSKSPNRTLPEILDTLKQKLSVYAARLRRYKESNERKDTNNLFRRSEKQFYRKTMYNKQIAVTEPPNKQELTDYWKSIWSEPKQHNNNTPWIKAEEDKHKHVTEQENTTFNTQEITETIKHTHNWKCPGIDNIQNFWYKQFTTTHEALTHQINKAILQPHTFPTFLTQGITYVKPKSSDTTNPSNYRPITCLPTLYKIITATISKKIEQHLTDNNILTEEQKGCRKNSRGCKEQLIIDSVIMGQTRKEHRNLHIGYIDYKKAFDSIPHSWLIRALEIYKINQHLRQFLAQIMKTWKTKIRLETQTEWIQTEELYIRRGIFQGDSLSALWFCLCLNPLSNILNRTEHGFNIRHQKVNQHKINHLLYMDDIKLYAATQTQLKELLKITEIFTLDVNMEFGISKCKVLHINKGQWKHHHETEAINNETLDNMFDKETYKYLGFQQSTKLNHTHIKTELRTEFKNRLTKLLQTKLNSKNLTKAINTFAIPILTYSFGIIKWSQTDIENIHILIRSQFTKYRKLHPNACKERLTIERKAGGRGIIDIRSLHTKQIQTLRKFFHSKQTSLHTATVKADKNYTPLDLARADHSADTHSHTQLQQEKMKTWSEKTLHGKHRYHIEQDHVNKKQSYTWLRDGQLFPETEGFLLAIQDKVILTRNYQKHIIKDPTIAEDRCRKCHQQKETIEHITSGCKILAGTEYTARHDSAAKVVHQALATTYRLIENTDPYYKYTPTSILENEDYKLYWDIGIHTDKTVSANRPDITFQCKKGKVTYLIDIAVPNDTNIQAKYTEKISKYTDLATEIKRLWRQEKVIIVPLIISATGLTPITFTPHLVQLGLDTDIHRNIQKSVILKTCTIVRSFLNTEW

SEQ ID NO: 19888 - protein, 878 aa, Pachyrhynchus sulphureomaculatus
MNGNASKRVTQGVDKIKSKSLNRTLPEIVDTLKQKLSVYAARLRRYKESNERKETNNHFRRSEKQFYRKTMYNEQTVVTEPPNKQELADYWKTVWSEPKLHNNNTSWIKAEEDKHKRVTEQENSTLTTEEITETIKHTHNWKCPGIDNIQNFWYKQFTTTHEALTYQINKAILQPHAFPTFLTQGITYVKPKSSDTTNPSNYRPVTCLPTLYKIITAAISKKIEQHLTDNNIITEEQKGCRKNSRGCKEQLIIDSVIIGQTRKEHRNLHIGYIDYKKAFDSIPHSWLIRALEIYKINQHLRQFLAQIMKTWKTKIRLETQTERIQTEELYIRQGIFQGDSLSALWFCLCLNPLSNILNRTEHGFNIRHQKGNQHKINHLLYMDDIKLYAATKTQLKELLKITEIFTLDVNMEFGISKCKVLHINKGQWKYHHETETINNETLDNMFDKETYKYLGFQQSTKLNHTHIKTELRTEFKNRLTKLLQTKLNSKYLTKAINTFAIPILTYSFGIIKWSQTDLENIHILIRSQFTKYRKLHPNACKERLTIERKAGGRGIIDIRSLHTKQIQALRKFFHTKQTSLHTATVKADKNYTPLDLSRVDHPADTHSHIQLQQEKMKTWSEKTLHGKHRYHIEQDHVNKKQSYTWLRDGQLFPETEGFLLAIQDKVILTRNYQKHIIKDPTITEDRCRKCHQQKETIEHITSGCKILAGTEYTARHDSAAKVVHQALATTYKLIENTDPYYKYTPTSVLENKDYKLYWDISIHTDKTVSANRPDITFQCKKEKVTYLIDIAVPNDTNIQTKYTEKISKYTDLATEIKRLWKQEKVIIVPLIISATGLTPTTFTPHLVQLGLNTNIHKNIQKSVILKTCNIVRSFLNTQ

SEQ ID NO: 19889 - protein, 1256 aa, Pachyrhynchus sulphureomaculatus
MKTRQPKMDLPKVLCWRLSRHPPRREKSQQRMSCTTGINEHAMRCCNENTKPDKEITEKRITRRLDPPTSIPSATDVDTGQTQPPKPGQGPYVLQGQHATTKAGKPRQRLKWTDEMNRTVMRCYYTATKLETITSGYRQQLHRLFLTEYPHLQLLVSEQRVVDQKRVITKNNRLTPLELQTIKDTVAVELNTDQPNNRNNKADSEPASHTQPPSRTQQYPPPRRSITQNNIASTAQHHITDNNMNHSPPSTTSTQHHPESPLIQTLKAKMESHLARWSGTDPTTRNPIPRLIFRQSTQPILNTLNKHIIPQYITDSSTIEDIHTIIYAAAITTLTQNNQKLPQRQGNPNRTKPKFKWQIRIENKINNIRRDLGHLTQFISGNASKRVTQGANKIKSKSPNRTLPEILDTLKQKLSVYAARLRRYKESNERKDTNNLFRRSEKQFYRKTMYNKQIAVTEPPNKQELTDYWKSIWSEPKQHNNNTPWIKAEEDKHKHVTEQENTTFNTQEITETIKHTHNWKCPGIDNIQNFWYKQFTTTHEALTHQINKAILQPHTFPTFLTQGITYVKPKSSDTTNPSNYRPLTCLPTLYKIITATISKKIEQHLTDKNILTEEQKGCRKNSRGCKEQLIIDSVIMGQTRKEHRNLHIGYIDYKKAFDSIPHSWLIRALEIYKINQHLRQFLAQIMKTWKTKIRLETQTERIQTEELYIRRGIFQGDSLSALWFCLCLNPLSNILNRTEHGFNIRHQKENQHKINHLLYMDDIKLYAATQTQLKELLKITEIFTLDVNMEFGISKCKVLHINKGQWKHHHETETINNETLDNMFDKETYKYLGFQQSTKLNHTHIKTELRTEFKNRLTKLLQTKLNSKNLTKAINTFAIPILTYSFGIIKWSQTDIENIHILIRSQFTKYRKLHPNACKERLTIERKAGGRGIIDIRSLHTKQIQTLRKFFHSKQTSLHTATVKADKNYTPLDLARADHSADTHSHTQLQQEKMKTWSEKTLHGKHRYHIEQDHVNKKQSYTWLQDGQLFPETEGFLLAIQDKVILTRNYQKHIIKDPTIAEDRCRKCHQQKETIEHITSGCKILAGTEYTARHDSAAKVVHQALATTYKLIENTDPYYKYTPTSILENEDYKLYWDIGIHTDKTVSANRPDITFQCKKEKVTYLIDIAVPNDTNIQTKYTEKISKYTDLATEIKRLWKQEKVIIVPLIISATGLTPTTFTPHLVQLGLNTNIHKNIQKSVILKTCNIVRSFLNTQ

SEQ ID NO: 19890 - protein, 1480 aa, Pachyrhynchus sulphureomaculatus
MLNNNNYNNENGRVLRRRTTVVQTATATPQQQLQTNQTTASVETTPDSFTRSDIVGDGNCLFRAVSLYLYGHQNHHEKLREVALRYLQQNWSELHAFSLIEVDDIKDFNNYYNYMRKNGTYGTSLEILALSETQNSNFHIFSKQRRTRHTKITFTDRPTIISTGKYNKTIYLLLTGNPMSGHFELLTPQNTENIPENNRPIKEASGERRNGRGRRGKWQLDQNDEDQATENGPAKSVVLATKPTPTKAGKSQQRMSCTTGINEHAMRCCNENTKPDKEITEKRITRRLDPPTSIPSATDVDTGQTQPPNPGQGPYVLQGQHATTKAGKPRQRLKWTDEMNRTVMRCYYTATKLETITSGYRQQLHRLFLTEYPHLQLLVSEQRVVDQKRVITKNNRLTPLELQTIKDTVAVELNTDQPNNRNNKADSEPASHTQPPSRTQQYPPPRRSITQNNIASTAQHHIIDNNMNHSPPSTTSTQHHPESPLIQTLKAKMESHLARWSGTDPTTRNPIPRLIFRQSTQPILNTLNKHIIPQYITDSRTIEDIHTIIYAAAITTLTQNNQKLPQRQGNPNRTKPKFKWQIRIENKINNIRRDLGHLTQFISGNASKRVTQGANKIKSKSPNRTLPEILDTLKQKLSVYAARLRRYKESNERKDTNNLFRRSEKQFYRKTMYNRQIAVTEPPNKQELTDYWKSIWSEPKQHNNNTPWIKAEEDKHKHVTEQENTTFNTQEITETIKHTHNWKCPGIDNIQNFWYKQFTTTHEALTHQINKAILQPHTFPTFLTQGITYVKLKSSDTTNPSNYRPITCLPTLYKIITATISKKIEQHLTDNNILTEEQKGCRKNSRGCKEQLIIDSVIMGQTRKEHRNLHIGYIDYKKAFDSIPHSWLIRALEIYKINQHLRQFLAQIMKTWKTKIRLETHTERIQTEELYIRRGIFQGDSLSALWFCLCLNPLSNILNRTEHGFNIRHQKENQHKINHLLYMDDIKLYAATQTQLKELLKITEIFTLDVNMEFGISKCKVLHINKGQWKHHHETESINNETLDNMFDKETYKYLGFQQSTKLNHTHIKTELRTEFKNRLTKLLQTKLNSKNLTKAINTFAIPILTYSFGIIKWSQTDIENIHILIRSQFTKYRKLHPNACKERLTIERKAGGRGIIDIRSLHTKQIQTLRKFFHSKQTSLHTATVKADKNYTPLDLARADHSADTHSHTQLQQEKMKTWSEKTLHGKHRYHIEQDHVNKKQSYTWLRDGQLFPETEGFLLAIQDKVILTRNYQKHIIKDPTIAEDRCRKCHQQKETIEHITSGCKILAGTEYTARHDSAAKVVHQALATTYRLIENTDPYYKYTPTSILENEDYKLYWDIGIHTDKTVSANRPDITFQCKKGKVTYLIDMAVPNDTNIQAKYTEKIYKYTDLATEIKRLWRQEKVIIVPLIISATGLTPITFTPHLVQLGLNTDIHRNIQKSVILKTCNIVRSFLNTEW

SEQ ID NO: 19891 - protein, 1301 aa, Pachyrhynchus sulphureomaculatus
MSGHFELLTPQNVENIPDNSRPIKEASGERRNGRGRRGKWQLDQNDEDQATENGPAQSVVPASKPTPTKAGESQQRMSCTTGINEHAMRCCNEITPDKEITDKRITRRLDQPPPIPSATEVNAGQIQPPKPGQTAYVLQGQHATTKAGKPRQRLKWTDEMNKTVMRCYYTATKLETVTSGYRLELHRLFLTEYPHLQLLVTEQRVIDQKRVITKNNRLTPFELQTIKDTVAAELNADQVAAELNTDQLNNRNDRADTEPISHTQPPSRKQQDPPPSRSITQNNISNQIPSTTRHSTTSIQHHPESPLIQTLKAQMQSHLARWSGTDPTTRNPIPRLIFKQSTQMILNTINKHIIPQYITDLSTIEDIHTIIYAAAITTITQNNQKLPQRQRDPNSRKPKFKWQIRIENKINNIRRDLGHLTQFMNGNASKRVTQGVDKIKSKSLNRTLPEIVDTLKQKLSVYAARLRRYKESNERKDTNNLFRRSEKQFYRKTMYNEQTVVTEPPNKQELADYWKTVWSEPKLHNNNTSWIKAEEDKHKRVTEQENSTLTTEEITETIKHTHNWKCPGIDNIQNFWYKQFTTTHEALTYQINKAILQPHTFPTFLTQGITYVKPKSSDTTNPSNYRPITCLPTLYKIITAAISKKIEQHLTDNNIITEEQKGCRKNSRGCKEQLIIDSVIMGQTRKEHRNLHIGYIDYKKAFDSIPHSWLIRALEIYKINQHLRQFLAQIMKTWKTKIRLETQTERIQTEELYIRRGIFQGDSLSALWFCLCLNPLSNILNRTEHGFNIRHQKGNQHKINHLLYMDDIKLYAATKTQLKELLKITEIFTLDVNMEFGISKCKVLHINKGQWKYHHETETINNETLDNMFDKETYKYLGFQQSTKLNHTHIKTELRTEFKNRLTKLLQTKLNSKYLTKAINTFAIPILTYSFGIIKWSQTDLENIHILIRSQFTKYRKLHPDACKERLTIERKAGGRGIIDIRSLHTKQIQALRKFFHTKQTSLHTATVKADKNYTPLDLSRVDHPADTHSHIQLQQEKMKTWSEKTLHGKHRYHIEQDHVNKKQSYTWLRDGQLFPETEGFLLAIQDKVILTRNYQKHIIKDPTITEDRCRKCHQQKETIEHITSGCKILAGTEYTARHDSAAKVVHQALATTYKLIENTDPYYKYTPTSVLENKDYKLYWDISIHTDKTVSANRPDITFQCKKEKVTYLIDIAVPNDTNIQTKYTEEISKYTDLATEIKRLWKQEKVIIVPLIISATGLTPTTFTPHLVQLGLNTNIHKNIQKSVILKTCNIVRSFLNTQ

SEQ ID NO: 19892 - protein, 1014 aa, Pachyrhynchus sulphureomaculatus
MNHSPPSTTSTQHHPESPLIQTLKAKMESHLARWSGTDPTTRNPIPRLIFRQSTQPIVNTLNKHIIPQYITDLSTIEDIHTIIYAAAITTLTQNNQKLPQRQGNPNRTKPKFKWQIRIENKINNIRRDLGHLTQFISGNASKRVTRGANKIKSKSPNRTLPEILDTLKQKLSVYAARLRRYKESNERKDTNNLFRRSEKQFYRKTIYNKQIAVTEPPNEQELTDYWKSIWSEPKLHNNNTPWIKAEEDKHKHVTEQENTTFNTQEITETIKHTHNWKCPGIDNIQNFWYKQFTTTHEALTHQINKAILQPHTFPTFLTQGITYVKRKSSDTTNPSNYRPITCLPTLYKIITATISKKIEQHLTDNNILTEEQKGCRKNSRGCKEQLIIDSVIMGQTRKEHRNLHIGYIDYKKAFDSIPHSWLIRALEIYKINQHLRQFLAQIMKTWKTKIRLETQTERIQTEELYIRRGIFQGDSLSALWFCLCLNPLSNILNRTEHGFNIRHQKVNQHKINHLLYMDDIKLYAATQTQLKELLKITEIFTLDVNMEFGISKCKVLHINKGQWKCHHETETINNVTLVNMLDKETYKYLGFQQSTKLNHTHIKTELRTEFKNRLTKLLQTKLNSKNLTKAINTFAIPILTYSFGIIKWSQTDIENIHILIRSQFTKYRKLHPNACKERLTIERKAGGRGIIDIRSLHTKQIQTLRKFFHSKQTSLHTATVKADKNYTPLDLARADHSADTHSHTQLQQEKMKTWSEKTLHGKHRYHIEQDHVNKKQSYTWLRDGQLFSETEGFLLAIQDKVILTRNYQKHIIKDPTIAEDRCRKCHQQKETIEHITSGCKILAGTEYIARHDSAAKVVHQALATTYRLIENTDPYYKYTPTSILENEDYKLYWDIGIHTDKTVSANRPDITFQCKKGKVTYLIDIAVPNDTNIQAKYTEKISKYTDLATEMKRLWRQEKVIIVPLIISATGLTPITFTPHLVQLGLNTDIHRNIQKSVILKTCNIVRSFLNTEW

SEQ ID NO: 19893 - protein, 1013 aa, Pachyrhynchus sulphureomaculatus
MNDSPPSTSTQHHPESPLIQTLKAEMQSHLARWSGTDPTTRNPIPRLIFKQSTQIILNTINKHIIPQYITDLSTIEDIHTIIYAAAITTITQNNQKLPQRQRDPNSRKPKFKWQIRIENKINNIRRDLGHLTQFMNGNASKRVTQGVDKIKFKSLNRTLPEIVDTLKQKLSVYAARLRRYKESNERKDTNNLFRRSEKQFYRKTMYNEQTVVTEPPNKQELADYWKTVWSEPKLHNNNTPWIKAEEDKHKRVTEQENSTLTTEEITETIKHTHNWKCPGIDNIQNFWYKQFTTTHEALTHQINKTILQPHTFPTFLTQGITYVKPKSSDTTNPSNYRPITCLPTLYKIITAAISKKIEQHLTDNNIITEEQKGCRKNSRGCKEQLIIDSVIMGQTRKEHRNLHIGYIDYKKAFDSIPHSWLIRALEIYKINQHLRQFLAQIMKTWKTKIRLETQTERIQTEELYIRRGIFQGDSLSALWFCLCLNPLSNMLNRTEHGFNIRHQKVNQHKINHLLYMDDIKLYAATKTQLKELLKITEIFTLDVNMEFGISKCKVLHINKGQWKYHHETETISNETLDNMFDKETYKYLGFQQSTKLNHTHIKTELRTEFKNRLTKLLQTKLNSKYLTKAINTFAIPILTYSFGIIKWSQTDIENIHILIRSQFTKYRKLHPNACKERLTIERKAGGRGIIDIRSLHTKQIQALRKFFHTKQTSLHTATVKADKNYTPLDLSRVDHPADTHSHIQLQQEKLKTWSEKTLHGKHRYHIEQDHVNKKQSYAWLRDGQLFPETEGFLLAIQDKVILTRNYQKHIIKDPAITEDRCRKCHQQKETIEHITSGCKILAGTEYTARHESAAKVVHQALATTYKLIENTDPYYKYTPTSVLENKDYKLYWDISIHTDKTVSANRPDITFQCKKEKVTYLIDIAVPNDTNIQTKYTEKISKYTDLATEIKRVWKQEKVIIVPLIISATGLTPTTFTPHLVQLGLNTNIHKNIQKSVILKTCNIVRSFLNTQW

SEQ ID NO: 19894 - protein, 1480 aa, Pachyrhynchus sulphureomaculatus
MLNNNNYNNENGRVLRRRTPVVQTATATPQQQLQTNQTTASVETTPDSFTRSDIVGDGNCLFRAVSLYLYGHQNHHEKLREVALRYLQQNWSELHTFSLIEVDDIKDFNNYYNYMRKNGTYGTSLEIIALSETQNSNFHIFSKQRRTRHTKITFTDRPTIISTGKYNKTIYLLLTGNPMSGHFELLTPQNTENIPENNRPIKEASGERRNGRGRRGKWQLDQNDEDQATENGPAKSVVLATKPTPTKAGKSQQRMSCTTGIDEHPMRCCNENTKPDKEITEKRITRRLDPPTSIPSATDVDTGQTQPPNPGQGPYVLQGQHATTKAGKPRQRLKWTDEMNRTVMRCYYTATKLETITSGYRQQLHRLFLTEYPHLQLLVSEQRVVDQKRVITKNNRLTPLELQTIKDTVAVELNTDQPNNRNNKADSEPASHTQPPSRTQQYPPPRRSITQNNIASTAQHHITDNNMNHSPPSTTSTQHHPESPLIQTLKAKMESHLARWSGTDPTTRNPIPRLIFRQSTQPILNTLNKHIIPQYITDSSTIEDIHTIIYAAAITTLTQNNQKLPQRQGNPNRTKPKFKWQIRIENKINNIRRDLGHLTQFISGNASKRVTQGANKIKSKSPNRTLPEILDTLKQKLSVYAARLRRYKESNERKDTNNLFRRSEKQFYRKTMYNKQIAVTEPPNKQELTDYWKSIWSEPKQHNNNTPWIKAEEDKHKHVTEQENTTFNTQEITETIKHTHNWKCPGIDNIQNFWYKQFTTTHEALTHQINKAILQPHTFPTFLTQGITYVKPKSSDTTNPSNYRPITCLPTLYKIITATISKKIEQHLTDNNILTEEQKGCRKNSRGCKEQLIIDSVIMGQTRKEHRNLHIGYIDYKKAFDSIPHSWLIRALEIYKINQHLRQFLAQIMKTWKTKIRLETQTERIQTEELYIRRGIFQGDSLSALWFCLCLNPLSNILNRTEHGFNIRHQKENQHKINHLLYMDDIKLYAATQTQLKELLKITEIFTLDVNMEFGISKCKVLHINKGQWKHHHETETINNETLDNMFDKETYKYLGFQQSTKLNHTHIKTELRTEFKNRLTKLLQTKLNSKNLTKAINTFAIPILTYSFGIIKWSQTDIENIHILIRSQFTKYRKLHPNACKERLTIERKAGGRGIIDIRSLHTKQIQTLRKFFHSKQTSLHTATVKADKNYTPLDLARADHSADTHSHTQLQQEKMKTWSEKTLHGKHRYHIEQDHVNKKQSYTWLRDGQLFPETEGFLLAIQDKVILTKNYQKHIIKDPTIAEDRCRKCHQQKETIEHITSGCKILAGTEYTARHDSAAKVVHQALATTYRLIENTDPYYKYTPTSILENEDYKLYWDIGIHTDKTVSANRPDITFQCKKGKFTYLIDIAVPNDTNIQAKYTEKISKYTDLATEIKRLWRQEKVIIVPLIISATGLTPITFTPHLVQLGLNTDIHRNIQKSVILKTCNIVRSFLNTEW

SEQ ID NO: 19895 - protein, 1114 aa, Pachyrhynchus sulphureomaculatus
MHNQIITIIIIIINGTYGTSLEILALKNNRLTPLELQTIKDTVAVELNTDQPNNRNNKADSEPASHTQPPSRAQRCSPPRRSITQNNIASTAQHHITDNNMNHSPPSTTSTQHHPESPLIQTLKAKMESHLARWSGTDPTTRNPIPRLIFRQSTQPILNTLNKHIIPQYITDLSTIEDIHTIIYAAAITTLTQNNQKLPQRQGNPNRTKPRFKWQIRIENKINNIRRDLGHLTQFLSGNASKRVTQGANKIKSKSPNRTLPEILDTLKQKLSVYAARLRRYKESNERKDTNNLFRRSEKQFYRKTMYNKQIAVTEPPNEQELTDYWKSIWSEPKLHNNNTPWLKAEEDKHKHVTEQENTTFNTQEITETIKHTHNWKCPGIDNIQNFWYKQFTTTHEALTHQINKAILQPHTFPTFLTQGITYVKPKSSDTTNPSNYRPITCLPTLYKIITATISKKIEQHLTDNNILTEEQKGCRKNSRGCKEQLIIDSVIMGQTRKEHRNLHIGYIDYKKAFDSIPHSWLIRALEIYKINQHLRLFLAQIMKTWKTKIRLETQTERIQTEELYIRRGIFQGDSLSALWFCLCLNPLSNILNRTEHGFNIRHQKVNQHKINHLLYMDDIKLYAATQTQLKELLKITEIFTLDVNMEFGISKCKVLHINKGQWKCHHETETINNETLDNMFDKETYKYLGFQQSTKLNHTHIKTELRTEFKNRLTKLLQTKLNSKNLTKAINTFGIPILTYSFGIIKWSQTDIENIHILIRSQFTKYRKLHPNACKERLTIERKAGGRGIIDIRSLHTKQIQALRKFFHSKQTSLHTATVKADKNYTPLDLARADHSADTHSHTQLQQEKMKTWSEKTLHGKHRYHIEQDHVNKKQSYTWLQDGQLFPETEGFLLAIQDKVILTRNYQKHIIKDPTIAEDRCRKCHQQKETIEHITSGCRILAGTEYTARHDSAAKVVHQALATTYKLIENTDPYYKYTPTSILENEDYKLYWDISIHTDKTVSANRPDITFQCKKGKVTYLIDIAVPNDTNIQTKYTEKISKYTDLATEIKRLWKQEKVIIVPLIISATGLTPITFTPHLVQLGLNTNIHKNIQKSVILKTCNIVRSFLNTQW

SEQ ID NO: 19896 - protein, 1079 aa, Pachyrhynchus sulphureomaculatus
MNRTVMRCYYTATKLETITSGYRPELHRLFLTEYPHLQLLVSEQRVIDQKRVITKNDRLTPLELQTIKDTVAVELNTDQPNNRNNKADYEPASHTQPPTRIQQDPPPSRSITQNNIASTAQHHITDNNMNHSPPSTTSTQHHPESPLIQTLKAKMESHLARWSGTDPTTRNPIPRLIFRQSTQPILNTLNKHIIPQYITDLSTIEDIHTIIYAAAITTLTQNNQKLPQRQGNPNRTKPKFKWQIRIENKINNIRRDLGHLTQFISGNASKRVTQGANKIKSKSPNRTLPEILDTLKQKLSVYAARLRRYKESNERKDTNNLFRRSEKQFYRKTMYNKQIAVTEPPNKQELTDYWKSIWSEPKLHNNNTPWIKAEEDKYKHVTEQENTTLNTQKITETIKHTHNWKCPGIDNIQNFWYKQFTTTHEALTHQINKAILQPHTFPTFLTQGITYVKPKSSDTTNPSNYRPITCLPTLYKIITATISKKIEQHLTDNNILTEEQKGCRKNSRGCKEQLIIDSVIMGQTRKEHRNLHIGYIDYKKAFDSIPHSWLIRALEIYKINQHLRQFLAQIMKTWKTKIRLETQTERIQTEELYIRRGIFQGDSLSALWFCLCLNPLSNILNRTEHGFNIRHQKVNQHKINHLLYMDDIKLYAATQTHLKELLKITEIFTLDVNMEFGISKCKVLHINKGKWKGHHETETINNETLDNMFDKETYKYLGFQQSTKLNHTHIKAELRTEFKNRLTKLLETKLNSKNLTKAINTFAIPILTYSFGIIKWSQTDIENIHILIRSQFTKYRKLHPNACKERLTIERKAGGRGIVDIRSLHTKQIQALRKFFHSKQTSLHTATVKADKNYTPLDLARADHSADAHSHVQLQQEKMKTWSEKTLHGKHRYHIEQDHINKKQSYTWLQDGQLFPETEGFLLAIQDKVILTRNYQKHIIKDPTITEDRCRRCHQQKETIEHITSGCKILAGTEYTARHDSAAKVVHQALATTYKLIENTDPYYKYTPTSVRENEDYKLYWDISIHTDITVSANRPDITFQCKKEKVTYLIDIAVPSTTQTSKRNTQKKFPNTQTLQWK

SEQ ID NO: 19897 - protein, 1237 aa, Pachyrhynchus sulphureomaculatus
MSCTTGINEHAMRCCNEITPEKEITDKRITRRLDPPPPIPSATDVDAGQIQPPKPGQTAYVLQGQHATTKAGKPRQRLKWTDEMNRTVMRCYYTATKLETVTSGYRLELHRLFLTEYPHLQLLVTEQRVIDQKRVITKNNRLTPFELQTIKDTVAAELNTDQVAAELNTDQPNNRNSRADTEPISHTQPPSRKQQDPPPSRSITQNNISKQIASTTRHHITDDKMNDSPSSTTSTQHHSESPLIQTLKAEMQSHLARWSGTDPTTRNPIPRLIFKQSTQIILNTINKHIIPQYITDLSTIEDIHTIIYAAAITTITQNNQKLPQRQRDPNSRKPKFKWQIRLENKINNIRRDLGHLTQFMNGNASKRVTQGVDKIKSKSLKRTLPEIVDTLKQKLSVYAARLRRYKESNERKDTNNLFRRSEKQFYRKTMYNEQTVVTKPPNKQEIADYWKTVWSEPKLHNNNTPWIKAEEDKHKRVTEQENSTLTTEEITETIKHTHNWKCPGIDNIQNFWYKQFTTTHEALTHQINKAILQPHTLPTFLTQGITYVKPKSSDTTNPSNYRPITCLPTLYKIITAAISKKIEQHLTDNNIITEEQKGCRKNSRGCKEQLIIDSVIMGQTRKEHRNLHIGYIDYKKAFDSIPHSWLIRALEIYKINQQLRQFLAQIMKTWTTKIRLETPTERIETEELYIRRGIFQGDSLSALWFCLCLNPLSNILNRTEHGFNIRHQKVNQHKINHLLYMDDIKLYAATQTQLKELLKITEIFTLDVNMEFGISKCKVLHINKGQWKCHHETETINNETLDNMFDKETYKYLGFQQSTKLNHTHIKTELRTEFKNRLTKLLQTKLNSKNLTKAINTFAIPVLTYSFGIIKWSQTDIENIHILIRSQFTKYRKLHPNACKERLTIERKAGGRGIVDIRSLHTKQIQTLRKFFHSKQTSLHTATVKADKNYTPLDLARADHSADTHSHTQLQQEKMKTWSEKTLHGKHRYHIEQDHVNKKQSYTWLQDGQLFPETEGFLLAIQDKVILTRNYQKHIIKDPTIAEDRCRKCHQQKETIEHITSGCKILAGTEYTARHDSAAKVVHQALATTYKLIENTDPYYKYTPTSILENEDYKLYWDIGIHTDKTVSANRPDITFQCKKEKVTYLIDIAVPNDTNIQTKYTEKISKYTDLATEIKRLWKQEKVIIVPLIISATGLTPTTFTPHLVQLGLNTNIHKNIQKSVILKTCNIVRSFLNTQ

SEQ ID NO: 19898 - protein, 1225 aa, Pachyrhynchus sulphureomaculatus
MSCTTGINEHAMRCCNEITPDKEITDKRITRRLDPPPPIPSAIDVNAGQIQPPKPGQTAYVLQGQHATTKAGKPRQRLKWTDEMNKTVMRCYYTATKLETVTSGYRLELHRLFLTEYPHLQLLVTEQRVIDQKRVITKNNRLTPFELQTIKDTVAAELNADQVAPELNTDQLNNRNSRAGTEPISHTQPPSRKQQDPPPSRSITQNNISEQIASTTRHSTTSIQHHPESPLIQTLKAEMQSHLARWSGTDPTTRNPIPRLTFKQSTQMILNTINKHIIPQYITDLSTIEDIHTIIYAAAITTITQNNQKLPQRQRDPNSRKPKFKWRIRIENKINNIRRDLGHLTQFMNGNGSKRVTQGVDKIKSKSLNRTLPEIVDTLKQKLSVYAARLRRYKESNERKDTNNLFRRSEKQFYRKTMYNEQTVVTEPPNKQELADYWKTVWSEPKLHNNNTSWIKAEEDKHKRVTEQENSTLTTEEITETIKHTHNWKCPGIDNIQNFWYKQFTTTHEALTHQINKAILQPHTFPTFLTQGITYVKPKSSDTTNPSNYRPITCLPTLYKIITAAISKKIEQHLTDNNIITEEQKGCRKNSRGCKEQLIIDSVIMGQTRKEHRNLHIGYIDYKKAFDSIPHSWLIRALEIYKINQHLRQFLAQIMKTWKTKIRLETQTERIQTEELYIRRGIFQGDSLSALWFCLCLNPLSNILNRTEHGFNIRHQKGNQHKINHLLYMDDIKLYAATKAQLKELLKITEIFTLDVNMEFGISKCKVLHINKGQWKYHHETETINNETLDNMFDKETYKYLGFQQSTKLNHTHIKTELRTEFKNRLTKLLQTKLNSKYLTKAINTFAIPILTYSFGIIKWSQTDLENIHILIRSQFTKYRKLHPNACKERLTIERKAGGRGIIDIRSLHTKQIQALRKFFHTKQTSLHTATVKADKNYTPLDLSRVDHPADTHSHIQLQQEKMKTWSEKTLHGKHRYHIEQDHVNKKQSYTWLRDGQLFPETEGFLLAIQDKVILTRNYQKHIIKDPTITEDRCRKCHQQKETIEHITSGCKILAGTEYTARHDSAAKVVHQALATTYKLIENTDPYYKYTPTSVLENKDYKLYWDISIHTDKTVSANRPDITFQCKKEKVTYLIDIAVPNDTNIKTKYTEKISKYTDLATEIKRLWKQEKVIIVPLIISATGLTPTTFTPHLVLLGLNTNIHKNIQKSVILKTCNIVRSFLNTQ

SEQ ID NO: 19899 - protein, 1480 aa, Pachyrhynchus sulphureomaculatus
MLKNNNYNNENGRVLRRRTPVVQTAIATPQQQQLQTNQTTASVETTPDSFTRSDIVGDGNCLFRAVSLHLYGHQNHHEKLREVALRYLQQNWSELHTFSLIEVDDIKDFNNYYNYMRKNGTYGTSLEILALSETQNSNFHIFSKQRRTRHTKITFTDRPTIISTGKYNKTIYLLLTGDPMSGHFELLTPQNIENIPENNRPIKEASGERRNGRGRRGKWQLDQNDEDQATENGPAKSVVSATKPTPTKAGKSQQRMSCTTGINEHAMRCCNENTKPDKEITEKRITRRLDPPTSIPSTTDVDTGQTQPPKPGQGPYVLQGQHATTKAGKPRQRLKWTDEMNRTVMRCYYTATKLETITSGYRQQLHRLFLTEYPHLQLLVSEQRVIDQKRVITKNNRLTPLELQTIKDTVVVELNTDQPNNRNNKADSEPASHTQPPSRTQQYPPPRRSITQNNIASTAQHHITDNNMNHSPPSTTSTQHHPESPLIQTLKAKMESHLARWSGTDPTTRNPIPRLIFRQSTQPILNTLNKHIIPQYITDLSTIEDIHTIIYAAAITTLTQNNQKLPQRQGNPNRTKPKFKWQIRIENKINNIRRDLGHLTQFISGNASKRVTQGANKIKSKSPNRTLPEILDTLKQKLSVYAARLRRYKESNERKDTNNLFRRSEKQFYRKTMYNKQIAVTEPPNKQELTDYWKSIWSEPKLHNNNTPWIKAEEDKHKHVTEQEDTTFNTQEITETIKHTHNWKCPGIDNIQNFWYKQFTTTHEALTHQINKAILQPHTFPTFLTQGITYVKPKSSDTTNPSNYRPITCLPTLYKIITATISKKIEQHLTDNNILTEEQKGCRKNSRGCKEQLIIDSVIMGQTRKEHRNLHIGYIDYKKAFDSIPHSWLIRALEIYKINQHLRQFLAQIMKTWKTKIRLETQTERIQTEELYIRRGIFQGDSLSALWFCLCLNPLSNILSRTEHGFNIRHQKVNQHKINHLLYMDDIKLYAATQTQLKELLKITEIFTLDVNMEFGISKCKVLHINKGQWKGHHETETINNETLDNMFDKETYKYLGFQQSTKLNHTHIKTELRTEFKNRLTKLLQTKLNSKNLTKAINTFAIPILIYSFGIIKWSQTDIENIHILIRSQFTKYRKLHPNACKERLTIERKAGGRGIIDIRSLHTKQIQTLRKFFHSKQTSLHTATVKADKNYTPLDLARADHSADTHSHTQLQQEKMKTWSEKTLHGKHRYHIEQDHVNKKQSYTWLRDGQLFPETEGFLLAIQDKVILTRNYQKYIIKDPTIAEDRCRKCHQQKETIEHITSGCKILAGTEYTARHDSAAKVVHQALAITYRLIENTDPYYKYTPTSILENEDYKLYWDIGIHTDKTVSANRPDITFQCKKGKVTYLIDIAVPNDTNIQAKYTEKISKYTDLATEIKRLWRQEKVIIVPLIISATGLTPITFTPHLVQLGLNTDIHRNIQKSVILKTCNIVRSFLNTE

SEQ ID NO: 19900 - protein, 808 aa, Pachyrhynchus sulphureomaculatus
MYNKQIAVTEPPNKQELTDYWKSIWSEPKQHNNNTPWIKAEEDKHKHVTEQENTTFNTQEITETIKHTHNWKCSGIDNIQNFWYKQFTTTHEALTHQINKAILQPHTFPTFLTQGITYVKPKSSDTTNPSNYRPITCLPTLYKIITATISKKIEQHLTDNNILTEEQKGCTKNSRGCKEQLIIDSVIMGQTRKEHRNLHIGYIDYKKAFDSIPHSWLIRALEIYKINQHLRQFLAQIMKTWKTKIRLETQTERIQTEELYIRRGIFQGDSLSALWFCLCLNPLSNILNRTEHGFNIRHQKVNQHKINHLLYMDDIKLYAATQTQLKELLKITEIFTLDVNMEFGISKCKVLHINKGQWKHHHETETINNETLDNMFDKETYKYLGFQQSTKLNHTHIKTELRTEFKNRLTKLLQTKLNSKNLTKAMNTFAIPILTYSFGIIKWSQTDIENIHILIRSQFTKYRKLHPNACKERLTIERKAGGRGIIDIRSLHTKQIQTLRKFFHSKQTSLHTATVKADKNYTPLDLARADHSADTHSHTQLQQEKMKTWSEKTLHGKHRYHIEQDHVNKKQSYTWLRDGQLFPETEGFLLAIQDKVILTRNYQKHIIKDPTFAEDRCRKCHQQKETIEHITSGCKILAGTEYTARHDSAAKVVHQALATTYSLIENTDPYYKYTPTSILENEDYKLYWDIGIHTDKTVSANRPDITFQCKKGKVTYLIDIAVPNDTNIQAKYTEKISKYTDLATEIKRLWRQEKVIIVPLIISATGLTPITFTPHLVQLGLNTDIHRNIQKSVILKTCNIVRSFLNTE

SEQ ID NO: 19901 - protein, 1215 aa, Pachyrhynchus sulphureomaculatus
MSCTTGINERAMRCCNENTKPDKEITEKRITRRLDPPTSISSATDVDTGQTQPPKPGQGPYVLQGQHATTKAGKLRQRLKWTDEMNRTVMRCYYTATKLETITSGYRQQLHRLFLTEYPHLQLLVSEQRVIDQKRVITKNNRLTPLELQTIKDTVAVELNTDQPNNRNNKADFEPASHTQPPSRTQEYPPPRRSITQNNIASTAQHHITDNNMNHSPPSTTSTQHHPESPLIQTLKAKMESHLARWSGTDPTTRNPIPRLIFRQSTQPILNTLNKHIIPQYITDLSTIEDIHTIIYAAAITTLTQNNQKLPQRQGNPNRTKPKFKWQIRIENKINNIRRDLGHLTQFISGNASKRVTQGANKVKSKSPNRTLPEILDTLKQKLSVYAARLRRYKESNERKDTNNLFRRSEKQFCRKTMYNKQIAVTEPPNKQELTDYWKSIWSEPKLHNNNTPWIKAEEDKHKHVTEQENTTFNTQEITETIKHTHNWKCPGIDNIQNFWYKQFTTTHEALTHQINKAILQPHTFPTFLTQGITYVKPKSSDTTNPSNYRPITCLPTLYKIITATISKKIEQHLTDNNILTEEQKGCRKNSRGCKEQLIIDSVIMGQTRKEHRNLHIGYIDYKKAFDSIPHSWLTRALEIYKINQHLRQFLAQIMKTWKTKIRLETQTERIQTEELYIRRGIFQGDSLSALWFCLCLNPLSNILNRTEHGFNIRHQKVNQHKINHLLYMDDIKLYAATQTQLKELLKITEIFTLDVNMEFGISKCKVLHINKGQWKCHHETETINNETLDNMFDKETYKYLGFQQSTKLNHTHIKTELRTEFKNRLTKLLQTKLNSKNLTKAINTFAIPILTYSFGIIKWSQTDIENIHILIRSQFTKYRKLHPNACKERLTIERKAGGRGIIDIRSLHTKQIQTLRKFFHSKQTSLHTATVKADKNYTPLDLARADHSADTHSHTQLQQEKMKTWSEKTLHGKHRYRIEQDHVNKKQSYTWLRDGQLFPETEGFLLAIQDKVILTRNYQKYIIKDPTIAEDRCRKCHQQKETIEHITSGCKILAGTEYTARHDSAAKVVHQALATTYRLRENTDPYYKYTPTSILENEDYKLYWDIGIHTDETVSANRPDITFQCKKGKVTYLIDIAVPNDTNIQAKYTEKISKYTDLATEIKRLWRQEKVIIVPLIISATGLTPITFTPHLVQLGLNTDIHRKHSEVSDFENM

SEQ ID NO: 19902 - protein, 1481 aa, Pachyrhynchus sulphureomaculatus
MSKNNNYSNDNGRVLRRRTPVVQTAIATPQQQQPQTTQTTASAETTPDSFTRSDIVGDGNCLFRAVSLHLYGHQNHHEKLREVALRYLQQNWSELHTFSLIEVDDIKDFNNYYNYMKKNGTYGTSLEILALSETQNSNFHIFSKQRRTRHTKITFTDRPTIISTGKYNKTIYLLLTGNPMSGHFELLTPQNIENIPDNSRPIKEASGERRNGRGRRGKWQLDQNDEDQATENGPARSVVPASKPTPTKAGKSQQRMSCTTGINEHAMRCCNEITPDKEITDKRITRRLDPPPPIPSATDVNAGQIQPPKPGQTAYVLQGQHATTKAGKPRQRLKWTDEMNKTVMRCYYTATKLETVTSGYRLELHRLFLTEYPHLQLLVTEQRVIDQKRVITKNNRLTPFELQIIKDTVAAELNADQVAAELNTDQLNNRNSRADTEPISHTQPPSRKQQDPPPSRSITQNNISEQIASTTRHSTTSIQHHPESLLIQTLKAEMQSHLARWSGTDPTTRNPIPRLIFKQSTQMILNTINKHIIPQYITDLSTIEDIHTVIYAAAITTITQNNQKLPQRQRDPNSRKPKFKWQMRIENKINNIRRDLGHLTQFMNGNTSKRVTQGVDKIKSKSLNRTLPEIVDTLKQKLSVYAARLRRYKESNERKDTNNLFRRSEKQFYRKTMYNEQTVVTEPPNKQELADYWKTVWSEPKLHNNNTSWIKAEEDKHKRVTEQENSTLTTEEITETTIKHTHNWKCPGIDNIQNFWYKQFTTTHEALTHQINKAILQPHTFPTFLTQGITYVKPKSSDTTNPSNYRPITCLPTLYKIITAAISKKIEQHLTDNNIITEEQKGCRKNSRGCKEQLIIDSVIMGQTRKEHRNLHIGYIDYKKAFDSIPHSWLIRALEIYKINQHLRQFLAQIMKTWKTKIRLETQTERIQTEELYIRRGIFQGDSLSALWFCLCLNPLSNILNRTEHGFNIRHQKGNQHKINHLLYMDDIKLYAATKTQLKELLKITEIFTLDVNMEFGISKCKVLHINKGQWKYHHETETINNETLDNMFDKETYKYLGFQQSTKLNHTHIKTELRTEFKNRLTKLLQTKLNSKYLTKAINTFAIPILTYSFGIIKWSQTDLENIHILIRSQFTKYRKLHPNACKERLTIERKAGGRGIVDIRSLHTKQIQALRKFFHTKQTSLHTATVKADKNYTPLDLSRVDHPADTHSHIQLQQEKMKTWSEKTLHGKHRYHIEQDHVNKKQSYTWLRDGQLFPETEGFLLAIQDKVILTRNYQKHIIKDPTITEDRCRKCHQQKETIEHITSGCKILAGTEYTARHDSAAKVVHQALATTYKLIENTDPYYKYTPTSVLENKDYKLYWDISIHTDKTVSANRPDITFQCKKEKVTYLIDIAVPNDTNIQTKYTEKIAKYTDLATEIKRLWKQEKVIIVPLIISATGLTPTTFTPHLVQLGLNTNIHKNIQKSVILKTCNIVRSFLNTQ

SEQ ID NO: 19903 - protein, 1480 aa, Pachyrhynchus sulphureomaculatus
MLNNNNYNNENGRVLRRRTPVVQTATATPQQQLQTNQTTASVETTPDSFTRSDIVGDGNCLFRAVSLYLYGHQNQHEKLREVALRYLQQNWSELHTFSLIEVDDIKDFNNYYNYMRKNGTYGTSLEILALSETQNSNFHIFSKQRRTRHTKITFTDSPTIISTGKYNKTIYLLLTGNPMSGHFELLTPQNTENIPENNRPIKEASGERRNGRGRRGKWQLDQNDEDQATENGPAKSVVLATKPTPTKAGKSQQRMSCTTGINEHAMRCCDENTKPDKEITEKRITRRLDPPTSIPSATDVDTGQTQPPKPGQGPYVLQGQHATTKAGKPRQRLKWTDEMNRTVMRCYYTATKLETITSGYRQQLHRLFLTEYPHLQLLVSEQRVVDQKRVITKNNRLTPLELQTIKDTVAVELNTDQPNNRNNKADSEPASHTQPPSRTQQYPPPRRSITQNNIASTAQHHITDNNMNHSPPSTTSTQHHPESALIQTLKAKMESHLARWSGTDPTTRNPIPRLIFRQSTQPILNTLNKHIIPQYITDSSTIEDIHTIIYAAAITTLTQNNQKLPQRQGNPNRTKPKFKWQIRIENKINNIRRDLGHLTQFISGNASKRVTQGANKIKSKSPNRTLPEILDTLKQKLSVYAARLRRYKESNERKDTNNLFRRSEKQFYRKTMYNKQIAVTEPPNKQELTDYWKSIWSEPKQHNNNTPWIKAEEDKHKHVTEQENTTFNTQEITETIKHTHNWKCPGIDNIQNFWYKQFTTTHEALAHQINKAILQPHTFPTFLTQGITYVKPKSSDTTNPSNYRPITCLPTLYKIITATISKKIEQHLTDNNILTEEQKGCRKNSRGCKEQLIIDSVIMGQTRKEHRNLHIGYIDYKKAFDSIPHSWLIRALEIYKINQHLRQFLAQIMKTWKTKIRLETQTERIQTEELYIRRGIFQGDSLSALWFCLCLNPLSNILNRTEHGFNIRHQKENQHKINHLLYMDDIKLYAATQTQLKELLKITEIFTLDVNMEFGISKCKVLHINKGQWKHHHETETINNETLDNMFDKETYKYLGFQQSTKLNHTHIKTELRTEFKNRLTKLLQTKLNSKNLTKAINTFAIPILTYSFGIIKWSQTDIENIHILIRSQFTKYRKLHPNACKERLTIERKAGGRGIIDIRSLHTKQIQTLRKFFHSKQTSLHTATVKADKNYTPLDLARADHSADTHSHTQLQQEKMKTWSEKTLHGKHRYHIEQDHVNKKQSYTWLRDGQLFPETEGFLLAIQDKVILTRNYQKHIIKDPTIAEDRCRKCHQQKETIEHITSGCKILAGTEYTARHDSAAKVVHQALATTYRLIENTDPYYKYTPTSILENEDYKLYWDIGIHTDKTVSANRPDITFQCKKGKVTYLIDIAVPNDTNIQAKYTEKISKYTELATEIKRLWRQEKVIIVPLIISATGLTPITFTPHLVQLGLNTDIHRNIQKSVILKTCNIVRSFLNTEW

SEQ ID NO: 19904 - protein, 867 aa, Pachyrhynchus sulphureomaculatus
MNGNASKRVTQGVDKIKSKSLKRTLPEIVDTLKQKLSVYAARLRRYKESNERKDTNNLFRRSEKQFYRKTMYNEQTVVTKPPNKQEIADYWKTVWIKAEEDKHKRVTEQENSTLTTEEITETIKHTHNWKCPGIDNIQNFWYKQFTTTHEALTHQINKAILQPHTLPTFLTQGITYVKPKSSDTTNPSNYRPITCLPTLYKIITAAISKKIEQHLTDNNIITEEQKGCRKNSRGCKEPLIIDSVIMGQTRKEHRNLHIGYIDYKKAFDSIPHSWLIRALEIYKINQQLRQFLAQIMKTWKTKIRIETPTERIETEELYIRRGIFQGDSLSALWFCVCLNPLSNILNRTEHGFNIRPQKVNQHKINHLLYMDDIKLYAVTQTQLKELLKITEIFTLDVNMEFGISKCKVLHINKGQWKCHHETETINNETLDNMFDKETYKYLGFQQSTKLNHTHIKTELRTEFKNRLTKLLQTKLNSKNLTKAINTFAIPVLTYSFGIIKWSQTDIENIHILIRSQFTKYRKLHPNACKERLTIKRKAGGRGIIDIRSLHTKQIQTLRKFFHSKQTSLHTATVKADKNYTPLDLARADHSADTHSHTQLQQEKMKTWSEKTLHGKQRYHTEQDHVNKKESYTWLQDGQLFPETEGFLLAIQDKVILTRNYQKHIIKDPTIAEDRCRKCHQQKETIEHITSGCKILAGTEYTARHNSAAKVVHQALATTYKLIENTDPYYKYTPTSILENEDYKLYWDIGIHTDKTVSANRPDITFQCKKEKVTYLIDIAVPNDTNIQTKCTEKISKYTDLATEIKRLWKQEKVIIVPLIISATGLTPTTFTPHLVQLGLNTNIHKNIQKSVILKTCNIVRSFLNTQQ

SEQ ID NO: 19905 - protein, 808 aa, Pachyrhynchus sulphureomaculatus
MYNKQIAVTEPPNKQELTDYWKSIWSEPKLHNNNTPWIKAEEDKHKHMTEQENTTFNTQEITETIKHTHNWKCPGIDNIQNFWYKQFTTTHEALTHQINKAILQPHTFPTFLTQGITYVKPKSSDTTNPSNYRPITCLPTLYKIITATISKKIEQHLTDNNILTEEQKGCRKNSRGCKEQLIIDSVIMGQTRKEHRNLHIGYIDYKKAFDSIPHSWLIRALEIYKINQHLRQFLAQIMKTWKTKIRLETQTERIQTEELYIRRGIFQGDSLSALWFCLCLNPLSNILNRTEHGFNIRHQKVNQHKINHLLYMDDIKLYAATQTQLKELLKITEIFTLDVNMEFGISKCKVLHINKGQWKCHHETETINNETLDNMFDKETYKYLGFQQSTKLNHTHIKTELRTEFKNRLTKLLQTKLNSKNLTKAINTFAIPILTYSFGIIKWSQTDIENIHILIRSQFTKYRKLHPNACKERLTIERKAGGRGIIDIRSLHTKQIQTLRKFFHSKQTSLHTATVKADKNYTPLDLARADHSADTHSHTQLQQEKMKTWSEKTLHGKHRYHIEQDHVNKKQSYTWLRDGQLFPETEGFLLAIQDKVILTRNYQKYIIKDPTIAEDRCRKCHQQKETIEHITSGCKILAGTEYTARHDSAAKVVHQALATTYRLIENTDPYYKYTPTSILENEDYKLYWDIGIHTDKTVSANRSDITFQCKKGKVTYLIDLAVPNDTNIQAKYTEKIFKYTDLATEIKRLWRQEKVIIVPLIISATGLTPITFTPHLVQLGLNTDIHRNIQKSVILKTCNIVRSFLNTE

SEQ ID NO: 19906 - protein, 1493 aa, Pachyrhynchus sulphureomaculatus
MLKNNNYSNDNGRVLRRRTPVVQTAIATPQQQQPQTTQTTASAETTPDSFTRSDIVGDGNCLFRAVSLHLYGHQNHHEKLREVALRHLQQNWSEHHTFSLIEVDDIKDFNNYYNYMRKNGTYGTSLEILALSETQNSNFHIFSKQRRTRHTKITFTDRPTIISTGKYNKTIYLLLTGNPMSGHFELLTPQNIENIPDNSRPIKEASGERRNGRGRRGKWQLDQNDEDRATENGPAQSVVPASKPTPTKVGKLQQRMSCTTGTNEHVMRCCNEITPDKEITDKRITRRLDPPPPIPSATDVDAGQIQPPKPGQTAYVLQGQHATTKTGKPRQRLKWTDEMSRTVMRCYYTATKLETVTSGYRLELHRLFLTEYPHLQLLVTEQRVIDQKRVITKNNRLTPFELQTIKDTVAAELNADQVAAELNTDQPNNKNSTADTEPISHTQPPSRKQQDPPPSRSITQNNISKQIASTTRHHITDDKMNDSPPSTTSIQHHPESPLIQTLKAEMQSHLARWSGSDPTTRNPIPRLIFKQSTQIILNTINKHIIPQYITDLSTIEDIHTIIYAAAITTITQNNQKLPQRRRDPNSLKPKFKWQIRIENKINNIRRDLGHLTQFMNGNASKRVTQGVDKIKSKSLNRTLPEIVDTLKQKLSVYAARLRRYKESNERKDTNNLFRRSEKQFYRKTMYNEQTVVTEPPNKQELADYWKTVWSEPKLHNNNTPWIKAEEDKHKRVTEQENSTLTTEEITETIKHTHNWKCPGIDNIQNFWYKQFTTTHEALTHQINKAILQPHTFPTFLTQGITYVKPKSSDTTNPSNYRPITCLPTLYKIITAAISKKIEQHLTDNNIITEEQKGCRKGSRGCKEQLIIDSVIMGQTRKEHRNLHIGYIDYKKAFDSIPHSWLIRALEIYKINQHLRQFLAQIMKTWKTKIRLETQTERIQTEELYIRRGIFQGDSLSALWFCLCLNPLSNILNRTEHGFNIRHQKVNQHKINHLLYMDDIKLYAATKTQLKELLKITEIFTLDVNMEFGISKCKVLHINKGQWKYHHETETINNETLDNMFDKETYKYLGFQQSTKLNHTHIKTELRTEFKNRLTKLLQTKLNSKYLTKAINTFAIPILTYSFGIIKWSQTDLENIHILIRSQFTKYRKLHPNACKERLTIERKAGGRGIIDIRSLHTKQIRALRKFFHTKQTSLHTAIVKADKNYTPLDLSRVDHPADTHSHIQLQQEKMKTWSEKTLHGKHRYHIEQDHVNKKQSYTWLLDGQLFPETEGFLLAIQDKVILTRNYQKHIIKDPTIAEDRCRKCHQQKETIEHITSGCKILAGTEYTARHDSAAKVVHQALATTYKLIENTDPYYKYTPTSILENEDYKLYWDIGIHTDKTVSANRPDISFQCKKEKVTYLIDIAVPNDTNIQTKYTEKISKYTDLATEIKRLWKQEKVIIVPLIISATGLTPTTFTPHLVQLGLNTNIHKNIQKSVILKTCNIVRSFLNTQW

SEQ ID NO: 19907 - protein, 1480 aa, Pachyrhynchus sulphureomaculatus
MLNNNNYNNENGRVLRRRTPVVQTATATPQQQLQTNQTTASVETTPDSFTRSDIVGDGNCLFRAVSLYLYGHQNHHEKLREVALRYLQQNWSELHTFSLIEVDDIKDFNNYYNYMRKNGTYGTSLEILALSETQNSNFHIFSKQRRTRHTKITFTDRPTIISTGKYNKTIYLLLTGNPMSGHFELLTPQNTENIPENNRPIKEASGERRNGRGRREKWQLDQNDEDQATENGPAKSVVLATKPTPTKAGKSQQRMSCTTGINEHAMRCCNENTKPDKEITEKRITRRLDPPTSIPSATDVDTGQTQPPKPGQGPYVLQGQHATTKAGKPRQRLKWTDEMNRTVMRCCYTATKLETITSGYRQQLHRLFLTEYPHLQLLVSEQRVVDQKRVITKNNRLTPLELQTIKDTVAVELNTDQPNNRNNKADSEPASHTQPPSRTQQYPPPRRSITQNNIASTAQHHITDNNMNHSPPSTTSTQHHPESRLIQTLKAKMESHLARWSGTDPTTRNPIPRLIFRQSTQPILNTLNKHIIPQYITDSSTIEDIHTIIYAAAITTLTQNNQKLPQRQGNPNRTKPKFKWQIRIENKINNIRRDLGHLTQFISGNASKRVTQGANKIKSKSPNRTLPEILDTLKQKLSVYAARLRRYKESNERKDTNNLFRRSEKQFYRKTMYNRQIAVTEPPNKQELTDYWKSIWSEPKQHNNNTPWIKAEEDKHKHVTEQENTTFNTQEITETIKHTHNWKCPGIDNIQNFWYKQFTTTHEALTHQINKAILQPHTFPTFLTQGITYVKPKSSDTTNPSNYRPITCLPTLYKIITATISKKIEQHLTDNNILTEEQKGCRKNSRGCKEQLIIDSVIMGQTRKEHRNLYIGYIDYKKAFDSIPHSWLIRALEIYKINQHLRQFLAQIMKTWKTKIRLETQTERIQTEELYIRRGIFQGDSLSALWFCLCLNPLSNILNRTEHGFNIRHQKENQHKINHLLYMDDIKLYAATQTQLKELLKITEIFTLDVNMEFGISKCKVLHINKGQWKHHHETETINNETLDNMFDKETYKYLGFQQSTKLNHTHIKTELRTEFKNRLTKLLQTKLNSKNLTKAINTFAIPILTYSFGIIKWSQTDIENIHILIRSQFTKYRKLHPNACKERLTIERKAGGRGIIDIRSLHTKQIQTLRKFFHSKQTSLHTATVKADKNYTPLDLARADHSADIHSHTQLQQEKMKTWSEKTLHGKHRYHIEQDHVNKKQSYTWLRDGQLFPETEGFLLAIQDKVILTRNYQKHIIKDPTIAEDRCRKCHQQKETIEHITSGCKILAGTEYTARHDSAAKVVHQALATTYRLIENTDPYYKYTPTSILENEDYKLYWDIGIHTDKTVSANRPDITFQCKKGKVTYLIDIAVPNDTNIQAKYTEKISKYTDLATEIKRLWRQEKVIIVPLIISATGLTPITFTPHLVQLGLNTDIHRNIQKSVILKTCNIVRSFLNTEW

SEQ ID NO: 19908 - protein, 1014 aa, Pachyrhynchus sulphureomaculatus
MNHSPPSTTSTQHHPESRLIQTLKAKMESHLARWSGTDPTTRNPIPRLIFRQSTQPILNTLNKHIIPQYITDSSTIEDIHTIIYAAAITTLTQNNQKLPQRQGNPNRTKPKFKWQIRIENKINNIRRDLGQLTQFISGNASKRVTQGANRIKSKSPNRTLPEILDTLKQKLSVYAARLRRYKESNERKDTNNLFRRSEKQFYRKTMYNKQIAVTEPPNKQELTDYWKSIWSEPKQHNNNTPWIKAEEDKHKHVTEQENTTFNTQEITETIKHTHNWKCPGIDNIQNFWYKQFTTTHEALTHQINKAILQPHTFPTFLTQGITYVKPKSSDTTNPSNYRPITCLPTLYKIITATISKKIEQHLTDNNILTEEQKGCRKNSRGCKEQLIIDSVIMGQTRKEHRNLHIGYIDYKKAFDSIPHSWLSRALEIYKINQHLRQFLAQIMKTWKTKIRLETQTERIQTEELYIRRGIFQGDSLSALWFCLCLNPLSNILNRTEHCFNIRHQKENQHKINHLLYMDNIKLYAATQTQLKELLKITEIFTLDVNMEFGISKCKVLHINKGQWKHHHETETINNETLDNMFDKETYKYLGFQQSTKLNHTHIKTELRTEFKNRLTKLLQTKLNSKNLTKAINTFAIPILTYSFGIIKWSQTDIENIHILIRSQFTKYRKLHPNACKERLTIERKAGGRGIIDIRSLHTKQIQTLRKFFHSKQTSLHSATVKADKNYTPLDLARADHSADTHSHTQLQQEKMKTWSEKTLHGKHRYHIEQDHVNKKQSYTWLRDGQLFPETEGFLLAIQDKVILTRNYQKHIIKDPTIAEDRCRKCHQQKETIEHITSGCKILAGTEYTARHDSAAKVVHQALATTYRLIENTDPYYKYTPTSILENEDYKLYWDIGIHTDKTVSANRPDITFQCKKGKVTYLIDIAVLNYTNIQAKYTEKISKYTDLATEIKRLWRQEKVIIVTLIISATGHTPITFTPHLVQLGLNTDIHRNIQKSVILKTCNIVRSFLNTEW

SEQ ID NO: 19909 - protein, 1302 aa, Pachyrhynchus sulphureomaculatus
MSGHFELLTPQNTENIPENNRPIKEASGGRRNGRGRRGKWQLDQNDEDQATENGPAKSVVLATKPTPTKAGKSQQRMSCTTGINEHAMRCCNENTKPDKEITEKRITRRLDPPTSIPSATDVDTGQTQPPKPGQGPYVLQGQHATTKAGKPRQRLKWTDEMNRTVMRCYYTATKLETITSGYRQQLHRLFLTEYPHLQLLVSEQRVVDQKRVITKNNRLTPLELQTIKDTVAVELNTDQPNNRNNKADSEPASHTQPPSRTQQYPPPRRSITQNNIASTAQHHITDNNMNHSPPSTTSTQHHPESPLIQTLKAKMESHLARWSGTDPTTRNPIPRLIFRQSTQPILNTLNKHIIPQYITDSSTIEDIHTIIYAAAITTLTQNNQKLPQRQGNPNRTKPKFKWQIRIENKINNIRRDLGHLTQFISGNASKRVTQGANKIKSKSPNRTLPEILDTLKQKLSVYAARLRRYKESNERKDTNNLFRRSEKQFYRKTMYNRQIAVTEPPNKQELTDYWKSIWSEPKQHNNNTPWIKAEEDKHKHVTEQENTTFNTQEITETIKHTHNWKCPGIDNIQNFWYKQFTTTHEALTHQINKAILQPHTFPTFLTQGITYVKPKGSDTTNPSNYRPITCLPTLYKIITATISKKIEQHLTDNNILTEEQKGCRKNSRGCKEQLIIDSVIMGQTRKEHRNLHIGYIDYKKAFDSIPHSWLIRALEIYKINQHLRQFLAQIMKTWKTKIRLETQTERIQTEELYIRRGIFQGDSLSALWFCLCLNPLSNILNRTEHGFNIRHQKENQHKINHLLYMDDIKLYAATQTQLKELLKITEIFTLDVNMEFGISKCKVLHINKGQWKHHHETETINNETLDNMFDKETYKYLGFQQSTKLNHTHIKTELRTEFKNRLTKLLQTKLNSKNLTKAINTFAIPILTYSFGIIKWSQTDIENIHILIRSQFTKYRKLHPNACKERLTIERKAGGRGIIDIRSLHTKQIQTLRKFFHSKQTSLHTATVKADKNYTPLDLARADHSADTHSHTQLQQEKMKTWSEKTLHGKHRYHIEQDHVNKKQSYTWLRDGQLFPETEGFLLAIQDKVILTRNYQKHIIKDPTIAEDRCRKCHQQKETIEHITSGCKILAGTEYTARHDSAAKVVHQALATTYRLIENTDPYYKYTPTSILENEDYKLYWDIGIHTDKTVSANRPDITFQCKKGKVTYLIDIAVPNDTNIQAKYTEKISKYTDLATEIKRLWRQEKVIIVPLIISATGLTSITFTPHLVQLGLNTDIHRNIQKSVILKTCNIVRSFLNTEW

SEQ ID NO: 19910 - protein, 1225 aa, Pachyrhynchus sulphureomaculatus
MSCTTGINEHAMRCCNEITPDKEITDKRITRRLDPPPPIPSAIDVNAGQIQPPKPGQTAYVLQGQHATTKAGKPRQRLKWTDEMNKTVMRCYYTATKLETVTSGYRLELHRLFLTEYPHLQLLVTEQRVIDQKRVITKNNRLTPFELQTIKDTVAAELNADQVAAELNTDQLNNRNSRADTEPISHTQPPSRKQQDPPPSRSITQNNISEQIASTTRHSTTSIQHHPESPLIQTLKAEMQSHLARWSGTDPTTRNPIPRLIFKQSTQMILNTINKHIIPQYITDLSTIEDIHTIIYAAAITTITQNNQKLPQRQRDPNSRKPKFKWQIRIENKINNIRRDLGHLTQFMNGNASKRVTQGVDKIKSKSLNRTLPEIVDTLKQKLSVYAARLRRYKESNERKDTNNLFRRSEKQFYRKTMYNEQRVVTEPPNKQELADYWKTVWSEPKLHNNNTSWIKAEEDKHKRVTEQENSTLTTEEITETIKHTHNWKCPGIDNIQNFWYKQFTTTHEALTHQINKAILQPHTFPTFLTQGITYVKPKSSDTTNPSNYRPITCLPTLYKIITAAISKKIEQHLTDNNIITEEQKGCRKNSRGCKEQLIIDSVIMGQTRKEHRNLHIGYIDYKKAFDSIPHSWLIRALEIYKINQHLRQFLAQIMKTWKTKIRLETQTERIQTEELYIRRGIFQGDSLSALWFCLCLNPLSNILNRTEHGFNIRHQKVNQHKINHLLYMDDIKLYAATKAQLKELLKITEIFTLDVNMEFGISKCKVLHINKGQWKYHHETETINNETLDNMFDKETYKYLGFQQSTKLNHTHIKTELRTEFKNRLTKLLQTKLNSKYLTKAINTFAIPILTYSFGIIKWSQTDLENIHILIRSQFTKYRKLHPNACKERLTIERKAGGRGIIDIRSLHTKQIQALRKFFHTKQTSLHTATVKADKNYTPLDLSRVDHPADTHSHIQLQQEKMKTWSEKTLHGKHRYHIEQDHVNKKQSYTWLRDGQLFPETEGFLLAIQDKVILTRNYQKHIIKDPTITEDRCRKCHQQKETIEHITSGCKILAGTEYTARHDSAAKVVHQALATTYKLIENTDPYYKYTPTSVLENKDYKLYWDISIHTDKTVSANRPDITFQCKKEKVTYLIDIAVPNDTNIQTKYTEKISKYTDLATEIKRLWKQEKVIIVPLIISATGLTPTTFTPHLVQLGLNTNIHKNIQKSVILKTCNIVRSFLNTQ

SEQ ID NO: 19911 - protein, 1479 aa, Pachyrhynchus sulphureomaculatus
MLNNNNYNNENGRVLRRRTPVLQTATATPQQQLQTNQTTASVETTPDSFTRSDIVGDGNCLFRAVSLYLYGHQNHHEKLREVALRYLQQNWSELHTFSLIEVDDIKDFNNYYNYMRKNGTYGTSLEILALSETQNSNFHIFSKQRRTTHTKITFTDRPTIISTGKYNKTIYLLLTGNPMSGHFELLTPQNTENIPENNRPIKEASGERRNGRGRRGKWQLDQNDEDQATENGPAKSVVLATKPTPTKAGKSQQRMSCTTGINEHAMRCCNENTKPDKEITEKRITRRLDPRTSIPSATDVDTGQTQPPKPGQSPYVLQGQHATTKAGKPRQRLKWTDEMNRTVMRCYYTATKLETITSGYRQQLHRLFLTECPHLQLLVSEQRVIDQKRVITKNNRLTPLELQTIKDTVAVELNTDQPNNRNNKADSEPASHTQPPSRTQQYPPPRRSITQNNIASTAQHHITDNNMNHSPPSTKSTQHHPESPLIQTLKAKMESHLARWSGTDPTTRNPIPRLIFRQSTQPILNTLNKHIIPQYITDLSTIEDIHTIIYAAAITTLTQNNQKLPQRQGNPNRTKPKFKWQIRIENKINNIRRDLGHLTQFISGNASKRVTQGANKIKSKSPNRTLPEILDTLKQKLSVYAARLRRYKESNERKDTNNLFRRSEKQFYRKTMYNRQIAVTEPPNKQELTDYWKSIWSEPKLHNNNTPWIKAEEDKHKHVTEQEDTTFNTQEITETIKHTHNWKCPGIDNIQNFWYKQFTTTHEALTHQINKAILQPHTFPTFLTQGITYVKPKSSDTTNPSNYRPITCLPTLYKIITATISKKIEQHLTDNNILTEEQKGCRKNSRGCKEQLIIDSVIMGQTRKEHRNLHIGYIDYKKAFDSIPHSWLIRALEIYKINQHLRQFLAQIMKIWKTKIRLETQTERIQTEELYIRRGIFQGDSLSALWFCLCLNPLSNILSRTEHGFNIRHQKVNQHKINHLLYMDDIKLYAATQTQLKELLKITEIFTLDVNMEFGISKCKVLHINKGQWKGHHETETINNETLDNMFDKETYKYLGFQQSTKLNHTHIKTELRTEFKNRLTKLLQTKLNSKNLTKAINTFAIPILTYSFGIIKWSQTDIENIHILIRSQFTKYRKLHPNACKERLTIERKAGGRGIIDIRSLHTKQIQTLRKFFHSKQTSLHTATVKADKNYTPLDLARADHSADTHSHTQLQQEKMKTWSEKTLHGKHRYHIEQDHVNKKQSYTWLRDGQLFPETEGFLLAIQDKVILTRNYQKYIIKDPTIAEDRCRKCHQQKETIEHITSGCKILAGTEYTARHDSAAKVVHQALATTYRLIENTDPYYKYTPTSILENEDYKLYWDIGIHTDKTVSANRPDITFQCKKGKVTYLIDTAVPNDTNIQAKYTEKISKYTDLATEIKRLWRQEKVIIVPLIISATGLTPITFTPHLVQLGLNTDIHRNIQKSVILKTCNIVRSFLNTE

SEQ ID NO: 19912 - protein, 798 aa, Pachyrhynchus sulphureomaculatus
MYNKQIAVTEPPNKQELTDYWKSIWSEPKLHNNNTPWIKAEEDKHKHVTEQEDTTFNTQEITETIKHTHNWKCPGIDNIQNFWYKQFTTTHEALTHQINKAILQPHTFPTFLTQGITYVKPKSSDPTNPSNYRPITCLPTLYKIITATISKKIEQHLTDNNILTEEQKGCRKNSRGCKEQLIIDSVIMGQTRKEHRNLHIGYIDYKKAFDSIPHSWLIRALEIYKINQHLRQFLAQIMKTWKTKIRLETQTERIQTEELYIRRGIFQGDSLSALWFCLCLNPLSNILSRTEHGFNIRHQKVNQHKINHLLYMDDIKLYAATQTQLKELLKITEIFTLDVNMEFGISKCKVFHINKGQWKGHHETETINNETLDNMFDKETYKYLGFQQSTKLNHTHIKTELRTEFKNRLTKLLQTKLNSKNLTKAINTFAIPILTYSFGIIKWSQTDIENIHILIRSQFTKYRKLHPNACKERLTIERKAGGRGIIDIRSLHTKQIQTLRKFFHSKQTSLHTATVKADKNYTPLDLARADHSADTHSHTQLQQEKMKTWSEKTLHGKHRYHIEQDHVNKKQSYTWLRDGQLFPETEGFLLAIQDKVILTRNYQKYIIKDPTIAEDRCRKCHQQKETIEHITSGCKILAGTEYTARHDSAAKVVHQALATTYRLIENTDPYYKYTPTSILENEDYKLYWDIGIHTDKTVSANRPDITFQCKKGKVTYLIDIAVPNDTNIQAKYTEKNFQIHRPCNGNKKAMETGKSHHCPPHYISHRPYTNNIHTTFSAIGTQHRHTQKHSEVSDFENM

SEQ ID NO: 19913 - protein, 807 aa, Pachyrhynchus sulphureomaculatus
MYNKQIAVTEPPNEQELTDYWKSIWSEPKLHNNNTSWIKAEEDKHKHVTEQENTTFNTQEITETIKHTHNWKCPGIDNIQNFWYKQFTTTHEALTHQINKAILQPHTFPTFLTQGITYVKPKSSDTSNPSNYRPITCLPTLYKIITATISKKIEQHLTDNSILTEEQKGCRKNSRGCKEQLIIDSVIMGQTRKEHRNLHIGYIDYKKAFDSIPHSWLIRALEIYKINQHLRQFLAQIMKTWKTKIRQETQTERIQTEDLYIRRGIFQGDSLSALWFCICLNPLSNILNRTEHGFNIRHQKVNQHKINHLLHMDDIKLYAATQTQLKELLKIIEIFTLDVNMEFGISKCKVFHINKGQWKCHHETETINNETLDNMFDKETYKYLGFQQSTKLNHTHIKTELRTEFKNRLTKLLQTKLNSKNLTKAINTFVIPILTYSFGIIKWSQTDIENIHILIRSQFTKYRKLHPNACKERLTIERKAGGRGIIDIRSLHTKQIQALRKFFHSKQTSLHTATVKADKNYTPLDLSRADHSADTNSHTQLQQEKMKTWSEKTLHGKHRYHIEQDHVNKKQSYIWLQDGQLFPETEGFLLAIQDKVILTRNYQKHIIKDPTIAEDRCRKCHQQKETIEHITSGCRILAGTEYTARHDSAAKVVHQALATTYKLIENTDPYYKYTPTSILENEDYKLYWDISIHTDKTVSANRPDITFQCKKEKVTYLIDIAVPNDTNIQTKYTEKISKYTDLATEIKRLWKQEKVIIVPLIISATGLTPITFTPHLVQLGLNTNIHKNIQKSVILKTCNIVKSFLNT

SEQ ID NO: 19914 - protein, 1301 aa, Pachyrhynchus sulphureomaculatus
MSGHFELLTPQNTENIPENNRPIKEASGERRNGRGRRGKWQLDQNDEDPATENGPAKSVVLATKPTPTKAGKSQQRMSCTTGINEHAMRCCNESTKPDKEITEKRITRRLNPPTSIPSATDVDTGQTQPPKPGQGPYVLQGQHATTKAGKPRQRLKWTDEMNRTVMRCYYTATKLETITSGYRQQLHRLFLTEYPHLQLLVSEQRVVDQKRVITKNNRLTPLELQTIKDTVAVELNTDQPNNRNNKADSEPASHTQPPSRTQQYPPPRRSITQNNIASTAQHHITDNNMNHSPPSTTSTQHHPESPLIQTLKAKMESHLARWSGTDPTTRNPIPRLIFRQSTQPILNTLNKHIIPQYITDSSTIEDIHTIIYAAAITTLTQNNQKLPQRQGNPNRTKPKFKWQIRIENKINNIRRDLGHLTQFISENASKRVTQGANKIKSKSPNRTLPEILDTLKQKLSVYAARLRRYKESNERKDTNNLFRRSEKQFYRKTMYNRQIAVTEPPNKQELTDYWKTIWSEPKQHNNNTPWIKAEEDKHKHVTEQENTTFNTQEITETIKHTHNWKCPGIDNIQNFWYKQFTTTHEALTHQINKAILQPHTFPTFLTQGITYVKPKSSDTTNPSNYRPITCLPTLYKIITATISKKIEQHLTDNNILTEEQKGCRKNSRGCKEQLIIDSVIMGQTRKEHRNLHIGYIDYKKAFDSIPHSFLIRALEIYKINQHLRQFLAQIMKTWKTKIRLETQTERIQTEELYIRRGIFQGDSLSALWFCLCLNPLSNILNRTEYGFNIRHQKVNQHKINHLLYMDDIKLYAATHTQLKELLKITEIFTLDVNMEFGISKCKVLHINKGQWKCHHETETINNETLDNMFDKETYKYLGFQQSTKLNHTHIKTELRTEFKNRLTKLLQTKLNSKNLTKAINTFAIPVLTYSFGIIKWSQTDIENIHILIRSQFTKYRKLHPNACKERLTIERKAGGRGIIDIRSLHTKQIQTLRKFFHSKQTSLHTATVKADKNYTPLDLARADHSADTHSHTQLQQEKMKTWSEKTLHGKHRYHIEQDHVNKKQSYTWLQDGQLFPETEGFLLAIQDKVILTRNYQKHIIKDPTIAEDRCRKCHQQKETIEHITSGCKILAGTEYTARHDSAAKVVHQALATACKLIENTDPYYKYTPTSILENEDYKLYWDIGIHTDKTVSANRPDITFQCKKEKVTYLIDIAVPNDTNIQTKYTEKISKYTDLATEIKRLWKQEKVIIVPLIISATGLTPTTFTPHLVQLGLNTNIHKNIQKSVILKTCNIVRSFLNTQ

SEQ ID NO: 19915 - protein, 1165 aa, Pachyrhynchus sulphureomaculatus
MFCKDNMQLPRLGKPRQRLKWTDEMNRTVMRCYYTATKLETITSGYRQQLHRLFLTEYPHLQLLVSEQRVIDQKRVITKNNRLTPLELQTIKDTVAVELNTDQPNNRKNKADSEPASHTQPPSRTQQYPPPRRSITQNNIASTAQHHITDNNMNHSPPSTTSTQHHPKSPLIQTLKAKMESHLARWSGTDPTTRNPIPRLIFRQSTQPILNTLNKHIIPQYITDLSTIEDIHTIIYAAAITTLTQNNQKLPQRQGNPNRTKPKFKWQIRIENKINNIRRDIGHLTQFISGNASKRVTQGANKIKSKSPNRTLPEILDTLKQKLSVYAARLRRYKESNERKDTNNLFRRSEKQFYRKTMYNKQIAVTEPPNKQELTDYWKSIWSEPKLHNNNTPWIKAEEDKHKHVTEQEDTTFNTQEITETIKHTHNWKCPGIDNIQNFWYKQFTTTHEALTHQINKAILQPHTFPTFLTQGITYVKPKSSDTTNPSNYRPITCLPTLYKIITATISKKIEQHLTDNNILTEEQKGCRKNSRGCKEQLIIDSVIMEQTRKEHRNLHIGYIDYKKAFDSIPHSWLIRALEIYKINQHLRQFLAQIMKTWKTKIRLETQTERIQTEELYIRRGIFQGDSLSALWFCLCLNPLSNILSRTEHGFNIRHQKVNQHKINHLLYMDDIKLYAATQTQLKELLKITEIFTLDVNMEFGISKCKVLHINKGQWKGHHETETINNETLDNMFDKETYKYLGFQQSTKLNHTHIKTELRTEFKNRLTKLLQTKLNSKNLTKAINTFAIPILTYSFGIIKWSQTDIENIHILIRSQFTKYRKLHPNACKERLTIERKAGGRGIIDIRSLHTKQIQTLRKLFHSKQTSLHTATVKADKNYTPLDLARADHSADTHSHTQLQQEKMKTWSEKTLHGKHRYHIEQDHVNKKQSYTWLRDGQLFPETEGFLLAIQDKVILTRNYQKYIIKDPTIAEDRCRKCHQQKETIEHITSGCKILAGTEYTARHDSAAKVVHQALATTYRLVENTDPYYKYTPTSILENEDYKLYWDIGIHTDKTVSTNRPDITFQCKKGKVTYLIDIAVPNDTNIQAKYTEKISKYTDLATEIKRLWRQEKVIIVPLIISATGLTPITFTPHLVQLGLNTDIHRNIQKSVILKTCNIVRSFLNTE

SEQ ID NO: 19916 - protein, 1014 aa, Pachyrhynchus sulphureomaculatus
MNHSPPSTTSTQHHPESPLIQTLKAKMESHLARWSGTDPTTRNPMPRLIFRQSTQPILNTLNKHIIPQYITDLSTIEDIHTIIYAAAITTLTQNNQKLPQRQGNPNRTKPKFKWQIKIENKINNIRRDLGHLTQFISGNASKRVTQGAKKIKSKSPNRTLPEILDTLKQKLSVYAARLRRYKESNERKDTNNFFRRSEKQFYRKTMYNRQIAVTEPPNKQELTDYWKSIWSEPKLHNNNTPWIKAEEDKHKHVTEQENTTFNTQEITETIKHTHNWKCPGIDNIQNFWYKQFTTTHEALTHQINKAILQPHTFPTFLTQGITYVKPKSSDTTNPSNYRPITCLPTLYKIITATISKKIEQHLTDNNILTEEQKGCRKNSRGCKEQLIIDSVIMGQTRKEHRNLHIGYIDYKKAFDSIPHSWLIRALEIYKINQHLRQFLAQIMKTWKTKIRLETQTERIQTEELYIRRGIFQGDSLSDLWFCLCLNPLSNILNRTEHGFNIRHQKVNQHKINHLLYMDDIKLYAATQTQLKELLKITEIFTLDVNMEFGISKCKMLHINKGQWKCHHETETINNETLDNMFDKETYKYLGFQQSTKLNHTHIKTELRTEFKNRLTKLLQTKLNSKNLTKAINTFAIPILTYSFGIIKWSQTDIENIHILIRSQFTKYRKLHPNACKERLTIEGKAGGRGIIDIRSLHTKQIQTLRKFFHSKQTSLHTATVKADKNYTPLDLARADHSADTHSHTQLQQEKMKTWSEKTLHGKHRCHIEQDHVNKKQSYTWLRDGQLFPETEGFLLAIQDKVILTRNYQKHIIKDPTIAEDRCRKCHQQKETIEHITSGCKILAGTEYTARHDSAAKVVHQALATTYRLIENTDPYYKYTPTSILENEDYKLYWDIGIHTDKTVSANRPDITYQCKKGKVTYLIDIAVPNDTNIQAKYTEKISKYTDLATEIKRLWRQEKVIIVPLIISATGLTPITFTPHLVQLGLNTDIHRNIQKSVILKTCNIVRSFLNTEW

SEQ ID NO: 19917 - protein, 1014 aa, Pachyrhynchus sulphureomaculatus
MNHSPPSTTSTQHHPESPLIQTLKAKMESHLARWSGTDPTTRNPIPRLIFRQSTQPILNTLNKHIIPQYITDSSTIEDIHTIIYAAAITTLTQNNQKLPQRQGNPNRTKPKFKWQIRIENKINNIRRDLGHLTQFISGNASKRVTQGANKIKSKSPNRTLPEILDTLKQKLSVYAARLRRYKESNERKDTNNLFRRSEKQFYRKTMYNKQIAVTEPPNKQELTDYWKSIWSEPKQHNNNTPWIKAEEDKHKHVTEQENTTFNTQEITETIKHTHNWKCPGIDNIQNFWYKQFTTTHEALTHQINKAILQPHTFPTFLTQGITYVKPKSSDTTNPSNYRPITCLPTLYKIITATISKKIEQHLTDNNILTEEQKGCRKNSRGCKEQLIIDSVIMGQTRKEHRNLHIGYIDYKKAFDSIPHSWLIRALEIYKINQHLRQFLAQIMKTWKTKIRLETQTERIQTEELYIRRGIFQGDSLSALWFCLCLNPLSNILNRTEHGFNIRHQKENQHKINHLLYMDDIKLYAATQTQLKELLKITEIFTLDVNMEFGISKCKVLHINKGQWKHHHETETINNETLDNMFDKETYKYLGFQQSTKLNHTHIKTELRTEFKNRLTKLLQTKLNSKNLTKAINTFAIPILTYSFGIIKWSQTDIENIHILIRSQFTKYRKLHPNACKERLTIERKAGGRGIIDIRSLHTKQIQTLRKFFHSKQTSLHTATVKADENYTPLDLARADHSADTHSHTQLQQEKMKTWSEKTLHGKHRYHIEQDHVNKKQSYTWLRDGQLFSETEGFLLAIQDKVILTRNYQKHIIKDPTIAEDRCRKCHQQKETIEHITSGCKILAGTEYTARHDSAAKVVHQALATTYRLIENTDPYYKYTPTSVLENEDYKLYWDIGIHTDKTVSANRPDITFQCKKGKVTYLIDIAVPNDTNIQAKYTEKISKYTDLATEIKRLWRQEKVIIVPLIISATGLTPITFTPHLVQLGLNTDIHRNIQKSVILKTCNIVRSFLNTEW

SEQ ID NO: 19918 - protein, 809 aa, Pachyrhynchus sulphureomaculatus
MYNKQIAVTEPPNKQELTDYWKSIWSEPKQHNNNTPWIKAEEDKHKHVTEQENTTFNTQEITETIKHTHNWKCPGIDNIQNFWYKQFTTTHEALTHQINKAILQPHTFPTFLTQGITYVKPKSSDTTNPSNYRPITCLPTLYKIITATISKKIEQHLTDNNILTEEQKGCRKNSRGCKEQLIIDSVIMGQTRKEHRNLHIGYIDYKKAFDSIPHSWLIRALEIYKINQHLRQFLAQIMKTWKTKIRLETQTERIQTEELYIRRGIFQGDSLSALWFCLCLNPLSNILNRTEHGFNIRHQKENQHKINHLLYMDDIKLYAATQTQLKELLKITEIFTLDVNMEFGISKCKVLHINKGQWKHHHETETINNETLDNMFDKETYKYLGFQQSTKLNHTHIKTELRTEFKNRLTKLLQTKLNSKNLTKAINTFAIPILTYSFGIIKWSQTDIENIHILIRSQFTKYRKLHPNACKERLTIERKAGGRGIIDIRSLHTKQIQTLRKFFHSKQTSLHTATVKADKNYTPLDLARADHSADTHSHTQLQQEKMKTWSEKTLHGKHRYHIEQDHVNKKQSYTWLRDGQLFPETEGFLLAIQDKVILTRNYQKHIIKDPTIAEDRCRKCHQQKETIEHITSGCKILAGTEYTARHDSAAKVVHQALATTYRLIENTDPYYKYTPTSILENEDYKLYWDIGIHTDKTVSANRPDITFQCKKGKVTYLIDIAVPNDTNIQAKYTEKISKYTDLATEIKRLWRQEKVIIVPLIISATGLTPITFTPHLVQLGLNTGIHRNIQKSVILKTCNIVRSFLNTEW

SEQ ID NO: 19919 - protein, 1366 aa, Pachyrhynchus sulphureomaculatus
MRKNGTYGTSLEILALSETQNSNFHIFSKQRRTRHTKITFTDRPTIISTGKYNKTIYLLLTGNPMSGHFELLTPQNTENIPENNRPIKEASGERRNGRGRRGKWQLDQNDEDQATENGPAKSVVLATKPTPTKAGKSQQRMSCTTGINEHAMRCCNENTKPDKEITEKRITRRLDPPTSIPSATDVDTGQTQPPNPGQGPYVLQGQHATTKAGKPRQRLKWTDEMNRTVMRCYYTATKLETITSGYRQQLHRLFLTEYPHLQLLVSEQRVVDQKRVITKNNRLTPLELQTIKDTVAVELNTDQPNNRNNKADSEPASHTQPPSRTQQYPPPRRSITQNNIASTAQHHITDNNMNHSPPSTTSTQHHPESPLIQTLKAKMESHLARWSGTDPTTRNPIPRLIFRQSTQPILNTLNKHIIPQYITDSSTIEDIHTIIYAAAITTLTQNNQKLPQRQGNPNRTKPKFKWQIRIENKINNIRRDLGHLTQFISGNASKRITQGANKIKSKSPNRTLPEILDTLKQKLSVYAARLRRYKESNERKDTNNLFRRSEKQFYRKTMYNKQIAVTEPPNKQELTDYWKSIWSEPKQHNNNTPWIKAEEDKHKHVTEQENTTFNTQEITETIKHTHNWKCPGIDNIQNFWYKQFTTTHEALTHQINKAILQPHTFPTFLTQGITYVKPKSSDTTNPSNYRPITCLPTLYKIITATISKKIEQHLTDNNILTEEQKGCRKNSRGCKEQLIIDSVIMGQTRKEHRNLHIGYIDYKKAFDSIPHSWLIRALEIYKINQHLRQFLAQIMKTWKTKIRLETQTERIQTEELYIRRGIFQGDSLSALWFCLCLNPLSNILNRTEHGFNIRHQKENQHKINHLLYMDDIKLYAATQTQLKELLKITEIFTLDVNMEFGISKCKVLHINKGQWKHHHETETINNETLDNMFDKETYKYLGFQQSTKLNHTHIKTELRTEFKNRLTKLLQTKLNSKNLTKAINTFAIPILTYSFGIIKWSQTDIENIHILIRSQFTKYRKLHPNACKERLTIERKAGGRGIIDIRSLHTKQIQTLRKFFHSKQTSLHTATVKADKNYTPLDLARADHSADTHSHTQLQQEKMKTWSEKTLHGKHRYHIEQDHVNKKQSYTWLRDGQLFPETEGFLLAIQDKVILTRNYQKHIIKDLTIEEDRCRKCHQQKETIEHITSGCKILAGTEYTARHDSAAKVVHQALATTYRLIENTDPYYKYTPTSILENEDYKLYWDIGIHTDKTVSANRPDITFQCKKGKVTYLIDIAVPNDTNIQAKYTEKISKYTDLATEIKRLWRQEKVIIVPLIISATGLTPITFTPHLMQLGLNTDIHRNIQKSVILKTCNIVRSFLNTEW

SEQ ID NO: 19920 - protein, 1304 aa, Pachyrhynchus sulphureomaculatus
MSGHFELLTPQNTENIPENNRPIKEASGERRNGRGRRGKWQLDQNDEDQATENGPAKSVVLATKPTPTKAGKSQQRMSCTTGINEHAMRCCNENTKPDKEITEKRITRRLDPPTSIPSATDVDTGQTQPPNPGQGPYVLQGQHATTKAGKPRQRLKWTDEMNRTVMRCYYTATKLETITSGYRQQLHRLFLTEYPHLQLLVSEQRVVDQKRVITKNNRLTPLELQTIKDTVAVELNTDQQNNRNNKADSEPASHTQPPSRTQQYPPPRRSITQNNIASTAQHHITDNNMNHSPPSTTSTQHHAESPLIQTLKAKMESHLARWSDTDPTTRNPIPRLIFRQSTQPILNTLNKHIIPQYITDSSTIEDIHTIIYAAAITTLTQNNQKLPQRQGNPNRTKPKFKWQIRIENKINNIRRDLGHLTQFISGNASKRVTQGANKIKSKSPNRTLPEILDTLKQKLSVYAARLRRYKESNERKDTNNLFRRSEKKKQFYRKTMYNKQIAVTEPPNKQELTDYWKSIWSEPKQHNNNTPWIKAEEDKHKHVTEQENTTFNTQEITETIKHTHNWKCPGIDNIQNFWYKQFTTTHEALTHQINKAILQPHTFPTFLTQGITYVKPKSSDTTNPSNYRPITCLPTLYKIITATISKKIEQHLTDNNVLTEEQKGCRKNSRGCKEQLIIDSVIMGQTRKEHRNLHIGYIDYKKAFDSIPHSWLIRALEIYKINQHLRQFLAQIMKTWKTKIRLETQTERIQTEELYIRRGIFQGDSLSALWFCLCLNPLSNILNRTEHGFNIRHQKENQHKINHLLYMDDIKLYAATQTQLKELLKITEIFTLDVNMEFGISKCKVLHINKGQWKHHHETETINNETLDNMFDRETYKYLGFQQGTKLNHTHIKTELRAEFKNRLTKLLQTKLNSKNLTKAINTFAIPILTYSFGIIKWSQTDIENIHILIRSQFTKYRKLHPNACKERLTIERKAGGRGIIDIRSLHTKQIQTLRKFFHSKQTSLHTATVKADKNYTPLDLARADHSADTHSHAQLQQEKMKTWSEKTLHGKHRYHIEQDHVNKKQSYTWLRDGQLFPETEGFLLAIQDKVILTRNYQKHIIKDPTIAEDRCRKCHQQKETIEHITSGCKILAGTEYTARHDSAAKVVHQALATTYRLIENTDPYYKYTPTSILENEDYKLYWDIGIHTDKTVSANRPDITFQCKKGKVTYLIDIAVPNDTNIQAKYTEKISKYTDLATEIKRLWRQEKVIIVPLIISATGLTPITFTPHLVQLGLNTDIHRNIQKSVILKTCNIVRSFLNTEW

SEQ ID NO: 19921 - protein, 808 aa, Pachyrhynchus sulphureomaculatus
MYNKQIAVTEPPNKQELTDYWKSIWSEPKLHNNNTPWIKAEEDKHKHVTEQEDTTFNTQEITETIKHTHNWKCPGIDNIQNFWYKQFTTTHEALTHQINKAILQPHTFPTFLTQGIIYVKPKSSDTTNPSNYRPITCLPTLYKIITATISKKIEQHLTDNNILTEEQKGCRKNSRGCKEQLIIDSVIMGQTRKEHRNLHIGYIDYKKAFDSIPHSWLIRALEIYKINQHLRQFLAQIMKTWKTKIRLETQTERIQTEELYIRRGIFQGDSLSALWFCLCLNPLSNILSRTEHGFNIRHQKVNQHKINHLLYMDDIKLYAATQTQLKELLKITEIFTLDVNMEFGISKCKVLHINKGQWKGHHETETINNETLDNMFGKETYKYLGFQQSTKLNHTHIKTELSTEFKNRLTKLLQTKLNSKNLTKAINTFAIPILTYSFGIIKWSQTDIENIHILIRSQFTKYRKLHPNACKERLTIERKAGGRGIIDIRSLHTKQIQTLRKFFHSKQTSLHTATVKADKNYTPLDLARADHSADTHSHTQLQQEKMKTWSEKTLHGKHRYHIEQDHVNKKQSYTWLRDGQLFPETEGFLLAIQDKVILTRNYQKYIIKDPTIAEDRCRKCHQQKETIEHITSGCKILAGTEYTARHDSAAKVVHQALATTYRLIENTDPYYKYTPTSILENEDYKLYWDIGIHTDKTVSANRPDITFQCKEGKVTYLIDIAVPNDTNIQAKYTEKISKYTDLATEIKRLWRQEKVIIVPLIISATGLTPITFTPHLVQLGLNTDIHRNIQKSVILKTCNIVRSFLNTE

SEQ ID NO: 19922 - protein, 879 aa, Pachyrhynchus sulphureomaculatus
MNGNASKRVTQGVDKIKSKSLNRTLPEIVDTLKQKLSVYAARLRRYKESNERKDTNNLFRRSEKQFYRKTMYNEQTIVTEPPNKQELADYWKTVWSEPKLHNNNTPWIKAEEDKHKRVTEQENSTLTTEEITETIKHTHNWKCPGIDNIQNFWYKQFTTTHEALTHQINKAILQPHTFPTFLTQGITYIKPKSSDTTNPSNYRPITCLPTLYKIITATISKKIEQHLIDNNILTEEQKGCRKDSRGCKEQLIIDSVIMGQTRKEHRNLHIGYIDYKKAFDSIPHSWLIRALEIYKINQHLRQFLAQIMKTWKTKIRLETQTERIQTEELYIRRGIFQGDSLSALWFCLCLNPLSNILNRTEHGFNIRHQKVNQHKINHLLYMDDIKLYAATKTQLKELLKITEIFTLDVNMEFGISKCKVLHINKGQWKYHHETETINNETLDNMFDKETYKYLGFQQSTKLNHTHIKTELRTEFKNRLTKLLQTKLNSKNLTKAINTFAIPILTYSFGIIKWSQTDIENIHILIRSQFTKYRKLHPNACKERLTIERKAGGRGIIDIRSLHTKQIQALRKFFHTKQTSLHTATIKADKNYTPLDLSRVDHAADTHSHTQLQQEKMKTWSEKTLHGKHRYDIEQDHVNKKQSYTWLRDGQLFPETEGFLLAIQDKVILTRNYQKHIIKDPTITEDRCRKCHQQKETIEHITSGCKILAGTEYTARHDSAAKVVHQALATTYKLIENTDPYYKYTPTSVLENKDYKLYWDISIHTDKTVSANRPDITFQCKKRKVTYLIDIAVPNDTNIQTKYTEKISKYTDLATEIKRLWKQEKVIIVPLIISATGLTPTTFTPHLEQLGLNTNIHKNIQKSVILKTCNIVRSFLNTQW

SEQ ID NO: 19923 - protein, 1014 aa, Pachyrhynchus sulphureomaculatus
MNHSPPSTTSTQHHPESPLIQTLKAKMESHLARWSGTDPTTRNPIPRLIFRQSTQPILNTLNKHIIPQYITDLSTIEDIHTIIYAAAITTLTQNNQKLPQRQGNPNRTKPKFKWQIRIENKINNIRRDLGHLTQFISGNASKRVTQGANKIKSKSPNRTLPEILDTLKQKLSVYAARLRRYKESNERKDTNNLFRRSEKKQFYRKTMYNKQIAVTEPPNKQELTDYWKSIWSEPKLHNNNTPWIKAEEDKHKHVTEQENTTFNTQEITETIKHTHNWKCPGIDNIQNFWYKQFTTTHETLTHQINKAILQPHTFPTFLTQGITYVKPKSSDTTNPSNYRPITCLPTLYKIITATISKKIEQHLTDNNILTEEQKGCRKNSRGCKEQLIIDSVIMGQTRKEHRNLHIGYIDYKKAFDSIPHSWLIRALEIYKINQHLRQFLAQIMKTWKTKIRLETQTERIQTEELYIRRGIFQGDSLSALWFCLCLNPLSNILNRTEHGFNIRHQKVNQHKINHLLYMDDIKLYAATQTQLKELLKITEIFTLDVNMEFGISKCKVLHINKGQWKCHHETETINNETLDNMFDKETYKYLGFQQSTKLNHTHIKTELRTEFKNRLTKLLQTKLNSKNLTKAINTFAIPILTYSFGIIKWSQTDIENIHILIRSQFTKYRKLHPNACKERLTIERKAGGRGIIDIRSLHTKQIQTLRKFFHSKQTSLHTATVKADKNYTPLDLARADHSADTHSHTQLQQEKMKTWSEKTLHGKHRYHIEQDHVNKKQSYTWLRDGQLFPETEGFLLAIQDKVILTRNYQKYIIKDPTIAEDRCRKCHQQKETIEHITSGCKILAGTEYTARHDSAAKVVHQALATTYRLIENTDPYYKYTPTSILENEDYKLYWDIGIHTDKTVSANRPDITFQCKKGKVTYLIDIAVPKDTNIQAKYTEKISKYTDLATEIKRLWRQEKVIIVPLIISATGLTPITFTPHLVQLGLNTDIHRNIQKSVILKTCNIVRSFLNTE

SEQ ID NO: 19924 - protein, 1365 aa, Pachyrhynchus sulphureomaculatus
MRKNGTYGTSLEILALSETQNSNFHIFSKQRRTRHTKITFTDRPTIISTGKCNKTIYLLLTGDPMSGHFELLTPQNIENIPENNRPIKEASGERRNGRGRRGKWQLDQNDEDQATENGPAKSVVSATKPTPTKAGKSQQRMSCTTGINEHAMRCCNENTKPDKEITEKRITRRLDPPTSIPSTTDVDTGQTQPPKPGQGPYVLQGQHATTKAGKPRQRLKWTDEMNRTVMRCYYTATKLETITSGYRQQLHRLFLTEYPHLQLLVSEQRVIDQKRVITKNNRLTPLELQTIKDTVAVELNTDQPNNRNNKADSKPASHTQPPSRTQQYPPPRRSITQNNIASTAQHHITDNNMNHSPPSTTSTQHHPESPLIQTLKAKMESHLARWSGTDPTTRNPIPRLIFRQSTQPILNTLNKHIIPQYITDLSTIEDIHTIIYAAAITTLTQNNQKLPQRQGNPNRTKPKFKWQIRIENKINNIRRDLGHLTQFISGNASKRVTQGANKIKSKSPNRTLPEILDTLKQKLSVYAARLRRYKESNERKDTNNLFRRSEKQFYRKTMYNKQIAVTEPPNKQELTDYWKSIWSEPKLHNNNTPWIKAEEDKHKHVTEQENTTFNTQEITETIKHTHNWKCPGIDNIQNFWYKQFTTTHEALTHQINKAILQPHTFPTFLTQGITYVKPKSSDTTNPSNYRPITCLPTLYKIITATISKKIEQHLTDNNILTEEQKGCRKNSRGCKEQLIIDSVIMGQTRKEHRNLHIGYIDYKKAFDSIPHSWLIRALEIYKIKQHLRQFLAQILKTWKTKIRLETQTERIQTEELYIRRGIFQGDSLSALWFCLCLNPLSNILSRTEHGFNIRHQKMNQHKINHLLYMDDIKLYAATQTQLKELLKITEIFTLDVNIEFGISKCKVLHINKGQWKGHHETETINNETLDNMFDKETYKYLGFQQSTKLNHTHIKTELRTEFKNRLTKLLQTKLNSKNLTKAINTFAIPILTYSFGIIKWSQTDIENIHILIRSQFTKYRKLHPNACKERLTIERKAGGRGIIDIRSLHTKQIQTLRKFFHSKQTSLHTATVKADKNYTPLDLARADHSADNHSHTQLQQEKMKTWSEKTLHGKHRYHIEQDHVNKKQSYTWLRDGQLFPETEGFLLAIQDKVILTRNYQKYIIKDPTIAEDRCRKCHQQKETIEHITSGCKILAGTEYTARHDSAAKVVHQALATTYRLIENTDPYYKYTPTSILENEDYKLYWDIGIHTDKTVSANRPDITFQCKKGKVTYLIDIAVPNDTNIQAKYTEKISKYTDLATEIKRLWRQEKVIIIPLIISATGLTPITFTPHLVQLGLNTDIHRNIQKSVILKTCNIVRSFLNTE

SEQ ID NO: 19925 - protein, 809 aa, Pachyrhynchus sulphureomaculatus
MYNKQIAGTEPPNKQELTDYWKSIWSEPKQHNNNTPWIKAEEDKHKHVTEQENTTFNTQEITETIKHTHNWKCPGIDNIQNFWYKQFTTTHEALTHQINKAILQPHTFPTFLTQGITYVKPKSSDTTNPSNYRPITCLPTLYKIITATISKKIEQHLTDNNILTEEQKGCRKNSRGCKEQLIIDSVIMGQTRKEHRNLHIGYIDYKKAFDSIPHSWLIRALEIYKINQHLRQFLAQIMKTGKTKIRLETQTERIQTEELYIRRGIFQGDSLSALWFCLCLNPLSNILNRTEHGFNIRHQKENQHKINHLLYMDDIKLYAATQTQLKELLKITEIFTLDVNMEFGISKCKVLHINKGQWKHHHETETINNETLDNMFDKETYKYLGFQQSTKLNHTHIKTELRTEFKNRLTKLLQTKLNSKNLTKAINTFAIPILTYSFGIIKWSQTDIENIHILIRSQFTKYRKLHPNACKERLTIERKAGGRGIIDIRSLHTKQIQTLRKFFHSKQTSLHTTTVKADKNYTPLDLARADHSADTHSHTQLQQEKMKTWSEKTLHGKHRYHIEQDHVNKKQSYTWLRDGQLFPETEGFLLAIQDKVILSRNYQKHIIKDPTIAEDRCRKCHQQKETIEHITSGCKILAGTEYTARHDSAAKVVHQALATTYRLIENTDPYYKYTPTSILENEDYKLYWDIGIHTDKTVSANRPDITFQCKKGKVTYLIDIAVPNDTNIQAKYTENISKYTDLATEIKRLWRQEKVIIVPLIISATGLTPITFTPHLVQLGLNTDIHRNIQKSVILKTCNIVRSFLNTEW

SEQ ID NO: 19926 - protein, 987 aa, Pachyrhynchus sulphureomaculatus
MQSHLARWSGTDPTTRNPIPRLIFKQSTQMILNTINKHIIPQYITDLSTIEDIHTIIYAAAITTITQNNQKLPQRQRDPNSRKPKFKWQIRIENKINNIRRDLGHLTQFMNGNASKRVTQGVDKIKSKSLNRTLPEIVDNLKQKLSVYAARLRRYKESNERKDTNNLFRRSEKQFYRKTMYNEQTVVTEPPNKQELADYWKTVWSESKLHNNNTSWIKAEEDKHKRVTEQENSTLTTEEITETIKHTHNWKCPGIDNIQNFWYKQFTTTHEALTHQINKAILQPHTFPTFLTQGITYVKPKSSDTTNPSNYRPITCLPTLYKIITAAISKKIEQHLTDNNIITEEQKGCRKNSRGCKEQLIIDSVIMGQTRKEHRNLHIGYIDYKKAFDSIPHSWLIRTLEIYKINQHLRQFLAQIMKTWKTKIRLETQTERIQTEELYIRRGIFQGDSLSALWFCLCLNPLSNILNRTEHGFNIRHQKGNQHKINHLLYMDDIKLYAATKTQLKELLKITEIFTLDVNMEFGISKCKVLHINKGQWKYHHETETINNETLDNMFDKETYKYLGFQQSTKLNHTHIKTELRTEFKNRLTKLLRTKLNSKYLTKAINTFAIPILTYSFGIIKWSQTDLENIHILIRSQFTKYRKLHPNACKERLTIERKAGGRGIIDIRSLHTKQIQALRKFFHTKQTSLHTATVKADKNYTPLDLSRVYHPADTHSHIQLQQEKMKTWSEKTLHGKHRYHIEQDHVNKKQSYTWLRDGQLFPETEGFLLAIQDKVILTRNYQKHIIKDPTITEDRCRKCHQQKETIEHITSGCKILAGTEYTARHDSAAKVVHQALATTYKLIENTDPYYKYTPTSVLENKDYKLYWDISIHTDKTVSANRPDITFQCKKEKVTYLIDIAVPNDINIQTKYTEKISKYTDLATEIKRLWKQEKVIIVPLIISATGLTPTTFTPHLVQLGLNTNIHKNIQKSVILKTCNIVRSFLNTQ

SEQ ID NO: 19927 - protein, 1366 aa, Pachyrhynchus sulphureomaculatus
MRKNGTYGTSLEILALSETQNSNFHIFSKQRRTRHTKITFTDRPTIISTGKYNKTIYLLLTGNPMSGHFELLTPQNTENIPENNRPIKEASGERRNGRGRRGKWQLDQNDEHQATENGPAKSVVLATKPTPTKAGKSRQRMSCTTGINEHAMRCCNENTKPDKEITEKRITHRLDPPTSIPSATDVDTGQTQPPNPGQGPYVLQGQHATTKAGKPRQRLKWTDEMNRTVMRCYYTATKLETITSGYRQQLHRLFLTEYPHLQLLVSEQRVVDQKRVITKNNRLTPLELQTIKDTVAVELNTDQPNNRNNKANSEPASHTQPPSRTQQYPPPRRSITQNNIASTAQHHITDNNMNHSPPSTTSTQHHPESPLIQTLKAKMESHLARWSGTDPTTRNPIPRLIFRQSTQPILKTLNKHIIPQYITDSSTIEDIHTIIYAAAITTLTQNNQKLPQRQGNPNRTKPKFKWQIRIENKINNIRRDLGHLTQFISGNASKRVTQGANKIKSKSPNRTLPEILDTLKQKLSVYAARLRRYKESNERKDTNNLFRRSEKQFYRKTMYNKQIAVTEPPNKQELTDYWKSIWSEPKQHNNNTPWIKAEEDKHKHVTEQENTTFNTQEITETIKHTHNWKCPGIDNIQNFWYKQFTTTHEALTHQINKAILQPHTFPTFLTQGITYVKPKSSDTTNPSNYRPITCLPTLYKIITATISKKIEQHLTDNNILTEEQKGCRKNSRGCKEQLIIDSVIMGQTRKEHRNLHIGYIDYKKAFDSIPHSWLIRALEIYKINQHLRQFLAQIMKTWKTKIRLETQTERIQTEELYIRRGIFQGDSLSALWFCLCLNPLSNILNRTEHGFNIRHQKENQHKINHLLYMDDIKLYAATQTQLKELLKITEIFTLDVNMEFGISKCKVLHINKGQWKHHHETETINNETLDNMFDKETYKYLGFQQSTKLNHTHIKTELRTEFKNRLTKLLQTKLNSKNLTKAINTFAIPILTYSFGIIKWSQTDIENIHILIRSQFTKYRKLHPNACKERLTIERKAGGRGIIDIRSLHTKQVQALRRFFHSKQTSLHTATVKADKNYTPLDLARADHSADTHSHTQLQQEKMKTWSEKTLHGKHRYHIEQDHVNKKQSYTWLRDGQLFPETEGFLLAIQDKVILTRNYQKHIIKDPTIAEDRCRKCHQQKETIEHITSGCKILAGTEYTARHDSAAKVVHQALATTYRLIENTDPYYKYTPTSILENEDYKLYWDIGIHTDKTVSANRPDITFQCKKGKVTYLIDIAVPNDTNIQAKYTEKISKYTDLAMEIKRLWRQEKVIIVPLIISATGLTPITFTPHLVQLGLNTDIHRNIQKSVILKTCNIVRSLLNTEW

SEQ ID NO: 19928 - protein, 1480 aa, Pachyrhynchus sulphureomaculatus
MLNNNNYNNENGRVLRRRTPVVQTATATPQQQLQTNQTTASVETNPDSFTRSDIVGDGNCLFRAVSLYLYGHQNHHEKLREVSLRYLQQNWSELHTFSLIEVDDIKDFNNYYNYMRKNGTYGTSLEILALSETQNSNFHIFSKQRRTRHTKITFTDRPTIISTGKYNKTIYLLLTGNPMSGHFELLTPQDTENIPENNRPIKEASGERRNGRGRRGKWQLDQNDEDQATENGPAKSVVSATKPTPTKAGKSQQRMSCTTGINEDAMRCCNENTKPDKEITEKRITRRLDPPTSISSITDVDTGQTQPPKPGQGPYVLQGQHATTKAGKPRQRLKWTDEMNRTVMRCYYTATKLETITSGYRQQLHRLFLTEYPHLQLLVSEQRVIDQKRVITKNNRLTPLELQTIKDTVAVELNTDQPNNRNNKADSEPTSHTQPPSRAQRCSPPRRSITQNNIANTAQHHITDNNMNHSPPSTTSTQHHPESPLIQTLKAKMESHLARWSGTDPTTRNPIPRLIFRQSTQPILNTLNKHIIPQYITDLSTIEDIHTIIYAAAITTLTQNNQKLPQRQGNPNRTKPRFKWQIRIENKINNIRRDLGHLTQFISGNASKRVTQGANKIKSKSPNRTLPEILDTLKQKLSVYAARLRRYKESNERKDTNNLFRRSEKQFYRKTMYNKQIAVTEPPNEQELTDYWKSIWSEPKLHNNNTPWIKAEEDKHKHVTEQENTTFNTQEITETIKHTHNWKCPGIDNIQNFWYKQFTTTHEALTHQINKAILQPHTFPTFLTQGITYVKPKSSDTTNPSNYRPITCLPTLYKIITATISKKIEQHLTDNNILTEEQKGCRKNSRGCKEQLIIDSVIMGQTRKEHRNLHIGYIDYKKAFDSIPHSWLIRALEIYKINQHLRQFLAQIMKTWKTKIRLETQTERIQTEELYIRRGIFQGDSLSALWFCLCLNPLSNILNRTEHGFNIRHQKVNQHKINHLLYMDDIKLYAATQTQLKELLKITEIFTLDVNMEFGISKCKVLHINKGQWKCHHETETIDNETLDNMFDKETYKYLGFQQSTKLNHTHIKTELRTEFKNRLTKLLQTKLTSKNLTKAINTFAIPILTYSFGIIKWSQTDIENIHILIRSQFTKYRKLHPNACKERLTIERKAGGRGIIDIRSLHTKQIQALRKFFHSKQTSLHTATVKADKNYTPLDLARADHSADTHSHTQLQQKKIKTWSEKTLHGKHRYHIEQDHVNKKQSYTWLQDGQLFPETEGFLLAIQDKVILTRNYQKHIIKDPTIAEDRCRKCHQQKETIEHITSGCRILAGTEYTARHDSAAKVVHQALATTYKLIENTDPYYKYTPTSILENEDYKLYWDISIHTDKTVSANRPDITFQCKKGKVTYLIDIAVPNDTNIQTKYTEKISKYTDLATEIKRLWKQEKVIIVPLIISATGLTPITFTPHLVQLGLNTNIHKNIQKSVILKTCNIVRSFLNTQW

SEQ ID NO: 19929 - protein, 809 aa, Pachyrhynchus sulphureomaculatus
MSNKQIAVTEPPNKQELTDYWKSIWSEPKQHNNNTPWIKAEEDKHKHVTEQENTTFNTQEITETIKHTHNWKCPGIDNIQNFWYKQFTTTHEALTYQINKAILQPHTFPTFLTQGITYVKPKSSDTTNPSNYRPITCLPTLYKIITATISKKIEQHLTDNNILTEEQKGCRKNSRGCKEQLIIDSVIMGQTRKEHRNLHSGYIDYKKAFDSIPHSWLIKALEIYKINQHLRQFLAQIMKTWKTKIRLETQTERIQTEELYIRRGIFQGDSLSALWFCLCLNPLSNILNRTEHGFNIRHQKENQHKINHLLYMDDIKLYAATQTQLKELLKITEIFTLDVNMEFGISKCKVLHINKGQWKHHHETETINNETLDNMFDKETYKYLGFQQSTKLNHTHIKTELRTEFKNRLTKLLQTKLNSKNLTKAINTFAIPILTYSFGIIKWSQTDIENIHILIRSQFTKYRKLHPNACKERLTIERKAGGRGIIDIRSLHTKQIQTLRKFFHSKQTSLHTATVKADKNYTPLDLARADHSADTHSHTQLQQEKMKTWSEKTLHGKHRYHIEQDHVNKKQSYTWLRDGQLFPETEGFLLAIQDKVILTRNYQKHIIKDPTIAEDRCRKCHQQKETIEHITSGCKILAGTEYTARHDSAAKVVHQALATTYRLIENTDPYYKYTPTSIFENEDYKLYWDIGIHTDKTVSANRPDITFQCKKGKVTYLIDIAVPNDTNIQAKYTEKISKYTDLATEIKRLWRQEKVIIVPLIISATGLTPITFTPHLVQLGLNTDIHRNIQKSVILKTCNIVRSFLNTEW

SEQ ID NO: 19930 - protein, 1365 aa, Pachyrhynchus sulphureomaculatus
MRTNGTYGTSLEILALSETQNSNFHIFSKQRRTRHTKITFTDRPTIISTGKYNKTIYLLLTGDPMSGHFELLTPQNIENIPENNRPIKEASGERRNGRGRRGKWQLDQNDEDQATENGPAKSVVSATKPTPTKAGKSQQRMSCTTGINEYAMRCCNENTKPDKEITEKRITRRLDPPTSIPSTTDVDTGQTQPPKPGQGPYVLQGKHATTKAGKPRQRLKWTDEMNRTVMRCYYTATKLGTITSGYRQQLHRLFLTEYPHLQLLVSEQRVIDQKRVITKNNRLTPLELQTIKDTVAVELNTDQSNNRNNKADSEPASHTQPPSRTQQYPPPRRSITQNNIASTAQHHITDNNMNHSPPSTTSTQHHPESPLIQTLKAKMESHLARWSGTDPTTRNPIPRLIFRQSTQPILNTLNKHIIPQYITDLSTIEDIHTIIYAAAITTLTQNNQKLPQRQGNPNRTKPKFKWQIRIENKINNIRRDLGHLTQFISGNASKRVTQGANKIKSKSPNRTLPEILDTLKQKLSVYAARLRRYKESNERKDTNNLFRRSEKQFYRKTMYNRQIAVTEPPNKQELTDYWKSIWSEPKLHNNNTPWIKAEEDKHKHVTEQEDTTFNTQEITETIKHTHNWKCPGIDNIQNFWYKQFTTTHEALTHQINKAILQPHTFPNFLTQGITYVKPKSSDTTNPSNYRPITCLPTLYKIITATISKKIEQHLTDNNILTEEQKGCRKNSRGCKEQLIIDSVIMGQTRKEHRNLHIGYIDYKKAFDSIPHSWLIRALEIYKINQHLRQFLAQIMKTWKTKIRLETQTEWIQTEELYIRRGIFQGDSLSALWFCLCLNPLSNILSRTEHGFNIRHQKVNQHKINHLLYMDDIKLYAATQTQLKELLKITEIFTLDVNMEFGISKCKVLHINKGQWKGHHETETINNETLDNMFDKETYKYLGFQQSTKLNHTHIKTELRTEFKNRLTKLLQTKLNSKNLTKAINTFAIPILTYSFGIIKWSQTDIENIHILIRSQFIKYRKLHPNACKERLTIERKAGGRGIIDIRSLHTKQIQTLRKFFHSKQTSLHTATVKADKNYTPLDLARADHSADTHSHTQLQQEKMKTWSEKTLHGKHRYHIEQDHVNKKQSYTWLRDGQLFPETEGFLLAIQDKVILTRNYQKYIIKDPTIAEDRCRKCHQQKETIEHITSGCKILAGTEYTARHDSAAKVVHQALATTYRLIENTDPYYKYTPTSILENEDYKLYWDIGIHTDKTVSANRPDITFQCKKGKVTYLIDIAVPNDTNIQAKYTEKISKYTDLATEIKRLWRQEKVIIVPLIISATGLTPITFTPHLVQLGLNTDIHRNIQKSVILKTCNIVRSFLNTE

SEQ ID NO: 19931 - protein, 1211 aa, Pachyrhynchus sulphureomaculatus
MKNTKPDKEITEKRITRRLDPPTSIPSATDVDTGQTQPPKPGQGPYVLQGQHATTKAGKPRQRLKWTDEMNRTVMRCYYTATKLETITSGYRQQLHRLFLTEYPHLLLLVSEQRVVDQKRVITKNNRLTPLELQTIKDTVAVELNTDQPNNRNNKADSEPASHTQPPSRTQQYPPPRRSITQNNIASTAQHHITDNNMNHSPPSTTSTQHHPESPLIQTLKAKMESHLARWSGTDPTTRNPIPRLIFRQSTQPILNTPNKHIIPQYITDLSTIEDIHTIIYAAAITTLRQNNQKLPQRQGNPNRTKPKFKWQIRIENKINNIRRDLGHLTQFISGNASKRVTQGANKIKSKSPNRTLPEILDTLKQKLSVYAARLRRYKESNERKDTNNLFRRSEKQFYRKTMYNKQIAVTEPPNKQELTDYWKSIWSEPKLHNNNTPWIKADEDKHKHVTEQENTTFNTQEITETIKHTHNWKCPGIDNIQNFWYKQFTTTHEALTHQINKAILQPHTFPTFLTQGITYVKPKSSDTTNPSNYRPITCLPTLYKIITATISKKIEQHLTDNNILTEEQKGCRKNSRGCKEQLIIDSVIMGQTRKEHRNLHIGYIDYKKAFDSIPHSWLIRALEIYKINQHLRQFLAQIMKTWKTKIRLETQTERIQTEELYIRRGIFQGDSLSALWFCLCLNPLSNILNRTEHGFNIRHQKVNQHKINHLLYMDDIKLYAATQTQLKELLKITEIFTLDVNMKFGISKCKVLHINKGQWKCHHETETINNETLDNMFDKETYKYLGFQQSTKLNHTHIKTELRTEFKNRLTKLLQTKLNSKNLTKAINTFAIPILTYSFGIIKWSQTDIENIHILVRSQFTKYRKLHPNACKERLTIERKAGGRGIIDIRSLHTKQIQTLRKFFHSKQTSLHTATVKADKNYTPLDLARADHSADTHSHTQLQQEKMKTWSEKILHEKHRYHIEQDHVNKKQSYTWLRDGQLFPETEGFLLAIQDKVILTKNYQKHIIKDPTIAEDRCRKCHQQKETIEHITSGCKILAGTEYTARHDSAAKVVHQALATTYRLIENTDPYYKYTPTSILENEDYKLYWDIGIHTDKTVSANRPDITFQCKKGKVTYLIDIAVPSNTNIQAKYTEKISKYTDLATEIKRLWRQEKVIIVPLIISATGLTPITFTPHLVQLGLNTDIHRNIQKSVILKTCNIVRSFLNTEW

SEQ ID NO: 19932 - protein, 1226 aa, Pachyrhynchus sulphureomaculatus
MSCTTGINEHAMRCCNENTKPDKEITEKRITRRLDPPTSIPSATDVDTGQTQPPNPGQGPYVLQGQHATTKAGKPRQRLKWTDEMNRTVMRCYYTATKLETITSGYRQQLHRLFLTEYPHLQLLVSEQRVVDQKRVITKNNRLTPLELQTIKDTVAVELNTDQPNNRNNKADSEPASHTQPPSRTQQYPPPRRSITQNNIASTAQHHITDNNMNHSPPSTTSTQHHPESPLIQTLKAKMESHLARWSGTDPTTRNPIPRLIFRQSTQPILNTLNKHIIPQYITDSSTIEDIHTIIYAAAITTLTQNNQKLPQRQGNPNRTKPKFKWQIRIENKINNIRRDLGHLTQFISGNASKRVTQGANKIKSKSPNRTLPEILDTLKQKLSVYAARLRRYKESNERKDTNNLFRRSEKQFYRKTMYNRQIAVTEPPNKQELTDYWKSIWSEPKQHNNNTPWIKAEEDKHKHVTEQQNTTFNTQEITETIKHTHNWKCPGIDNIQNFWYKQFTTTHEALTHQINKAILQPHTFPTFLTQGITYVKPKSSDTTNPSNYRPITCLPTLYKIITATISKKIEQHLTDNNILTEEQKGCRKNSRGCKEQLIIDSVIMGQTRKEHRNLHIGYIDYKKAFDSIPHSWLIRALEIYKINQHLRQFLAQIMKTWKTKIRLETQTERIQTEELYIRRGIFQGDSLSALWFCLCLNPLSNILNRTEHGFNIRHQKENQHKINHLLYMDDIKLYAATQTQLKELLKITEIFTLDVNMEFGISKCKVLHINKGQWKHHHETETINNETLDNMFDKETYKYLGFQQSTKLNHTHIKTELRTEFKNRLTKLLQTKLNSKNLTKAINTFAIPILTYSFSIIKWSQTDIENIHILIRSQFTKYRKLHPNACKERLTIERKAGGRGIIDIRSLHTKQIQTLRKFFHSKQTSLHTATVKADKNYTPLDLARADHSADTHSHTQLQQEKMQTWSEKTLHGKHRYHIEQDHVNKKQSYTWLRDGQLFPETEGFLLAIQDKVILTRNYQKHIIKDPTIAEDRCRKCHQQKETIEHITSGCKILAGTEYTARHDSAAKVVHQALATTYRLIENTDPYYKYTPTSILENEDYKLYWDIGIHTDKTVSANRPDITFQCKKGKVTYLIDIAVPNDTNIQAKYTEKISKYTDLATEIKRLWRQEKVIVVPLIISATGLTPITFTPHLVQLGLNTDIHRNIQKSVILKTCNIVRSFLNTEW

SEQ ID NO: 19933 - protein, 809 aa, Pachyrhynchus sulphureomaculatus
MYNRQIAVTEPPNKQELTDYWKSIWSEPKQHNNNTPWIKAEEDNHKHVTEQENTTFNTQEITETIKHTHNWKCPGIDNIQNFWYKQFTTTHEALAHQINKAILQPHTFPTFLTQGITYVKPKSSDTTNPSNYRPITCLPTLYKIITATISKKIEQHLTDNNILTEEQKGCRKNSRGCKEQLIIDSVIMGQTRKEHRNLHIGYIDYKKAFDSIPHSWLIRALEIYKINQHLRQFLAQIMKTWKTKIRLETQTERIQTEELYIRRGIFQGDSLSALWFCLCLNPLSNILNRTEHGFNIRHQKENQHKINYLLYMDDIKLYAATQTQLKELLKITEIFTLDVNMEFGISKCKVLHINKGQWKHHHETETINNETLDNMFDKETYKYLGFQQSTKLNHTHIKTELRTEFKNRLTKLLQTKLNSKNLTKAINTFAIPILAYSFGIIKWSQTDIENIHILIRSQFTKYRKLHPNACKERLTIERKAGGRGIIDIRSLHTKQIQTLRKFFHSKQTSLHTATVKADKNYTPLDLARADHSADTHSHTQLQQEKMKTWSEKTLHGKHRYHIEQDHVNKKQSYTWLRDGQLFPETEGFLLAIQDKVILTRNYQKHIIKDPTIAEDRCRKCHQQKETIEHITSGCKILAGTEYTARHDSAAKVVHQALATTYRLIENTDPYYKYTPTSILENEDYKLYWDIGIHTDKTVSANRPDITFQCKKGKVTYLIDIAVPNDTNIQAKYTEKISKYTDLATEIKRLWRQEKVIIVPLIISATGLTPITFTPHLVQLGLNTDIHRNIQKSVILKTCNIVRSFLNTEW

SEQ ID NO: 19934 - protein, 1366 aa, Pachyrhynchus sulphureomaculatus
MQKNGTYGTSLEILALSETQNSNFHIFSKQRRTRHTKITFTDRPTIISTGKYNKTIYLLLTGNPMSGHFELLTPQNTENIPENNRPIKEASGERRNGRGRRGKWQLDQNDEDQATENGPAKSVVLATKPTPTKAGKSQQRMSCTTGINEHAMRCCNENTKPDKEITEKRITRRLDPPTSIPSATDVDTGQTQPPKPGQGPYVLQGQHATTKAGKPRQRLKWTDEMNRTVMRCYYTATKLETITSGYRQQLHRLFLTEYPHLQLLVSEQRVVDQKRVITKNNRLTPLELQTIKDTVAVELNTDQPNNRNNKADSEPASHTQPPSRTQQYPSPRRSITQNNIASTAQHHITDNNMNHSPPSTTSTQHHPESPLIQTLKAKMESHLARWSGTDPTTRNPIPRLIFRQSTQPILNTLNKHIIPQYITDSSTIEDIHTIIYAAAITTLTQNNQKLPQRQGNPNRTKPKFKWQIRIENKINNIRRDLGHLTQFISGNASKRVTQGANKIKSKSPNRTLPEILDTLKQKLSVYAARLRRYKESNERKDTNNLFRRSEKQFYRKTMYNRQIAVTEPSNKQELTDYWKSIWSEPKQHNNNTPWIKAEEDRHKHVTEQENTTFNTQEITETIKHTHNWKCPGIDNIQNFWYKQFTTTHEALTHQINKAILQPHTFPTFLTQGITYVKPKSSDTTNPSNYRPITCLPTLYKIITATISKKIEQHLTDNNILTEEQKGCRKNSRGCKEQLIIDSVIMGQTRKEHRNLHIGYIDYKKAFDSIPHSWLIRALEIYKINQHLRQFLAQIMKTWKTKIRLETQTERIQTEELYIRRGIFQGDSLSALWFCLCLNPLSNILNRTEHGFNIRHQKENQHKINHLLYMDDIKLYAATQTQLKELLKITEIFTLDVNMEFGISKCKVLHINKGQWKHHHETETINNETLDNMFDKETYKYLGFQQSTKLNHTHIKTELRTEFKNRLTKLLQTKLNSKNLTKAINTFAIPILTYSFGIIKWSQTDIENIHILIRSQFTKYRKLHPNACKERLTIERKAGGRGIIDIRSLHTKQIQTLRKFFHSKQTSLHTATVKADKNYTPLDLARADHSADTHSHTQLQQEKMKTWSEKTLHGKHRYHIEQDHVNKKQSYTWLRDGQLFPETEGFLLAIQDKVILTRNYQKHIIKDPTIAEDRCRKCHQQKETIEHITSGCKILAGTEYTARHDSAAKVVHQALATTYRLIENTDPYYKYTPTSILENEDYKLYWDIGIHTDKTVSANRPDITFQCKKEKVTYLIDIAVPNDTNIQAKYTEKISKYTDLATEIKRLWRQEKVIIVPLIISATGLTPITFTPHLVQLGLNTDIHRNIQKSVILKTCNIVRSFLNTEW

SEQ ID NO: 19935 - protein, 809 aa, Pachyrhynchus sulphureomaculatus
MYNRQIAVTEPPNEQELTDYWKSIWSEPKLHNNNTPWIKAEEDKHKHVTEQENTTFNTQEITETIKHTHNWRCPGIDNIQNFWYKQFTTTHEALTHQINKAILQPHTFPTFLTQGITYVKPKSSDTTNPSNYRPITCLPTLYKIITATISKKIEQHLTDNNILTEEQKGCRKNSRGCKEQLIIDSVIMGQTRKEHRNLHIGYIDYKKAFDSIPHSWLIRALEIYKINQHLRQFLAQIMKTWKTKIRLETQTERIQTEELYIRRGIFQGDSLSALWFCLCLNPLSNILNRTEHGFNIRHQKVNQHKINHLLYMDDIKLYAATQTQLKELLKITEIFTLDVNMEFGISKCKVLHINKGQWKCHHETETINNETLDNMFDKETYKYLGFQQSTKLNHTHIKTELRTEFKNRLTKLLQTKLNSKNLTKAINTFAIPILTYSFGIIKWSQTDIENIHILIRSQFTKYRKLHPNACKERLTIERKAGGRGIIDIRSLHTKQIQTLRKFFHSKQTSLHTATVKADKNYTPLDLARADHSADTHSHTQLQQEKMETWSEKTLHGKHRYHIEQDHVNKKQSYTWLRDGQLFPETEGFLLAIQDKVILTRNYQKHIIKDPTVAEDRCRKCHQQKETIEHITSGCKILAGTEYTARHDSAAKMVHQALATTYRLIENTDPYYKYTPTSILENDDYKLYWDISIHTDKTVSANRPDITFQCKKGKVTYLIDIAVPNDTNIQAKYTEKISKYTDLATEIKRLWRQEKVIIVPLIISATGLTPITFTPHLVQLGLNTDIHRNIQKSVILKTCNIVRSFLNTEW

SEQ ID NO: 19936 - protein, 1301 aa, Pachyrhynchus sulphureomaculatus
MSGHFELLTPQNTENIPENRPIKEASGERRNGRGRRGKWQLDQNDEDQATENGPAKSAVLATKPTPTKAGKSQQRMSCTTGINEHAMRCCNENTKPDKEITEKRITRRLDQPTSIPSATDVDTGQTQPPKPGQGPYVLQGQHATTKAGKPRQRLKWTDEMNRTVMRCYYTATKLETITSGYRQQLHRLFLTEYPHLQLLVSEQRVVDQKRVITKNNRLTPLELQTIKDTVAVELNTDQPNNRNNKADSEPASHTQPPSRTQQYPPPRRSITQNNIASTAQHHITNHNMNHSPPSTTSTQHHPESPLIQTLKAKMESHLARWSGTDPTTRNPIPRLIFRQSTQPILNTLNKHIIPQYITDSSTIEDIHTIIYAAAITALTQNNQKLPQRQGNPNRTKPKFKWQIRIENKINNIRRDLGHLTQFISGNASKRVTQGANKIKSKSPNRTLPEILDTLKQKLSVYAARLRRYKESNERKDTNNLFRRSEKQFYRKTMYNKQIAMTEPPNKQELTDYWKSIWSEPKQHNNNTPWIKAEEDKHKHVTEQENTTFNTQEITETIKHTHNWKCPGIDNIQNFWYKQFTTTHEALTHQINKAILQPHTFPTFLTQGITYVKPKSSDTTNPSNYRPITCLPTLYKIITATISKKIEQHLTDNNILTEEQKGCRKNSRGCKEQLIIDSVIMGQTRKEHRNLHIGYIDYKKAFDSIPHSWLIRALEIYNINQHLRQFLAQIMKTWKTKIRLETQTERIQTEELYIRRGIFQGDSLSALWFCLCLNPLSNILNRTEHGFNIRHQKENQHKINHLLYMDDIKLYAATQTQLKELLKITEIFTLDVNMEFGISKCKVLHINKGQWKHHHETETINNETLDNMFDKETYKYLGFQQSTKLNHTHIKTELRTEFKNRLTKLLQTKLNSKNLTKAINTFAIPILTYSFGIIKWSQTDIENIHILIRSQFTKYRKLHPNACKERLTIERKAGGRGIIDIRSLHTKQIQTLRKFFHSKQTSLHTATVKADKNYTPLDLARADHSADTHSHTQLQQEKMKTWSEKTLHGKHRYHIEQDHVNKKQSYTWLRDGQLFPETEGFLLAIQDKVILTRNYQKHIIKDPTIAEDRCRKCHQQKETIEHITSGCKILAGTEYTARHDSAAKVVHQALATTYRLIENTDPYYKYTPTSILENEDYKLYWDIGIHTDKTVSANRPDITFQCKKGKVTYLIDIAVPNDTNIQAKYTEKISKYTDLATEIKRLWRQEKVIIVPLIISATGLTPITFTPHLVQLGLNTDIHRNIQKSVILKTCNIVRSFLNTEW

SEQ ID NO: 19937 - protein, 1304 aa, Pachyrhynchus sulphureomaculatus
MLNNNNYNNENGRVLRRRTPVVQTATATPQQQLQTNQTIASVETTPDSFTRSDIVGDGNCLFRAVSLHLYGHQNHHEKLREVALRYLQQNWSELHTFSLIEVDDIKDFNNYYNYMRKNGTYGTSLEILALSETQNSNFHIFSKQRRTRHTKITFTDRPTIISTGKYNKTIYLLLTGNPMSGHFELLTPQNTENIPENNRPIKEASGERRNQKRVITKNNRLTPFELQTIKDTVAAELNADQVAAELNTDQLNNRNSRADTEPISHTQPPSRKQQDPPPSRSITQNNILEQIASTTRHSTTSIQHHPESPLIQTLKAEMQSQLARWSGTDPTTRNPIPRLIFKQSTQMILNTINKDIIPQYITDLSTIDDIHTIIYAAAITTITQNNQKLPQRQRDPNSRKPEFKWQIRIENKTNNIRRDLGHLTQFMNGNASKRVTQGVDKIKSKSLNRTLPEIVDTLKQKLSVYAARLRRYKESNERKDTNNLFRRSEKQFYRKTMYNEQTVVTKPPNKQELADYWKTVWSEPKLHNNNTSWIKAEEDKHKRVTEQENSTLTTEEITETIKHTHNWKCPGIDNIQNFWYKQFTTTHEALTHQINKAILQKHTFPTFLTQGITYVKPKSSDTTNPSNYRPITCLPTLYKIIIAAISKKIEQHLTDNNIITEEQKGCRKNSRGCKEQLIIDSVIMGQTRKEHRNLHIGYIDYKKAFDSIPHSWLIRALEIYKINQHLRQFLAQIMKTWKTKIRLETQTERIQTEELYIRRGIFQGDSLSALWFCLCLNPLSNILNRTEHGFNIRHQKGNQHKINHLLYMDDIKLYAATKTQLKELLKITEIFTLDVSMEFGISKCKVLHINKGQWRYHHGTETINNETLDNMFDKETYKYLGFQQSTKLNHTHIKTELRTEFKNRLTKLLQTKLNSKYLTKAINTFAIPILTYSFGIIKWSQTDLENIHILIRPQFTKYRKLHPNACKERLTIERKAGGRGIIDIRSLHTKQIQTLRKFFHSKQTSLHTATVKADKNYTPLDLSRADHSADTHSHTQLQQEKMKTWSEKTLHGKHRYHIEQDHVNKKQSYTWLRDGQLFPETEGFLLAIQDKVILTRNYQKHIIKDPTIAEDRCRKCHQQKETIEHITSGCKILAGTEYTARHDSAAKVVHQALATTYRLIENTDPYYKYTPTSILENEDYKLYWDIGIHTDKTVSANRPDITFQCKKGKVTYLIDIAVPNDTNIQAKYTEKISKYTDLATEIKRLWRQEKVIIVPLIISATGLTPITFTPHLVQLGLNTNIHKNIQKSVILKTCNIVRSFLNTQ

SEQ ID NO: 19938 - protein, 1410 aa, Pachyrhynchus sulphureomaculatus
MLNNNNYNNENGRVLRRRTPVVQTATATPQQQQLQTNQTTASVETTPDSFTRSDIVGDGNCLFRAVSLHLYGHQNHHEKLREVALRYLQQNWSELHTFSLIEVDDIKDFNNYYNYMRKNGTYGTSLEILALSETQNSNFHIFSKQRRTRHTKITFTDRPTIISTGKYNKTIYLLLTGNPMSGHFELLTPQTIENIPENNRQIKEASGERRNGRGRRGKWQLDQNDEDQATENGPAKSVVSATKPTPTKAGKSQQRMSCTTGINEHAMRCCNENTKPDIEITEKRITRRLDPPTSIPSATDVDTGQTQPPQPGQGPYVLQGQHATTKAGKPRQRLKWTDEMNRTVMRCYYTATKLETITSGYRPELHRLFLTEYPHLQLLVSEQRVIDQKRVITKNNRLTPLELQTIKDTVAVELNTDQPNNRNNKADYEPASHTQPPSRTQQDPPPRRSITQNNITSTAQHHITDNNMNHSPPSTTSTQHHPESPLIQTLKAKMESHLARWSGTDPTTRNPIPRLIFRQSTQPILNTVNKHIIPQYITDLSTIEDIHTIIYAAAITTLTQNNQKLPQRQGNPNRTKPKFKWQIRIENKINNIRRDLGHLTQFISGNASKRVTQGANKIKSKSPNRTLPEILDTLKQKLSVYAARLRRYKESNERGGGGGGGKDTNNLFRRSEKQFYRKTMYNKQIAVTEPPNKQELADYWKSIWSEPKLHNNNTPWIKAEEDKYKHVTEQENITLNTQEITETIKHTHNRKCPGIDNIQNFWYKQFTTTHEALTHQINKAILQPHTFPTFLTRGITYVKPKSSDTTNPSNYRPITCLPTLYKIITATISKKIEQHLIDNNILTEEQKGCRKNSRGCKEQLIIDSVIMGQTRKEHRNLHIGYIDYKKAFDSIPHSWLIRALEIYKINQHLRQFLAQIMKTWKTKIRLETQTERIQTEELYIRRGIFQGDSLSALWFCLCLNPLSNILNRTEHGFNIRHQKVNQHKINHLLYMDDIKLYAATQTQLKELLKITEIFTLDVNMEFGISKCKVLHINKGQWKCHHETETINNETLDNMFDKETYKYLGFQQSTKLNHTHIKTELRNEFKNRLTKLLQTKLNSKNLTKAINTFAIPILTYSFGIIKWSQTDIENIHILIRSQFTKYRKLHPNACKERLTIDRKAGGRGIIDIRSLHTKQIQTLRKFFHSKQTSLHTATVKADKNYTPFDLARADHSADTHSHTQLQQEKMKTWSEKTLHGKHRYHIEQDHVNKKKLYTWLQDGQLFPETEGFLLAIQDKVILTRNYQKHIIKDPTIAEDRCRKCHQQKETIEHITSGCKILAGTEYTARHDSAAKVVHQALATTYKLIENTDTYYKYTPTSILENEDYKLYWDVGIHTDKTVSANRPDITFQCKTGKVTYLIDIAVPNDTNIQTK

SEQ ID NO: 19939 - protein, 1013 aa, Pachyrhynchus sulphureomaculatus
MNHSPPSMTSTQHHPESPLIQTLKAKMESHLARWSGTDPTTRNPIPRLIFRQSTQPILNTLNKHIIPQYITDSSTIEDIHTIIYAAAITTLTQNNQKLPQRQGNPNRTKPKFKWQIRIENKINNIRRDLGHLTQFISGNASKRVTQGANKIKSKSPNRTLPEILDTLKQKLSVYAARLRRYKKSNERKDTNNLFRRSEKQFYRKTMYNKQIAVTEPPNKQELTDYWKSIWSEPKQHNNNTPWIKAEEDKHKHVTEQENTTFNTQEITETIKHTHNWKCPGIDNIQNFWYKQFTTTHEALTHQINKAILQPHIFPTFLTQGITYVKPKSSDTTNPSNYRPITCLPTLYKIITATISKKIEQHLTDNNILTEEQKGCRKNSRGCKEQLIIDSVIMGQTRKEHRNLHIGYIDYKKAFDSIPHSWLIRALEIYKINQHLRQFLAQIMKTWKTKIRLETQTERIQTEELYIRRGIFQGDSLSALWFCLCLNPLSNILNRTEHGFNIRHQKENQHKINHLLYMDDIKLYAATQTQLKELLKITEIFTLDVNMEFGISKCKVLHINKGQWKHHHETETINNETLDNMFDKETYKYLGFQQSTKLNHTHIKTELRTEFKNRLTKLLQTKLNSKNLTKAINTFAIPILTYSFGIIKWSQTDIENIHILIRSQFTKYRKLHPNACKERLTIERKAGGRGIIDIRSLHTKQIQTLRKFFHSKQTSLHTATVKADKNYTPLDLARADHSADTHSHTQLQQEKMKTWSEKTLHGKHRYHIEQDHVNKKQSYTWLRDGQLFPETEGFLLAIQDKVILTRNYQKHIIKDPTIAEDRCRKCHQQKETIEHITSGCKILAGTEYTARHDSAAKVVHQALATTYRLIENTDPYYKYTPTSILENEDYKLYWDIGIHTDKTVSANRPDITFQCKKGKVTYLIDIAVPNDTNIQAKYTEKISKYTDLATEIKRLWRQEKVIIVPLIISATGLTPITFTPHLVQLGLNTDIHRNIQKSVILKTCNIVRSFLNTE

SEQ ID NO: 19940 - protein, 1270 aa, Pachyrhynchus sulphureomaculatus
MLNNNNYNNENGRVLRRRTPVVQTATATPQQQQLQTNQTTASVETTPDSFTRSDIVGDGNCLFRAVSLHLYGHQNHHEKLREVALRYLQQNWSELHTFSLIEVDDIKDFNNYYNYMRKNGTYGTSLEILALSETQNSNFHIFSKQRRTRHTKITFTDRPTIISTGKYNKTIYLLLTGNPMSGHFELLTPQNIENIPENNRPIKEASGERRNGRGRRGKWQLDQNDEDQATENGPAKSVVSATKPTPTKAGKSQQRMSCTTGINEHAMRCCNENTKPDKEITEKRITRRLDPPTSIPSATDVGTGQTQPPKPGQGPYVLQEQHATTKAGKPRQRLKWTDEMNRTVMRCYYTATKLETITSGYRQQLHRLFLTEYPHLQLLVSEQRVVDQKRVITKNNRLTPLELQTIKDSKSPNRTLPEILDTLKQKLSVYAARLRRYKESNERKDTNNLFRRSEKQFYRKTMYNKQIAMTEPPNKQELTDYWKSIWSEPKLHNNNTPWIKAEEDKHKHVTEQENITLNTQEITETIKHTHNWKCPGIDNIQNFWYKQFTTTHEALTHQINKAILQPHTFPTFLTQGITYVKPKSSDTTNPSNYRPITCLPTLYKIITATISKKIEQHLTDNNILTEEQKGCRKNSRGCKEQLIIDSVIMGQTRKEHRNLHIGYIDYKKAFDSIPHSWLIRALEIYKINQHLRQFLAQIMKTWKTKIRLETQTERIQTEELYMRRGIFQGDSLSALWFCLCLNPLSNILNRTEYGFNIRHQKVNQHKINHLLYMDDIKLYAATQTQLKELLKITEIFTLDVNMEFGISKCKVLHINKGQWKCHHETETINNETLDNMFDKETYKYLGFQQSTKLNHTHIKTELRTEFKNRLTKLLQTKLNSKNLTKAINTFAIPILTYSFGIIKWSQTDIENIHILIRSQFTKYRKLHPNACKERLTIERKAGGRGIIDIRSLHTKQIQTLRKFFHSKQTSLHTATVKADKNYTPLDLARADHSADTHSHTQLQQEKMKTWSEKTLHGKHRYHIEQDHVNKKQSYTWLRDGQLFPETEGFLLAIQDKVILTRNYQKHIIKDPTIAEDRCRKCHQQKETIEHITSGCKILAGTEYTARHDSAAKVVHQALATTYRLIENTDPYYKYTPTSILENEDYKLYWDIGIHTDKTVSANRPDITFQCKKGKVTYLIDIAVPNDTNIQAKYTEKISKYTDLATEIKRLWRQEKVIIVPLIISATGLTPITFTPHLVQLGLNTDIHRNIQKSVILKTCNIVRSFLNTEW

SEQ ID NO: 19941 - protein, 810 aa, Pachyrhynchus sulphureomaculatus
MYNKQIAVTEPPNKQELTDYWKSIWSEPKLHNNNTPWIKAEEDKHKHVTEQENTTFNTQEITETIKHTHNWKCPGIDNIQNFWYKQFTTTHEALTHQINKAILQPHTFPTFLTQGITYVKPKSSDTTNPSNYRPITCLPTLYKIITATISKNIEQHLTDNNILTEEQKGCRKNSRGCKEQLIIDSVIMGQTRKEHRNLHIGYIDYKKAFDSIPHSWLIRALEIYKINQHLRQFLAQIMKTWKTKIRLETQTERIQTEELYIRRGIFQGDSLSALWFCLCLNPLSNILNRTEHGFNIRHQKVNQHKINHLLYMDDIKLYAATQTQLKELLKITEIFTLDVNMEFGISKCKVLHINKGQWKCHHETETINNETLDNMFDKETYKYLGFQQSTKLNHTHIKIELRTEFKNRLTKLLQTKLNSKNLTKAINTFAIPILTYSFGIIKWSQTDIENIHILIRSQFTKYRKLHPNACKERLTIERKAGGRGIIDIRSLHTKQIQTLRKFFHSSKQTSLHTATVKADKNYTPLDLARADHSADTHSHTQLQQEKMKTWSEKTLHGKHRYHIEQDHVNKKQSYTWLRDGQLFPETEGFLLAIQDKVILTRNYQKHIIKDPTIAEDRCRKCHQQKETIEHITSGCKILAGTEYTARHDLAAKVVHQALATTYRLIENTDPHYKYMPTSILENEDYKLYWDIGIHTDKTVSANRPDITFQCKKGKVTYLIDIAVPNDTNIQAKYTEKISKYTDLATEIKRLWRQEKVIIVPLIISATGLTPITFTPHLVQLGLNTNIHRNIQKSVILKTCNIVRSFLNTEW

SEQ ID NO: 19942 - protein, 929 aa, Pachyrhynchus sulphureomaculatus
MESHLARWSGTDPTTRNPIPRLIFRQSTQPILNTLNKHIIPQYITDLSTIEDIHTIIYAAAITTLTQNNQKLPQRQGNPNRTKPKFKWQIRIENKINNIRRDLGYLTQFISGNASKRVTQGANKIKSKFPNRTLPEILDTLKQKLSVYAARLRRYKESNERKDTNNLFRRSEKQFYRKTMYNKQIAVAEPPNKQELTDYWKSIWSEPKLHNNNTPWIKAEEDKHKHVTEQENTTLNTQEITEAIKHTHNWKCPGIDNIQNFWYKQFTTTHEALTHQINKAILQPHAFPTFLTQGITYVKPKSSDTTNPSNYRPITCLPTLYKIITATISKKIEQHLTDNNILTEEQKGCRKNSRGCKEQLIIDSVIMGQTRKEHRNLHICYIDYKKAFDSIPHSWLIRALEIYKINQHLRQFLAQIMKTWKTKIRLETQTERIQTEELYIRRGIFQGDSLSALWFCLCLNPLSNILNRTEHGFNIRHQKVNQHKINHQWKYHHETETINNETLDNMFDKETYKYLGFQQSTKLNHTHNKTELRTEFKNRLTKLLQTKLNCKNLTKAINTFAIPILTYSFGIIKWSQTDIENIHILIRSQFTKYRKLHPNACKERLTIERKAGGKGIIDIRSLHTKQIQTLRKFFHSKQTSLHTATVKADKNYTPLDLARTDHSADTHSHTQLQQEKMKTWSEKTLHGKHRYHIEQDHVNKKQSYTWLQDGQLFPETEGFLLAIQDKVILTRNYQKHIIKDPTIAEDRCRKCHQQKETIEHITSGCKILAGTEYTARHDSAAKVVHQALATTYKLIENTDPYYKYTPTSILENEDYKLYWDIGIHTDKTVSANRPDITFQCKKGKVTYLIDIAVPNDTNIQTKYTEKISKYTDLATEIKRLWRQEKVIIVPPHYISHRPYTNNIHTTFSAIRTQHRHTQKHSEVSDFETM

SEQ ID NO: 19943 - protein, 812 aa, Pachyrhynchus sulphureomaculatus
MYNKQIAVTEPPNKQELTDYWKSIWSEPKQHNNNTPWIKAEEDEHKHVTEQENTTFNTQEITETIKHTHNWKCPGIDNIQIFWYKQFTTTHEALTHQINKAILQPHTFPTFLTQGITYVKPKSSDTTNPSNYRPITCLPTLYKIITATISKKIEQHLTDNNILTEEQKGCRKNSRGCKEQLIIDSVIMGQTRKEHRNLPIGYIDYKKAFDSIPHSWLIRALEIYKINQHLRQFLAQIMKTWKTKIRLETQTERIQTEELYIRRGIFQGDSLSALWFCLCLNPLSNILNRTEHGFNIRHQKENQHKINHLLYMDDIKLYAATQTQLKELLKITEIFTLDVNMEFGISKCKVLHINKGQWKHHHEIETINNETLDNMFDKVDKETHKYLGFQQSTKLNHTHIKTELRTEFKNRLTKLLQTKLNSKNLTKAINTFAIPILTYSFGIIKWSQTDIENIHILIRSQFTKYRKLHPNACKERLTIERKAGGRGIIDIRSLHTKQIQTLRKFFHSKQTSLHTATVKADKNYTPLDLARADHSADTHSHTQLQQEKMKTWSEKTLHGKHRYHIEQDHVNKKQSYTWLRDGQLFPETEGFLLAIQDKVILTRNYQKHIIKDPTIAEDRCRKCHQQKETIEHITSGCKILAGTEYTARHDSAAKVVHQALATTYRLIENTDPYYKYTPTSILENEDYKLYWDIGIHTDKTVSANRPDITFQCKKGKVTYLIDIAVPNDTNIQAKYTEKISKYTDLATEIKRLWRQEKVIIVPLIISATGLTPITFTPHLVQLGLNTDIHRNIQKSVILKTCNIFRSFLNTEW

SEQ ID NO: 19944 - protein, 1015 aa, Pachyrhynchus sulphureomaculatus
MNHSPPSTTSTQHHPESPLIQTLKAKMESHLARWSGTDPTTRNPIPRLIFRQSTQPILNTLNKHIIPQYITDSSTIEDIHTIIYAAAITTLTQNNQKLPQRQGNPNRTKPKFKWQIRIENKINNIRRDLGHLTQFISGNASKRVTQGANKIKSKSPNRTLPEILDTLKQKLSVYAARLRRYKESNERKDTNNLFRRSEKQFYRKTMYNKQIAVTEPPNKQELTDYWKSIWSEPKQHNNNTPWIKAEEDKHKHVTEQENTTFNTQEITETIKHTHNWKCPGIDNIQNFWYKQFTTTHEALTHQINKAILQPHTFPTFLTQGITYVKPKSSDTTNPSNYRPITCLPTLYKIITATISKKIEQHLTDNNILTEEQKGCRKNSRGCKEQLIIDSVIMGQTRKEHRNLHIGYIDYKKAFDSIPHSWLIRALEIYKINQHLRQFLAQIMKTWKTKIRLETQTERIQTEELYIRRGIFQGDSLSALWFCLCLNPLSNILNRTEHGFNIRHQKENQHKINHLLYMDDIKLYAATQTQLKELLKITEIFTLDVNMEFGISKCKVLHINKGQWKHHHETETINNETLDNMFDKETYKYLGFQQSTKLNHTHIKTELRTEFKNRLTKLLQTKLNSKNLTKAINTFAIPILTYSFGIIKWSQTDIENIHILIRSQFTKYRKLHPNACKERLTIERKAGGRGIIDIRSLHTKQIQTLRKFFHSKQTSLHTATVKADKNYYTPLDLARADHSADTHSHTQLQQEKMKTRSEKTLHGKHRYHIEQDHVNKKQSYTWLRDGQLFPETEGFLLAIQDKVILTRNYQKHIIKDPTIAEDRCRKCHQQKETIEHITSGCKILAGTEYTARHDSAAKVVHQALATTYRLIENTDPYYKYTPTSILENEDYKLYWDIGIHTDKTVSANRPDITFQCKKGKVTYLIDIAVPNDTNIQAKYTEKISKYTDLATEIKRLWRQEKVIIVPLIISGTGLTPITFTPHLVQLGLNTDIHRNIQKSVILKTCNIVRSFLNTEW

SEQ ID NO: 19945 - protein, 1097 aa, Pachyrhynchus sulphureomaculatus
MSCTTGINEHAMRCCNENTKPDKEITEKRITRRLDPPTSIPSATDVDTGQTQPPKPGQGPYVLQGQHATTKAGKPRQRLKWTDEMNRTVMRCYYTATKLETITSGYRQQLHRLFLTEYPHLQLLVSEQRVVDQKRVITKNNRLTPLELQTIKDTVAVELNTDQPNNRNNKADSEPASHTQPPSRTQQYPPPRRSITQNNIASTAQHHITDNNMNHSPPSTTSTQHHPESRLIQTLKAKMESHLARWSGTDPTTRNPIPRLMFRQSTQPILNTLNKHIIPQYITDSSTIEDIHTIIYAAAITTLTQNNQKLPQRQGNPNRTKPKFKWQIRIENKINNIRRDLGHLTQFISGNASKRVTQGANKIKSKSLNRTLPEILDTLKQKLSVYAARLRRYKESNERKDTNNLFRRSEKQFYRKTMYNRQIAVTEPPNKQELTDYWKSIWSEPKQHNNNTPWIKAEEDKHKHVTEQENTTFNTQEITETIKHTHNWKCPGIDNIQNFWYKQFTTTHEALTHQINKAILQPHTFPTFLTQGITYVKPKSSDTTNPSNYRPITCLPTLYKVITATISKKIEQHLTDNNILTEEQKGCRKNSRGCKEQLIIDSVIMGQTRKEHRNLHIGYIDYKKAFDSIPHSWLIRALEIYKINRHLRQFLAQIMKTWKTKIRLETQTERIQTEELYIRRGIFQGDSLSALWFCLCLNPLSNILNRTEHGFNIRHQKENQHKINHLLYMDDIKLYAATQTQLKELLKITEIFTLDVNMEFGISKCKVLHINKGQWKHHHETETINNETLDNMFDKETYKYLGFQQSTKLNHTHIKTELRTEFKNRLTKLLQTKLNSKNLTKAINTFAIPILTYSFGIIKWSQTDIENIHILIRSQFTKYRKLHPNACKERLTIERKAGGRGIIDIRSLHTKQIQTLRKFFHSKQTSLHTATVKADKNYTPLDLPRADHSADTHSHTQLQQEKMKTWSEKTLHGKHRYHIEQDHVNKKQSYTWLRDGQLFPETEGFLLAIQDKVILTRNYQKHIIKDPTIAEDRCRKCHQQKETIEHITSGCKILAGTEYTARHDSAAKVVHQALATTYRLIENTDRSLLQIHANIHT

SEQ ID NO: 19946 - protein, 1350 aa, Pachyrhynchus sulphureomaculatus
MLNNNNYNNENGRVLRKRTPVVQTATATPQQQLQTNQTTASVETTPDSFTRSDIVGDGNCLFRAVSLYLYGHQNHHEKLREVALRYLQQNWSELHTFSLIEVDDIKDFNNYYNYMRKNGTYGTSLEILALSETQNSNFHIFSKQRRTRHTKITFTDRPTIISTGKYNKTIYLLLTGNPMSGHFELLTPQNTENIPENNRPIKEASGERRNGRGRRGKWQLDQNDEDQATENGPAKSVVLATKPTPTKAGKSQQRMSCTTGINEHAMRCCNENTKPDKEITEKRITRRLDPPTSIPSATDVDTGQTQPPNPGQGPYVLQGQHATTKAGKPRQRLKWTDEMNRTVMRCYYTATKLETITSGYRQQLHRLFLTEYPHLQLLVSEQRVVDQKRVITKNNRLTPLELQTIKDTVAVELNTDQPNNRNNKADSEPASHTQPPSRTQQYPPPRRSITQNNIASTAQHHITDNNMNHSPPSTTSTQQHPESPLIQTLKAKMESHLARWSGTDPTTRNPIPRLIFRQSTQPILNTLNKHIIPQYITDSSTIEDIHTIIYAAAITTLTQNNQKLPQRQGNPNRTKPKFKWQIRIENKINNIRRDLGHLTQFISGNASKRVTQGANKIKSKSPNRTLPEILDTLKQKLSVYAARLRRYKESNERKDTNNLFRRSEKQFYRKTMYNKQIAVTEPPNKQELTDYWKSIWSEPKQHNNNTPWIKAEEDKHKHVTEQENTTFNTQEITETIKHTHNWKCPGIDNVQNFWYKQFTTTHEALAHQINKAILQPHTFPTFLTQGITYVKPKSSDTTNPSNYRPITCLPTLYKIITATISKKIEQHLTDNNILTEEQKGCRKNSRGCKEQLIIDSVIMGQTRKEHRNLHIGYIDYKKAFDSIPHSWLIRALEIYKINQHLRQFLAQIMKTWKTKIRLETQTERIQTEELYIRRGIFQGDSLSALWFCLCLNPLSNILNRTEHGFNIRHQKENQHKINHLLYMDDIKLYAATQTQLKELLKITEIFTLDVNMEFGISKCKVLHINKGQWKHHHETETINNETLDNMFDKETYKYLGFQQSTKLNHTHIKTELRTEFKNRLTKLLQTKLNSKNLTKAINTFAIPILTYSFGIIKWSQTDIENIHILIRSQFTKYRKLHPNACKERLTIERKAGGRGIIDIRSLHTKQIQTLRKFFHSKQTSLHTATVKADKNYTPLDLARADHSADTHSHTQLQQEKMKTWSEKTLHGKHRYHIEQDHVNKKQSYTWLRDGQLFPETEGFLLAIQDKVILTRNYQKHIIKDPTIAEDRCRKCHQQKETIEHITSGCKILAGTEYTARHDSAAKVVHQALATTYRLIENTDPYYKYTPTSIL

SEQ ID NO: 19947 - protein, 1014 aa, Pachyrhynchus sulphureomaculatus
MNRTAMRSYYTATKLETITSGYRPELHRLFLTEYPHLQLLVSEQRVIDQKRVITKNNRLTPLELQTIKDTVAVELNTDQPNNRNNKADSESASHTQPPSRTQQYPPPRRSITQNNIASTAQHHITDNNMNHSPPSTTSTQHHPESPLIQTLKAKMESHLARWSGTDPTTRNPIPRLIFRQSTQPILNTLNKHIIPQYITDLSTIEDIHTIIYAAAITTLTQNNQKLPQRQGNPNRTKPKFKWQIRIENKINNIKRDLGHLTQFISGNASKRVTQGANKIKSKSPNRTLPEILDTLKQKLSVYAARLRRYKESNERKDTNNLFRRSEKQFYRKTMYNKQIAVTEPPNKQELTDYWKSIWSEPKLHNNNTPWIKAEEDKHKHVTEQENTTFNTQEITETIKHTHNWKCPGIDNIQNFWYKQFTTTHEALTHQINKAILQPHTFPTFLTQGITYVKPKSSDTTNPSNYRPITCLPTLYKIITATISKKIEQHLTDNNILTEEQKGCRKNSRGCKEQLIIDSVIMGQTRKEHRNLHIGYIDYKKAFDSIPHSWLIRALEIYKINQHLRQFLAQIMKTWKTKIRLETQTERIQTEELYIRRGIFQGDSLSALWFCLCLNPLSNILNRTEHGFNIRHQKVNHHKINHLLYMDDIKLYAATQTQLKELLKITEIFTLDVNMEFGISKCKVLHINKGQWKCHHETETINNETLDNMFDKETYKYLGFQQSTKLNHTYIKTELRTEFKNRLTKLLQTKLNSKNLTKAINTFAIPILTYSFGIIKWSQTDIENIHILIRSQFTKYRKLHPNACKERLTIERKAGGRGIIDIRSLHTKQIQTLRKFFHSKQTSLHTATVKADKNYTPLDLARADHSADTHSHTQLQQEKMKTWSEKTLHGKHRYNIEQDHVNKKQSYTWLRDGQLFPETEGFLLAIQDKVILTRNYQKHIIKDPTIAEDRCRKCHQQKETIEHITSGCKILAGTEYTARHDSAAKVVHQALATTYRLIENTDPYYKYTPTSILEK

SEQ ID NO: 19948 - protein, 1179 aa, Pachyrhynchus sulphureomaculatus
MSGHFELLTPQNIENIPKNNRPIKEASGERRNGRGRRGKWQLDQNDEDQATENGPAKSVVSATKPTPTKAGKSQQRMSCTTGINEHAMRCCNENTKPDKEITEKRITCRLDPPTSVPSATDVDTGQTQPPKPGQGPYVLQGQHATTKAGKPRQRLKWTDEMNRTVMRCYYTATKLETITSGYRPELHRLFLTEYPHLQLLVSEQRVIDQKRVITKNNRLTPLELQTIKDTVAVGLNTDQPNNRNNKADSEPASHTQPPSRTQQDPSPRRSITQNNIASTAQHHITENNMNHSPPSTTSTQHHPKSPLIQTLKAKMESHLARWSGTDPTTRNPIPRLIFRQSTQPILNTLNKHIIPQYITDLSTIEDIHTIIYAAAITTLTQNNQKLPQRQGNPNRTKPKFKWQIRTENKINNIRRDLGHLTQFISGNASKRVTQGANKIKSKSPNRTLPEILDTLKQKLSVYAARLRRYKESNERKDTNNLFRRSEKQFYRKTMYNKQIAVTEPPNKQELTDYWKSIWSEPKLHNNNTPWIKAEEDKHEHVTEQENTTLNAQEITETIKHTHNWKCPGIDNIQNFWYKQFTTTHEALTHQINKAILQPHTFPTFLTQGITYVKPKSSDTTNPSNYRPVTCLPTLYKIITATISKKIEQHLTDNNILTEEQKGCRKNSRGCKEQLIIDSVIMGQTRKEHRNLHIGYIDYKKAFDSIPHSWLIRALEIYKINQHLRQFLAQIMKTWKTKIRLETQTERIQTEELYIRRGIFQGDSLSALWFCLCLNPLSNILNRTEHGFNIRHQKVNQHKINHLLYMDDIKLYAATQTQLKELLKITEIFTLDVNMEFGISKCKVLHINKGQWKCHHETETINNETLDNMFDKETYKYLGFQQSTKLNHTHIKTELRTEFKNRLTKLLQTKLNSKNLTKAINTFAIPILTYSFGIIKWSQTDIENIHILIRSQFTKYRKLHPNACKERLTIERKAGGRGIIDIRSLHTKQIQTLRKFFHSKQTSLHTATVKADKNYTPLDLARADHSADTHSHTQLQQEKMKTWSEKTLHGKHRYHIEQDHVNKKQSYTWLQDGQLFPETEGFLLAIQDKVILTRNYQKHIIKDPTIAEDRCRKCHQQKETIEHITSGCKILAGTEYIARHDSAAKVVHQALATTYKLIENTDPYYKYTPTSILENEDYKL

SEQ ID NO: 19949 - protein, 1445 aa, Pachyrhynchus sulphureomaculatus
MCNKNAILRCLPCREDEWLSVYESRTVPPDTGRPPGVSSLAVASRLCRSRPFFRGNTMLNNNNYNNENGRVLRRRTPVVQTATATPQQQLQTNQTTASVETTPDSFTRSDIVGDGNCLFRAVSLYLYGHQNHHEKLREVALRYLQQNWSELHTFSLIEVDDIKDFNNYYNYMRKNGTYGTSLEILALSETQNSNFHIFSKQRRTRHTKITFTDRPTIISTGKYNKTIYLLLTGNPMSGHFELLTPQNTENIPENNRPIKEASGERRNGRGRRGKWQLDQNDEDQATENGPAKSVVLATKPTPTKAGKSQQRMSCTTGINEHAMRCCNENTKPDKEITEKRITRRLDPPTSIPSATDVDTGQTQPPKPGQGPYVLQGQHATTKAGKPRQRLKWTDEMNRTVMRCYYTATKLETITSGYRQQLHRLFLTEYPHLQVLVSEQRVVDQKRVITKNNRLTPLELQTIKDTVAVELNTDQPNNRNNKADSEPASHTQPSSRTQQYPPPRRSITQNNIASTAQHHITDNNMNHSPPSTTSTQHHPESPLIQTLKAKMESHLARWSGTDPTTRNPIPRLIFRQSTQPILNTLNKHIIPQYITDSSTIEDIHTIIYAAAITALTQNNQKLPQRQGNPNRTKPKFKWQIRIENKINNIRRDLGHLTQFISGNASKRVTQGANKIKSKSPNRTLPEILDTLKQKLSVYAARLRRYKESNERKDTNNLFRRSEKQFYRKTMYNKQIAVTEPPNKQELTDYWKSIWSEPKQHNNNTPWIKAEEDKHKHVTEQENTTFNTQEITETIKHTHNWKCPGIDNIQNFWYKQFTTTHEALTHQINKAILQPHTFPTFLTQGITYVKPKSSDTTNPSNYRPITCLPTLYKIITATISKKIEQHLTDNNILTEEQKGCRKNSRGCKEQLIIDSVIMGQTRKEHRNLHIGYIDYKKAFDSIPHSWLIRALEIYKINQHLRQFLAQIMKTWKTKIRLETQTERIQTEELYIGRGIFQGDSLSALWFCLCLNPLSNILNRTEHGFNIRHQKENQHKINHLLYMDDIKLYAATQTQLKELLKITEIFTLDVNMEFGISKCKVLHINKGQWKHHHETETINNETLDNMFDKETYKYLGFQQSTKLNHTHIKTELRTEFKNRLTKLLQTKLNSKNLTKAINTFAIPILTYSFGIIKWSQTDIENIHILIRSQFTKYRKLHPNACKERLTIERKAGGRGIIDIRSLHTKQIQTLRKFFHSKQTSLHTATVKADKNYTPLDLARADHSADTHSHTQLQQEKMKTWSEKTLHGKHRYHIEQDHVNKKQSYTWLRDGQLFPETEGFLLAIQDKVILTRNYQKHIIKDPTIAEDRCRKCHQQKETIEHITSGCKILAGTEYTARHDSAAKVVHQALATTYRLIEKTQIPTTNTRQHPYLKMKITSSTGISVSIQINQSPPIDPILLFSAKKEKSPI

SEQ ID NO: 19950 - protein, 1050 aa, Pachyrhynchus sulphureomaculatus
MNRTVMRCYYTATKLETITSGYRPELHRLFLTEYPHLQLLVSEQRVIDQKRVITKNNRLTPLELQTIKDTVAVELNTDQPNNRNNKADTEPASHTQPPSRTQQDPPPRRSITQNNIASTAQHHITDNNMNHSPLSTTSTQHHPESPLIQTLKAKMESHLARWSGTDPTTRNPIPRLIFKQGTQPILNTLNKHIIPQYITDLSTIEDIHTIIYAAAITTLTHNNQKLSQRQGNPNRTKPKFKWQIRIENKINNIRRDLGHLTQFISGNASKRVTQGANKIKSKSPNRTLSEIIDTLKQKLSVYAGRLRRYKESNERKDTNNLFRRSEKQFYRKAMYNKQIAVTEPPNKQELTDYWKSIWSEPKLHNNNTPWIKAEEDKHKHVTEQENPTLNTQEITETIKHTHNWKCPGIDNIQNFWYKQFTTTYEALTHQINKAILRPHTFPNFLTQGITYVKPKSSDTTNPSNYRPITCLPTLYKIITATISKKIEQHLTDNNILTEEQKGCRKNSRGCKEQLIIDSVIMGQTRKEHRNLHIGYIDYKKAFDSIPHSWLIRALEIYKINQHLRQFLTQIMNTWKTKIRLEIQTERIQTEQLYIRRGIFQGDSLSALWFCLCLNPLSNILNRTEHGFNIRHQKVNQHKINHLLYMDDIKLYAATQTQLKELLKITEIFTLDVNMEFGISKCKVLHINKGQWKCHHETETINNETLDNMFDKETYKYLGFQQSTKLNHTHIKTELRTEFKNRLTKLLQTKLNSKNLTKAINTFAIPILTCLFGIIKWSQTDIENILILIRSQFTKYRKLHPNACKERLTIERKAGGRGIIDITSLHTKQIQALRKFFHTKQTSLHTATVKADKKLYPTRLIPGRPPSRYTQSHPITTGKDENVVRKNTPRKTQIPHRTRPRKTKKSYTWLHDGQLFPETEGFLLAIQDKVILTRNYQKHIIKDPTITEDKCRKCHQQKETIEHITSGCKILAGTEYTARHYSAAKVVHQALATTYKLIENTDPYYKYTPTSVLENKDYKLYWDISIHTDKTVSAIIRYYFSVQKRKSHLSN

SEQ ID NO: 19951 - protein, 1139 aa, Pachyrhynchus sulphureomaculatus
MNRTVMRCYYTATKLETITSGYRQQLHRLFLTEYPHLQLLVSEQRVIDQKRVITKNNRLTPLELQTIKDTVAVELNTDQPNNRNNKADSEPASHTQPPSRTQQYPPPRRSITQNNIASTAQYHITDNNMNHSPPSTTSTQHHPESPLIQTLKAKMESHLARWSGTDPTTRNPIPRLIFRQSTQPILNTLNKHIIPQYITDLSTIEDIHTIIYAAAITTQNNQKLPQRQGNPNRTKPKFKWQIRIENKINNIRRDLGHLTQFISGNASKRVTQGANKIKSKSPNRTLPEILDTLKQKLSVYAARLRRYKESNERKDTNNLFRRSEKQFYRKTMYNRQIAVTEPPNKQELTDYWKSIWSEPKLHNNNTPWIKAEEDKHKHVTEQENTTFNTQEITETIKHTHNWKCPGIDNIQNFWYKQFTTTHEALTHQINKAILQPHTFPTFLTQGITYVKPKSSDTTNLSNYRPITCLPTLYKIITATISKKIEQHLTDNNILTEEQKGCRKNSRGCKEQLIIDSVIMGQTRKEHRNLHIGYIDYKKAFDSIPHSWLIRALEIYKINQHLRQFLAQIMKTWKTKIRLETQTERIQTEELYIRRGIFQGDSLSALWFCLCLNPLSNILNRTEHGFNIRHQKVNQHKITHLLYMDDIKLYAATQTQLKELLKITEIFTLDVNMEFGISKCKVLHINKGQWKCHHETQTINNETLDNMFDKETYKYLGFQQSTKLNHTHIKTELRTEFKNRLTKLLQTKLNSKNLTKAINTFAIPILTYSFGIIKWSQTYIENIHILIRSQFTKYRKLHPNACKERLTIERKAGGRGIIDIRSLHTKQIQTRKFFHSKQTSLHTATVKADKNYTPLDLARANHSADTHSHTQLQQEKMKTWSEKTLHGKHRYHIEQDHVNKKQSYTWLRDGQLFPETEGFLLAIQDKVILTRNYQKHIIKDPTVAEDRCRKCHQQKETIEHITSGCKILAGTEYTARHDSAAKVVHQALATTYRLIENTDPYYKYTPTSILENEDYKLYWDIGIHTDKTVSANRPDITFQCKKGKVTYLIDIAVPNDTNIQAKYTEKISKYTDLATEIKRLWRQGKVIIVPLIISATGLTPITFTPHLVQLGLNTDIHRNIQKSVILKTCNIVRSFLNTEW

SEQ ID NO: 19952 - protein, 1156 aa, Pachyrhynchus sulphureomaculatus
MYCKDNMQLPRLENQDSGLKWTDEMNRTVMRCYYTATKLETITSGYRQQLHRLFLTEYPHLQLLVSEQRVVDQKRVITKNNRLTPLELQTIKDTVAIELNTDQPNNRNNKADSEPALHTQPPSRTQQYPPPRRSITQNNIASTAQHHITDNNMNHSPPSTTSTQHHPESPLIQTLKAKMESHLARWSGTDPTTRNPIPRLIFRQSTQLILNTLNKHIIPQYITDSSTIEDIHTIIYAAAITALTQNNQKLPQRQGNPNRTKPKFKWQIRIENKINNIRRDLGHLTQFISGNASKRVTQGANKIKSKSPNRTLPEILDTLKQKLSVYAARLRRYKESNERKDTNNLFRRSEKQFYRKTMYNKQIAVTEPPNKQELTDYWKSIWSEPKQHNNNTPWIKAEEDKHKHVTEQENTTFNTLEITETIKHTHNWKCPGIDNIQNFWYKQFTTTHEALTHQINKAILQPHTFPTFLTQGITYVKPKSSDTTNPSNYRPITCLPTLYKIITATISKKIEQHLTDNNILTEEQKGCRKNSRGCKEQLIIDSVIMGQTRKEHRNLHIGYIDYKKAFDSIPHSWLIRALEIYKINQHLRQFLAQIMKIWKTKIRLETQNRTDPNRRAVHQTGYISGRLAQCSMVFASVSIHSQNILNRTEHGFNIRHQKVNQHKINHLLYMDDIKLYAATQTQLKELLKITEIFTLDVNMEFGISKCKVLHINKGQWKCHHETETINNETLDNMFDKETYKYLGFQQSTKLNHTHIKTELRTEFKNRLTKLLQTKLNSKNLTKAINTFAIPILTYSFGIIKWSQTDIENIHILIRSQFTKYRKLHPNACKERLTIERKAGGRGIIDIRSLHTKQIQTLRKFFHSKQTSLHTATVKADKNYTPLDLARADHSADTHSHTQLQQEKMKTWSEKTLHGKHRYHIEQDHVNKKQSYTWLRDGQLFPETEGFLLAIQDKVILTRNYQKHIIKDPTIAEDRCRKCHQQKETIEHITSGCKILAGTEYTARHDSAAKVVHQALATTYRLIENTDPYYKYTPTSILENEDYKLYWDIGIHTDKTVSANRPDITFQCKKGKVTYLIDIAVPNDTNIQAKYTEKISKYTDLATEIKRLWRQEKVIIVPLIISATGLTPITFTPHLVQLGLNTDIHKNIQKSVILKNM

SEQ ID NO: 19953 - protein, 1481 aa, Pachyrhynchus sulphureomaculatus
MSKNDNYSNDNGRVLRRRTPVVQTAIATPQQQQPQTTQTTASAETTPDSFTRSDIVGDGNCLFRAVSLHLYGHQNHHEKLREVALRYLQQNWSELHTFSLIEVDDIKDFNNYYNYMRKNGTYGTSLEILALSETQNSNFHIFSKQRRTRHTKITFTDRPTIISTGKYNKTIYLLLTGNPMSGHFELLTPQNIENIPDNSRPIKEASGERRNGRGRRGKWQLDQNDEDQATENGPAQSVVPASKPTPTKAGKSQQRMSCTTGINEHAMRCCNEITPDKEITDKRITRRLDPPPPIPSATDVNAGQIQPPKPGQTAYVLQGQHATTKAGKPRQRLKWTDEMNKTVMRCYYTATKLETVTSGYRLELHRLFLTEYPHLQLLVTEQRVIDQKRVIIKNNRLTPFELQTIKDTVAAELNADQVAAELNTDQLNNRNSRADTEPISHTQPPSRKQQDPPPSRSITQNNISEQIASTTRHSTTSIQHHPESPLIQTLKAEMQSHLARWSGTDPTTRNPIPRLIFKQSTQMILNTINKHIIPQYIRDLSTIEDIHTIIYAAAITTITQNNQKLPQRQRDPNSRKPKFKWQIRIENKINNIRRDLGHLTQFMNGNASKRVTQGVDKIKSKSLNRTLPEIVDNLKQKLSVYAARFRRYKESNERKDTNNLFRRSEKQFYRKTMYNEQTVVTEPPNKQELADYWKTVWSESKLHNNNTSWIKAEEDKHKRVTEQENSTLTTEEITETIKHTHNWKCPGIDNIQNFWYKQFTTTHEALTHQINKAILQPHTFPTFLTQGITYVKPKSSDTTNPSNYRPITCLPTLYKIITAAISKKIEQHLTDNNIITEEQKGCRKNSRGCKEQLIIDSVIMGQTRKEHRNLHIGYIDYKKAFDSIPHSWLIRALEIYKINQHLRQFLAQIMKTWKTKIRLETQTERIQTEELYIRRGIFQGDSLSALWFCLCLNPLSNILNRTEHGFNIRHQKGNQHKINHLLYMDDIKLYAATKTQLKELLKITEIFTLDVNMEFGISKCKVLHINKGQWKYHHETETINNETLDNMFDKETYKYLGFQQSTKLNHTHIKTELRTEFKNRLTKLLQTKKLNSKYLTKAINTFAIPILTYSFGIIKWSQTDLENIHILIRSQFTKYRKLHPNACKERLTIERKAGGRGIIDIRSLHTKQIQALRKFFHTKQTSLHTATVKADKNYTPLDLSRVDHPADTHSHIQLQQEKMKTWSEKILHGKHRYHIEQDHVNKKQSYTWLRDGQLFPETEGFLLAIQDKVILTRNYQKHIIKDPTITEDRCRKCHQQKETIEHITSGCKILAGTEYTARHDSAAKVVHQALATTYKLIENTDPYYKYTPTSVLENKDYKLYWDISIHTDKTVSANRPDITFQCKKEKVTYLIDIAVPNDTNIQTKYTEKISKYTDLATEIKRLWKQEKVIIVPLIISATGLTPTTFTPHLVQLGLNTNIHKNIQKSVILKTCNIVRSFLNTQ

SEQ ID NO: 19954 - protein, 975 aa, Pachyrhynchus sulphureomaculatus
MESHLARWSGTDPTTRNPIPRLIFRQSTQPILNTLNKHIIPQYITDLSTIEDIHTIIYSAAITTLTQNNQKLPQRQGNPNRTKPKFKWQIRIENKINNIRRDLGHLTQFISGNASKRVTQGANKIKSKSPNRTLPEILDTLKQKLSVYAARLRRYKESNERKDTNNLFRRSEKQFYRKTMYNKQIAVTEPPNEQELTDYWKSIWSEPKLHNNNTPWIKAEEDKHKHVTEQENTTFNTQEITETIKHTHNWKCPGIDNIQNFWYKQFTTTHEALTHQINKAILQPHTFPTFLTQGITYVKPKSSDTTNPSNYRPITCFPTLYKIITATISKKIEQHLTDNNILTEEQKGCRKNSRGCKEQLIIDSVFMGQTRKEHRNLHIGYIDYKKAFNSIPQSWLIRALEIYKINQHLRQFLAQIMKTWKTKIRLETQTERIQTEELYIRRGIFQGDSLSALLLNRTEHGFNIRHQKVNQHKINHLLYMDDIKLYAATQTQLKELLKITEIFTLDVNMKFGISKCKVLHINKGQWKCHHETETINNETLDNMFDKETYKYLGFQQSTKLNHTHIKTELRTEFKNRLTKLLQTKLNSKNLTKAINTFAIPILTYSFGIIKWSQTDIENIHILIRSQFTKYRKLHPNACKEIIERKAGGRGIIDIRSLHTKQIQTLRKFFHSKQTSLHTATVKSDKNYTPLDLARADHSADTHSHTQLQQEKMKTWSEKTLHGKHRYHIEQDHVNKKQSYTWLRDGQLFPETEGFLLAIQDKVILTRNYQKHIIKDPTIAEDRCRKCHQQKETIEHITSGCKILAGTEYIARHDSAAKVVHQALATTYRLIENTDPYYKYTPTSILENEDYKLYWDIGIHTDKTVSANRPDITFQCKKGKVTYLIDIAVPNDTNIQAKYTEKISKYTDLATEIKRLWRQEKVIIVPLIISATGLTPITFTPHLVKLGLNTDIHRNIQKSVILKTCNIVRSFLNTEW

SEQ ID NO: 19955 - protein, 1303 aa, Pachyrhynchus sulphureomaculatus
MSGHFELLTPQNTENIPENNRPIKEASGERRNGRGRRGKWQLDQNDEDQATENGPAKSVVLATKPTPTKAGKSQQRMSCTTGINEHAMRCCNENTKPDKEITEKRITRRLDPPTSIPSATDVDTGQTQPPNPGQGPYVLQGQHATTKAGKPRQRLKWTDEMNRTVMRCYYTATKLETITSGYRQQLHRLFLTEYPHLQLLVSEQRVVDQKRVITKNNRLTPLELQTIKDTVAVELNTDQPNNRNNKADSEPASHTQPPSRTQQYPPPRRSITQNNIASTTQHHITDNNMNHSPPSTTSTRHHPESPLIQTLKAKMESHLARWSGTDPTTRNPIPRLIFRQSTQPILNTLNKHIIPQYITDSSTIEDIHTIIYAAAITTLTQNNQKLPQRQGNPNRTKPKFKWQIRIENKINNIRRDLGHLTQFISGNASKRVTQGANKIKSKSPNRTLPEILDTLKQKLSVYAARLRRYKESNERKDTNNLFRRSEKQFYRKTMYNRQIAVTEPPNKQELTDYWRSIWSEPKQHNNNTPWIKAEEDKQKHVTEQENTTFNTQEITETIKHTHNWKCPGIDNIQNFWYKQFTTTHEALTHQINKAILQPHTFPTFLTQGITYVKPKSSDTTNPSNYRPITCLPTLYKIITATISKKIEQHLTDNNILTEEQKGCRKNSRGCKEQLIIDSVIMGQTRKEHSNLHIGYIDYKKAFDSIPHSWLIRALEIYKINQHLRQFLAQIMKTWKTKIRLETQTERIQTEELYIRRGIFQGDSLSALWFCLCLNPLSSILNRTEHGFNIRHQKENQHKINHLLYMDDIKLYAATQTQLKELLKITEIFTLDVNMEFGISKCKVLHINKGQWKHHHETETINNETLDNMFDKETYKYLGFQQSTKLNHTHIKTELKTEFKNRLTKLLQTKLNSKNLTKAINTFAIPILTYSFGIIKWSQTDIENILIILIRSQFTKYRKLHPNACKERLTIERKAGGRGIIDIRSLHTKQIQTLRKFFHSKQTSLHTATVKADKNYTPLDLARADHSADTHSHTQLQQEKMKTWSEKTLHGKHRYHIEQDHVNKKQSYTWLRDGQLFPETEGFLLAIQDKVILTRNYQKHIIKDPTIAEDRCRKCHQQKETIEHITSGCKILAGTEYTARHDSAAKVVHQALATTYRLIENTDPYYKYTPTSILENEDYKLYWDIGIHTDKTVSANRPDITFQCKKGKVTYLIDIGVPNDTNIQAKYTEKISKYTDLATEIKRLWRQEKVIIVPLIISATGLTPITFTPHLVQLGLNTDIHRNIQKSVILKTCNIVRSFLNTEW

SEQ ID NO: 19956 - protein, 974 aa, Pachyrhynchus sulphureomaculatus
MVRHRPHNKKSHPCLIFKQSTQPILNTLNKHIIPQYITDLSTIEDIHTIIYAAAITTLTQNNQKLPQREGNPNRTKPKFKWQIRIENKINNIRRDLGHLTQFISGNASKRVTQGANKIKSKSPNRTLPEILDTLKQKLSVYAARLRRYQESNERKDTNNLFRRSEKQFYQKTMYNKQIEVTEPPNKQELTDYWKSIWSEPKLHNNNTPWIKAEEDKHKHVTEQENSTLNTQEITETIKHTHNWKCLGIDNIQNFWYKQFTTTHEALTHQINKAILQPHTFPTFLTQGITYVKPKSSDTTNPSNYRPITCLPTLYKIITATISKKIEQHLTDNNILTEEQKGCRKNSRGCKEQLIIDSVVMGQTRKEHRNLHIGYIDYKKAFDSIPHSWLIRALEIYKINQHLRQFLAQIMKTWKTKIRLETQTERIQTEELYIQGDSLSALWFCLCLNLLSNILNRTEHGFNIRHQKVNQHKINHLLYMDDIKLYAATQTQLKELLKITEIFTLDVNMEFGISKCKVLHINKGQWKFHHETETINNETLDNMFDKETYKYLGFQQSTKLNHTHIKTELRTEFKNRLTKLLQTKLNSKNLTKAINTFAIPILTYSFGIIKWSQTDIENIHILIRSQFTKYRKLHPNACKERLTIERKAGGRGIIDIRSLHTKQIQALRKFFHSKQTSLHTATVKADKNYTPLDLARADHSADTHSHVQLQQEKMKTWSEKTLHGKHRYHIEQDHVNKKQSYTWLQDGQLFPETEGFLLAIQDKVILTRNYQKHIIKDPTIAEDRCRKCHQQKETIEHITSGCKILAETEYTARHDSAAKVVHQALATTYKLIENTDPYYKYTPTSILENKDYKLYWDISIHTDKTVSANRPDITFQCKKGKVTYLIDIAVPNDTNIQTKYTEKISKYLAMEIKRLWKQEKVSIVPLIISATGLTPTTFTPHLVQLGLNTNIHKNIQKSVILKTCNIVRSFLNTQW

SEQ ID NO: 19957 - protein, 927 aa, Pachyrhynchus sulphureomaculatus
MNHSPPSTTSTQHHPESPLIQTLKAKMESHLARWSGTDPTTRNPIPRLIFRQSTQPILSTLNKHIIPQYITDSSTIEDIHTIIYAAAITTLTQNNQKLPQRQGNPNRTKPKFKWQIRIENKINNIRRDLGHLTQFISGNASKRVTQGANKIKSKSPNRTLPEILDTLKQKLSVYAARLRRYKESNERKDTNNLFRRSEKQFYRKTMYNKQIAVTEPPNKQELTDYWKSIWSEPKQHNNNTPWIKAEEDKHKHVTEQENTTFNTQEITETIKHTHNWKCPGIDNIQNFWYKQFTTTHEALTHQINKAILQPHTFPTFLTQGITYVKPKSSDTTNPSNYRPITCLPTLYKIITATISKKIEQHLTDNNILTEEQKGCRKNSRGCKEQLIIDSVIMGQTRKEHRNLHIGYIDYKKAFDSIPHSWLIRALEIYKINQHLRQFLAQIMKTWKTKIRLETQTERIQTEELYIRRGIFQGDSLSALWFCLCLNPLSNILNRTEHGFNIRHQKENQHKINHLLYMDDIKLYAATQTQLKELLKITEIFTLDVNMEFGISKCKVLHINKGQWKHHHETETINNETLDNMFDKETYKYLGFQQSTKLNHTHIKTERRTEFKNRLTKLLQTKLSKQSSLHTATVKADKNYTPLDLARADHSADTHSHTQLQQEKMKTWSEKTLHGNHRYHIEQDHVNKKQSYTWLRDGQLFPETEGFLLAIQDKVILTRNYQKHIIKDPTIAEDRCRKCHQQKETIEHITSGCKILAGTEYTARHDSAAKVVHQALATTYRLIENTDPYYKYTPTSILENEDYKLYWDIGIHTDKTVSANRPDITFQCKKGKVAYLIDIAVPNDTNIQAKYTEKISKYTDLATEIKRLWRQEKVIIVPLIISATGLTPITFTPHLVQLGLNTDIHRNIQKSVILKTCNIVRSFLNTEW

SEQ ID NO: 19958 - protein, 809 aa, Pachyrhynchus sulphureomaculatus
MYNKQIAVTEPPNKQELTDYWKSIWSEPKLHNNNTPWIKAEEDKHKHVTEQENTTFNTQEITETIKHTHNWKCPGIDNIQNFWYKQFTTTHEALTHQINKAILQPHTFPTFLTQGITYVKPKSSDTTNPSNYRPITCLPTLYKIITATISKKIEQHLTDNNILTEEQKGCRKNSRGCKEQLIIDSVIMGQTRKEHRNLHIGYIDYYKKAFDSIPHSWLIRALEIYKINQHLRQFLAQIMKTWKTKIRLETQTERIQTEELYIRRGIFQGDSLSALWFCLCLNPLSNILNRTEHGFNIRHQKVNQHKINHLLYMDDIKLYAATQTQLKELLKITEIFTLDVNMEFGISKCKVLHINKGQWKHHHETETINNETLDNMFDKETYKYLGFQQSTKLNHTHIKIELRTEFKNRLTKLLQTKLNSKNLTKAINTFAIPILTYSFGIIKWSQTDIENIHILIRSQFTKYRKLHPNACKERLTIERKAGGRGIIDIRSLHTKQIQTLRKFFHSKQTSLHTATVKADKNYTPLDLARADHSADTHSHTQLQEEKMKTWSEKTLHGKHRYHIEQDHVNKKQSYGLRDGQLFPETEGFLLAIQDNVILTRNYQKHIIKDPTIAEDRCRKCHQQKETIEHITSGCKILAGTEYTARHDSAAKVVHQALATTYRLIENTDPYYKYTPTSILENEDYKLYWDIGIHTDKTVSANRPDITFQCKKGKVTYLIDIAVPNDTNIQAKYTEKISKYTDLATEIKRLWRQEKVIIVPLIISATGLTPITFTPHLVQLGLNTDIHRNIQKSVILKTCNIVRSFLNTEW

SEQ ID NO: 19959 - protein, 1227 aa, Pachyrhynchus sulphureomaculatus
MSCTTGINEHAMRCCNENTKPDKEITEKRITRRLDPPTSIPSATDVDTGQTQPPKTGQGPYVLQGQHATTEAGKPRQRLKWTDEMNRTVMRCYYTATKLETITSGYRQQLHRLFLTDYPHLQLLVSEQRVVDQKRVITKNNRLTPLEVQTIKDSVAVELNTDQPNNRNNKADSEPASHTQPPSRTQQYPPPRRSITQNNIASTAQHHITDNNMNHSPPSTTSTQHHPESPLIQTLKAKMESHLARWSGTDPTTRIPIPRLIFRQSTQPILNTLNKHIIPQYITDSSTIEDIHTIIYAAAITTLTQNNQKLPQRQGNPNRTKPKFKWQIRIENKINNIRRDLGHLTQFISGNASKRVTQGANKIKSKSPNRTLPEILDTLKQKLSVYAARLRRYKESNERKDTNNLFRRSEKQFYRKTMYNKQMAVTEPPNKQELTDYWKSIWSEPKQHNNNTPWIKVEEDKHKHVTEQENTTFNTQEITETIKHTHNWKCPGIDNIQNFWYKQFTTTHEALTHQINKAILQPHTFPTFLTQGITYVKPKSSDTTNPSNYRPITCLPTLYKIITATISKKIEQHLTDNNILTEEQKGCRKNSRGCKEQLIIDSVIMGQTRKEHRNLHIGYIDYKKAFDSIPHSWLIRALEIYKINQHLRQFLAQIMKTWKTKIRLETQTERIQTEELYIRRGIFHGDSLSALWFCLCLNPLSNILNRTEHGFNIRHQKENQHKINHLLYMDDIKLYAATQPQLKELLKITEIFTLDVNMEFGISKCKVLHINKGQWKCHHETETINNETLDNMFDKETYKYLGFQQSTKLNHTHIKTELRTEFKNRLTKLLQTKLNSKNLTKAINTFAIPILTYSFGIIKWSQTDIENIHILIRSQFTKYRKLHPNACKERLTIERRQAGGRGIIDIRSLHTKQIQTLRKFFHSKQTSLHTATVKADKNYTPLDLARADHSADTHSHTQLQQEKMKTWSEKTLHGKHRYHIEQDHVNKKQSYTWLRDGQLFPETEGFLLAIQDKVILTRNYQKHIIKDPTIAEDRCRKCHQQKETIEHITSGCKILAGTEYTARHDSAAKVVHQALATTYRLIENTDPYYKYTPTSILENEDYKLYWDIGIHTDKTVSANRPDITFQCKKGKVTYLIDIAVPNDTNIQAKYTEKISKYTDLATEIKRLWRQQKVIIVPLIISATGLTPITFTPHLVQLGLNTDIHRNIQKSVILKTCNIVRSFLNTEW

SEQ ID NO: 19960 - protein, 1362 aa, Pachyrhynchus sulphureomaculatus
MRKNGTYGTSLEILALSETQNSNFHIFSKQRRTRHTKITFTDRPTIISTGKYNKTIYLLLTGNPMSGHFELLTPQNIENIPENNRPIKEASGERRNGRGRRGKWQLDQNDEDQATENGPAKSVVSATKQTPTKAGKSQQRMSCTTGINEHAMRCCNENTKPDKEITEKRITRRLDPPTSIPSTTDVDTGQTQPPKPGQGPYVLQGQDATTKAGKPRQRLKWTDEMNRTVMRCYYTATKLETITSGYRQQLHRLFLTEYPHLQLVVSEQRVIDQKRVITKNNRLTPLELQTIKDTVAVELNTDQPNNRNNKADSEPASHTQSPSRTQQYPPPRRSITQNNIASTAQHHITDNNMNHSPPSTTSTQHHPESPLIQTLKAKMESHLARWSGTDPTTRNPIPRLIFRQSTQPILNTLNKHIIPQYITDLSTIEDIHTIIYAAAITTLTQNNQKLPQRQGNPNRTKPKFKWQIRIKNKINNIRRDLGHLTQFISGNASKRVTQGANKIKSKSPNRTLPEILDTLKQKLSVYAARLRRYKESNERKDTNNLFRRSEKQFYRKTMYNKQIAVTEPPNKQELTDYWKSIWSEPKLHNNNTPWIKAEEDKHKHVTEQENTTFNTQEITETIKHTHNWKCPGIDNIQNFWYKQFTTTHEALTHQINKAILQPQTFPTFLTQGITYVKPKSSDTTNPSNYRPITCLPTLYKIITATISKKIEQHLTDNNILTEEQKGCRKNSRGCKEQLIIDSVIMGQTRKEHRNLHIGYIDYKKAFDSIPHSWLIRALEIYKINQHLRQFLAQIMKTWKTKIRLETQTERIQTEELYIKRGIFQGDSLSALWFCLCLNPLSNILNRTEHGFNIRHQKVNHHKINHLLYMDDIKLYAATQTQLKELLKITEIFTLDVNMEFGISKCKVLHINKGQWKCHHETETINNETLDNMFDKETYKYLGFQQSTKLNHIHIKTELRTEIKNRLQTKLNSKNLTKAINTFAIPILTYSFGIIKWSQTDIENIHILIRSQFTKYRKLHPNACKERLTIERKAGGRGIIDIRSLHTKQIQTLRKFFHSKQTSLHTAAVKADKNYTPLDLARADHSADTHSHTQLQQEKMKTWSEKTLHGKHRYHIEQDHVNKKQSYTWLQDGQLFPETEGFLLAIQDKVILTRNYQKHIIKDPTIAEDRCRKCHQQKETIEHITSGCKILAGTEYTARHDSAAKVVHQALATTYKLIENTDPYYKYTPTSILENEDYKLYWDIGIHTDKTVSANRPDITFQCKKGKVTYLIDIAVPNDTNIQTKYTEKISKYTDLATEIKRLWRQEKVIIVPLIISATGLTPITFTPDLVQLGLNTDIHRNIQKSVILKTCNIVRSFLNTEW

SEQ ID NO: 19961 - protein, 1223 aa, Pachyrhynchus sulphureomaculatus
MSCTTGINEHAMRCCNENTKPDKEITEKRITRRLDPPTSIPSATDVDTGQTQPPKPGQGPYVLQGQHATTKAGKPRQRLKWTDEMNRTVMRCYYTATKLETITSGYRQQLHRLFLTEYPHLQLLVSEQRVVDQKRVITKNNRLTPLELQTIKDTVAVELNTDQPNNRNNKADSEPASHTQPPSRTQQYPPPRRSITQNNIANTAQHHITDNNMNHSPPSTTSTQHHPESPLIQTLKAKMESHLARWSGTDPTTRNPIPRLIFRQSTQPILNTLNKHIIPQYITDSSTIEDIHTIIYAAAITTLTQNNQKLPQRQGNPNRTKPKFKWQIRIENKINNIRRDLGHLTQFISGNASKRVTQGANKIKSKSPNRTLPEILDTLKQKLSVYAARLRRYKESNERKDTNNLFRRSEKQFYRKTMYNKQIAVTEPPNKQELTDYWKSIWSEPKQHNNNTPWIKAEEDKHKHVTEQENTTFNTQEITETIKHTHNWKCPGIDNIQNFWYKQFTTTHEALTHQINKAILQPHTFPTFLTQGITYVKPKSSDTTNPSNYRPITCLPTLYKIITATISKKIEQHLTDNNILTEEQKGCRKNSRGCKEQLIIDSVIMGQTRKEHRNLHIGYIDYKKAFDSIPHSWLIRALEIYKINQHLRQFLAQIMKTWKTKIRLETQTERIQTEELYIRRGIFQGDSLSALWFCLCLNPLSNILNRTEHGFNIRHQKENQHKINHLLYMDDIKLYAATQTQLKELLKITEIFTLDVNMEFGISKCKVLHINKGQWKHHHETETINNETLDNMFDKETYKYLGFQQSTKLNHTHIKTELRTEFKNRLTKLLQTKLNSKNLTKAINTFAIPILTYSFGIIKWSQTDIENIHILIRSQFTKYRKLHPNACKERLTIERKAGGRGIIDIRSLHTKQIQTLRKFFRSKQTSLHTATVKADKNYTPLDLARADHSADTHSHTQLQQEKMKTWSEKTLLHGKHKYHIEQDHVNKKQSYTWLRDGQLFPETEGFLLAIQDKVILTRNYQKHIIKDPTIAEDRCRKCHQQKETIEHITSGCKILAGTEYTARHDSAAKVVHQALATTYRLIENTDPYYKYTPTSILENEDYKLYWDIGIHTDKTVSANRPDITFQCKKGKVAYLIDIAVPNDTNIQAKYTEKISKYTDLATEIKRLWRQEKVIIVPLIISATGLTPITFTPHLVQLGLNTDIHRNIQMSVILKTCNIFQVIP

SEQ ID NO: 19962 - protein, 1004 aa, Pachyrhynchus sulphureomaculatus
MNHSPPSTTSTQHHLESPLIQTLKAKMESHLARWSGTDPTTRNPIPRLIFRQSTQPILNTLNKHIIPQYITDLSTIEDIYTIIYAAAITTLTQNNQKLPQRQGNPNRTNPKFKWQIRIENKINNIRRDLGHLTQFISGNASKRVTHGANKIKSESPNRTLPEILDTLKQKLSVYAARLRRYKESNERKDTNNLFRRSEKQFYRKTMYNKQIAVTEPPNKQEVTDYWKSIWSEPKLHNNNTPWIKAEEDKHKHVTEQESTTFNTQEITETIKHTHNWKCPGIDNIQNFWYKQFTTTHEALTHQINKAILQPHTFPTFLTQGITYVKPKSSDTTNPSNYRLITCLPTLYKIITATISKKIEQHLTDNNILTEEQKRCRKNSRGCKEQLIIDSVIMGQTRKEHRNLHIGYIDYKKAFDSIPHSWLIRALEIYKINQHLRQFLAQIMKTWKTKIRLETQTERIQTEELYIRRGIFQGDSLSALWFCLCLNPLSNILNRTEHGFNIRHQKVNQHKINHLLYMDDIKLYAATQTQLKELLKITEIFTLDVNMEFGINKCKVLHINKGQWKRHHETETINNETLDNMFDKETYKYLGFQQSTKLNHTHIKTELRTEFKNRLTKLLQTKLNSKNLTKAINTFAIPILTYSFGIIKWSQTDIENIHILIRSQFTKYRKLHPSACKERLTIERKAGGRGIIDIRSLHTKQIQTLRNSDSESRQNSLDLSRLSPGRPLSRHTQSHSITTGKDENVVRENTPRKTQIPHRTRPRNKKQSYTWLRDGQLFPETEGFLLAIQDKVILTRNYQKHIIKDPTIAEDRCRKCHQQKETIEHITSGCKILAGTEYTARHDSAAKVVHQALDTTYRLIENTDPYYKYTPTSILENEDYKLYWDIGIHTDKTVSANRPDITFQCKKGKVTYLIDIAVPNDTNIQAKYTEKISKYTDLATEIKRLWRQEKVIIVPLIISATGLTPITFTPHLVQLGLNTDIHRNIQKSVILKTCNIVRSFLNTEW

SEQ ID NO: 19963 - protein, 1230 aa, Listronotus oregonensis
MYSRMHIRAVSLIYTYRPHITIYMIATKYYIIHTFYIKTSLRYPSPYRYICIYYIPSRDKDWSDSNPAKWNHKAQHPHITPRYTSFFFFGGKPGLPQIPQNPPGGDLGQAGPATTAIPYRGWGRQHWTRDMNTTLMNAYFRVTEGGTKRTRFRDQLIEMWNEAYPDKPFTRAHLSAHINNIRTRGLLAPDELKAMKEAALQNSPTRRPQNIRRTINRRLAEPEEQAQIPEQPEAQPQDQRPELEEIRLMFQEVHHRYAGVAWEERPRIQRLKANGETKSAIMTINLVLSGIFRHLDTFEELCHAVYCAASVAVGILLTKPTLYGNEQRQPPWEKRLEGKITLRQDIGILYNYVSRQNPSRKVEKKARTYARKAKIGHTDAQYRRNLEVHLEMLKQKAAALGSRLRRYHKRSLRFRQNSIFLGNQKLFFRGLDSQNPNQKTAPPEEKQMVDFWEDIWSQNIQHNAEAPWIYSEKQEARQMEEMPEITVSENDIRATVRRLKNWTAPGIDGIHNYWWKSFTETHVALARTIQKAIQNPETVPKFLTHGITYMQPKKGDLAQPKNYRPITCLPTAYKILTSTVGFKLNCHLKNNHVLAWEQNGCRQRARGCKEILIIDTVVTKQAKKRLKNISMAWIDYQKAFDSVPHSWLLQVLEIYKVDQGTIRLLRHLMSTWRTTLSIQGTAHTYKTREIPIRRGIFQGDSLSPLWFCLALNPLSNMLNRSSYGYAIDDRATLTHLFYMDDLKLYSRGQQHLEGQLELVRSFSQDIRMVFGIEKCAVVHVRRGKLIENESVVLVGGERIESLSLEKTYKYLGIQQTYEIQQKENKELAQRELMRRTNKILKTQLSAKNIISALNIWAIPALTYTAGVLRWSKTDLQTMDRQVRAALKKHGMLHPTSSIERLYLPRNEGGRGLVSLEEANLKERDNLRKYFLAKRSPIYQRIAACDKDYTALNLSVLTESERETHLDQLRQSWRSKALHGRFCASLYQNDVDRVRSNTYLTSGYLFPQTEGMLLAIQDQVVPTRTHARLIMHQQVETTKCRLCNRAEETVQHLSAGCSVIANTRYLERHNNMGKVVHQLICRGAGLLEAFTPHHQYNPEPVMENDTIKVYWDFTIITDRPMQHNRPDMVVWNKSEKNAILIDFAVPQDYNLTKTYTEKVAKYEALAREIKHIWDLRSVKVMPMIISVNGLVHKKLKQHASELNLPDNAITWMQKAVILGTVGIIRSVVSPF

SEQ ID NO: 19964 - protein, 982 aa, Pogonognathellus flavescens
MSSKTNIDLEDHDIPVLSPIIRRLRRRKNQSNDENGYLTQAVTNNHTQDDDSKVFYKSTTTNTTQSTNSTITNHDTISEFNTPCPECRKLCKGERGVAIHFAKSHGSLYRNEVSSQYNNSMEPTQERKIPPAIAKSNENLHKYNELFDSLLNEFSCDEISFTILFDAFMKDLYNEQDFLPAPSHPANRYFNIRKNKTIFIQNENNGSYQKSTNPQRRDKNRRKNSNKQYQNQLIQHYYYFNRKKCVNLLTNNQNHKICQASIEDIFQCYSERWSTVNNKVRSNYNSSPSKLEQFNLDNEYSTSISKEEVENALKGMNTDTSTGTDRIYVKTLKTLDVCGILCKIYSYMYTWNIVPKILKKARTILIYKNGDEKDPKNFRPISICSTIRRLYERIITKKFENYYKTCECQNGSSRIPGTFINTSILDGCLKKAKKDKDDLMILFLDINKAYDVVGHKHLIQTLSSIHIPTALRAMLTNLISNNLTSIEIRGKQSDDIKFNRGIFQGSPLSSILFNMSIDHILMDLSDKEVSQSLGYKINQDASYLSVLGFMDDTVLIANSETSGILLNNSAKFLFQEIGLHLNTEKTQCILLNKGKLTQKSIQFDVNDSVKTIGNEDVIKYLGVNFNSKIILDKFKFLKNLTDSLNMIVSSPLLYPQQKLNIFNIYIWPKYIYTLQSSNLSLFSNGFLEDIDKIIRSAVKEMIQLPSDFPNSALYSSPKRKGIGVVCVKWEAAIQNFNILFLLSVKKNKYVLDLRDLDDEMSLCIKKLDIEDEMKAMDTSKLSHKQITTNIRDILRNREYISWCALKCHGRGAILFQECEKINKSLFFKEGLSCSEWISYLKMIPNVSPSRSIPGRSQDGTRCRRCNENFETLSHILGYCPFGLLLRNTRHHTIRTILASALRSMNMDVYEEVHTVSNNDSNRRVDILALDKKSKQGYILDPTIRFEGDTEQAKQVHEEKVTIYKPCVNDLQQKYNFNYPIEG

SEQ ID NO: 19965 - protein, 1567 aa, Amphibalanus amphitrite
MLQCNITMYNVIQAAGALATLIETAVGEKNEAAWTRLFLFAFLALHLPSTHQASADSSTLTAKVKRQISMYMDSDSSLQRASAAAAGPNRNGTVHRKMERHRPAEMSGEILQRKVAAKLSDGDIQGSIRMLASSEEIVQNSTDVAESLKLKHPPAPSDLNMPPPPDAGTQPYFANEAEVRTTINSFDTGSSAGLDGLRPAHLKDLTSRSAGEAGVRLITALTALVNMALSGELPRSARAAFFGAALTALRKSDGGVRPIAVGCTYRRLAAKLALRPLSAEVGEQLRPTQLGYGTQGGCEAAAHATRAFSRSLGTESVMVKIDMKNAFNTVRRDHFLRRVRESAPSMYHLLWQAYSEPTPLFYGTSEISSATGLQQGDPCGPAVFSLAVQQVISAATAPFNCWYLDDGTLGGKVSTICADLKELTTDMAKIGLDINPAKCEIILPSTATDEQRVSAVGKIHQLLPRAPVVPDAELTVLGAPITDTAARAVMAKKMEELDLMIERLHHLDAHSAFFLLCNCLWLPKLQYLLRAAPLYEQPDLLQMIDKKLKSSLAGLTNVRFDDASWEQAVLPVRYGGIGLRRTEDVALPSYVASLHRSQLNICALLPTACTASVMQERAKVTEVWQSKAGDRSAPDGEAKNHQRAWDSPLAERHLDSLLSQANQFARARMLSAATPESGAWLRAIPSATIGTLLNNETLRISIALRVGAAVCSPHRCRCGSLADGLGYHSLTCRYSAGRHPRHTALNDVLRRALLSANIPALLEPIGLDRGDGKRPDGMTLYPFSSGMSLVWDATCVSTFADCNIASAAVAAGQAARGAEVRKRYKYADLAQRYRFEPVAFETGGACGPGTRTLIRELGARLTAASGEKRETEWLWQRLSIAVMRGNATSVLLTSGLLPQQVNTTTNTASVKPPAVALATSPAAEAAKSLAGGAPASVPTPTSSYSSGKSYQNDDSGSRWRSSPRRSSSPLRARENELPSPRWLSDVSRRGGGSPHPPKARRPRPSRSVERASSCPDRAVKENLERLQVASAGSRRCYGDLADPGGSRFAASQQMRPPSSLRKSSEGGKSLQLHCGKAQTDSRDLQLIPTIRPLDSDKDGKDPLHIGLPNYGNSCYQNATLQSLLGLRPFVSEMVSLISDPGVSDQCRTLRAVAKLMVLRQKALSKSVFSHLNDLRDVFAEIDPAFRGIEMQDANEFLLRLLDTLKEEIDAQRPTDNPVRDNFQYQTIESYMCTKCHETVLRQQENISWFVSVPRHQGTEAPTLLDALRLSMRPDRRELLCQHCRHDECRVTTKISQLPRTLILQLNRYAFLGGKSIKIRANVDIPKFLSLNEYVADDVTRPPEWKCRKPSLCTLSDFEESEAPRSGPSPPPAACGPSSVPTASAGPPESAAAGSPVTAGAAAPARPMSATGAEPPPLPPAQAELVAQDADPESNPARTREDRELKEAMMRSLEEGAPADASEQVHFPKSCVEDDQSLCSTDMAGDFTYRLVSVVSHHGGNTHSGHYVSDVYSVGRDRWYRYNDSRVSCVDEAEVLGEGHQRNGYIFFYLHKDLCNQAVSVEGAGGAL

SEQ ID NO: 19966 - protein, 1759 aa, Amphibalanus amphitrite
MHIVISLSEMKKPLTPRLLDRSTNWNNGRHICKMNATSDDDDSDCHIAGFDPVSGKWIAAKSGPSETRPESQQQSHQQTEELQRCTACPRCDTTNKRKRRIQCKSCNRHWHLTCVRLKRAQADVLPCWWCPECIFTSGSPSQCSAGASNADPSVSAEVSCPPADPVQSPAAATTICDGGDLALKLANLKQTRPVVRRIPRGARIQAAGALATLIETAVGEKNEAAWTRLFLFAFLALHLPSTHQASADSSTLTAKVKRQISMYMDSDSSLQRASAAAAGPNRNGTVHRKMERHRPAEMSGEILQRKVAAKLSDGDIQGSIRMLASSEEIVQNSTDVAESLKLKHPPAPSDLNMPPPPDAGTQPYFANEAEVRTTINSFDTGSSAGLDGLRPAHLKDLTSRSAGEAGVRLITALTALVNMALSGELPRSARAAFFGAALTALRKSDGGVRPIAVGCTYRRLAAKLALRPLSAEVGEQLRPTQLGYGTQGGCEAAAHATRAFSRSLGTESVMVKIDMKNAFNTVRRDHFLRRVRESAPSMYHLLWQAYSEPTPLFYGTSEISSATGLQQGDPCGPAVFSLAVQQVISAATAPFNCWYLDDGTLGGKVSTICADLKELTTDMAKIGLDINPAKCEIILPSTATDEQRVSAVGKIHQLLPRAPVVPDAELTVLGAPITDTAARAVMAKKMEELDLMIERLHHLDAHSAFFLLCNCLWLPKLQYLLRAAPLYEQPDLLQMIDKKLKSSLAGLTNVRFDDASWEQAVLPVRYGGIGLRRTEDVALPSYVASLHRSQLNICALLPTACTASVMQERAKVTEVWQSKAGDRSAPDGEAKNHQRAWDSPLAERHLDSLLSQANQFARARMLSAATPESGAWLRAIPSATIGTLLNNETLRISIALRVGAAVCSPHRCRCGSLADGLGYHSLTCRYSAGRHPRHTALNDVLRRALLSANIPALLEPIGLDRGDGKRPDGMTLYPFSSGMSLVWDATCVSTFADCNIASAAVAAGQAARGAEVRKRYKYADLAQRYRFEPVAFETGGACGPGTRTLIRELGARLTAASGEKRETEWLWQRLSIAVMRGNATSVLLTSGLLPQQVNTTTNTASVKPPAVALATSPAAEAAKSLAGGAPASVPTPTSSYSSGKSYQNDDSGSRWRSSPRRSSSPLRARENELPSPRWLSDVSRRGGGSPHPPKARRPRPSRSVERASSCPDRAVKENLERLQVASAGSRRCYGDLADPGGSRFAASQQMRPPSSLRKSSEGGKSLQLHCGKAQTDSRDLQLIPTIRPLDSDKDGKDPLHIGLPNYGNSCYQNATLQSLLGLRPFVSEMVSLISDPGVSDQCRTLRAVAKLMVLRQKALSKSVFSHLNDLRDVFAEIDPAFRGIEMQDANEFLLRLLDTLKEEIDAQRPTDNPVRDNFQYQTIESYMCTKCHETVLRQQENISWFVSVPHHQGTEAPTLLDALRLSMRPDRRELLCQHCRHDECRVTTKISQLPRTLILQLNRYAFLGGKSIKIRANVDIPKFLSLNEYVADDVTRPPEWKCRKPSLCTLSDFEESEAPRSGPSPPPAACGPSSVPTASAGPPESAAAGSPVTAGAAAPARPMSATGAEPPPLPPAQAELVAQDADPESNPARTREDRELKEAMMRSLEEGAPADASEQVHFPKSCVEDDQSLCSTDMAGDFTYRLVSVVSHHGGNTHSGHYVSDVYSVGRDRWYRYNDSRVSCVDEAEVLGEGHQRNGYIFFYLHKDLCNQAVSVEGAGGAL

SEQ ID NO: 19967 - protein, 1039 aa, Amphibalanus amphitrite
MDEMAALSRRVASKITDGDIRGALRALTSDDSFAPPTDEVIKKMQEKHPEPPNDLRNIPPPDDTDVPLVASETDVLKAINSFPPSSSAGLDGIRPAHLRSLLTKHTAEAGARLLTALTALTNLALSGRLPEYATPAFFGASLISLRKKDGGLRPIAVGSVYRRIAGKVAATAVSSAIGAQLRPVQLGVATRNGCEAAVHATRAYFDLCEASASNRVLVKLDISNAFNTVRRDAMLEAVRTRAPEIYSFVWQGYNNAAPLFIGGSKILSQAGVQQGDPLSSLLFSLTVDSAARAPNTEMNTWYLDDGTLAGPLPDVITSIKQVKAEMNKVGLAINAGKCEATFLGAFADDTNLSALQELQSILPNIREVPADELELLGAPIHDAQTRRALLQGQLMVEKLVRRLLALEEAHQAFFLLKSYVSVPRLLYLLRSSPAYRYPAQLNRIDEAVRRGMETITNVQLRGVSWRQATLPISLGGLGVRRVTDVALPAHLASQVASADTIASINGSAADRVSELTRCLISEWERRTGLPPPEAHKRCYQREWDRAETARIGEQLLEESKTDVDRARLRAAAQPHSGAWLNAFPATSVGTLLDSDTLRTAVVLRVGAEICAPHRCRCGADIDERGLHCLSCQLSAGRFPRHAELNSVIKRGLATAGMPSVLEPAGLDRGDGRRPDGMTTFPYAGGKCLVWDATCVDTFSASSVKESAARASSAATVAEKRKRHRYADISRRYHFHPVAIETSGALGPDSYSFLKELGRRIVKTTGDRRDFERLMQRVSVAVVRGNATAVRLASVSVRPSHRANIEPKSLPWPPTNSTGTEAKLPPELPTTTSLTTRPAEQETLDPLNMGLPNNGNSCYQNAVLQSLFGLSPFRNDMIAQVTASKSDMCPTLHAVGKLMMFRQKALEKDIEDHLRKLRGVFTSIDPSFGGTEMQDADEFLLCLLDTMKDECRSAENPIRDNFQYQTVESFQCTKCHETVLKRQENISWSVSVPHHLGTEPPTLQDALRLSMQPDRRELRCQRCHHHECHVTTQISKLPRR

SEQ ID NO: 19968 - protein, 1039 aa, Amphibalanus amphitrite
MDEMAALSRRVASKITDGDIRGALRALTSDDSFAPPTDEVIKKMQEKHPEPPNDLRNIPPPDDTDVPLVASETDVLKAINSFPPSSSAGLDGIRPAHLRSLLTKHTAEAGARLLTALTALTNLALSGRLPEYATPAFFGASLISLRKKDGGLRPIAVGSVYRRIAGKVAATAVSSAIGAQLRPVQLGVATRNGCEAAVHATRAYFDLCEASASNRVLVKLDISNAFNTVRRDAMLEAVRTRAPEIYSFVWQGYNNAAPLFIGGSKILSQAGVQQGDPLSSLLFSLTVDSAARAPNTEMNTWYLDDGTLAGPLPDVITSIKQVKAEMNKVGLAINAGKCEATFLGAFADDTNLSALQELQSILPNIREVPADELELLGAPIHDAQTRRALLQGQLMVEKLVRRLLALEEAHQAFFLLKSYVSVPRLLYLLRSSPAYRYPAQLNRIDEAVRRGMETITNVQLRGVSWRQATLPISLGGLGVRRVTDVALPAHLAYQVASADTIASINGSAADRVSELTRCLISEWERRTGLPPPEAHKRCYQREWDRAETARIGEQLLEESKTDVDRARLRAAAQPHSGAWLNAFPATSVGTLLDSDTLRTAVVLRVGAEICAPHRCRCGADIDERGLHCLSCQLSAGRFPRHAELNSVIKRGLATAGMPSVLEPAGLDRGDGRRPDGMTTFPYAGGKCLVWDATCVDTFSASSVKESAARASSAATVAEKRKRHRYADISRRYHFHPVAIETSGALGPDSYSFLKELGRRIVKTTGDRRDFERLMQRVSVAVVRGNATAVRLASVSVRPSHRANIEPKSLPWPPTNSTGTEAKLPPELPTTTSLTTRPAEQETLDPLNMGLPNNGNSCYQNAVLQSLFGLSPFRNDMIAQVTASKSDMCPTLHAVGKLMMFRQKALEKDIEDHLRKLRGVFTSIDPSFGGTEMQDADEFLLCLLDTMKDECRSAENPIRDNFQYQTVESFQCTKCHETVLKRQENISWSVSVPHHLGTEPPTLQDALRLSMQPDRRELRCQRCHHHECHVTTQISKLPRR

SEQ ID NO: 19969 - protein, 962 aa, Dicyrtomina minuta
MASQTQSSIIIQVPCPHCDRLFKPKGINRHISSAHPQIHRNNLIDDLCPSPYSAVGDEDRDPEILSLNSEFEIIIKKFDDLLSKNIANDVEFEILCNNYISLLRKCEDVLPGPKNPAKKFYALRKKSQTFSNIDSGHSSSTNPQRASKRKRQARKAAHKEQMIQYLFYNERKKAVRLVLNTDEKGCTIPLTKLEHDFSSRWSTPNNHVGISHETVTEDVQNKIDADYTPLITEDKVKIQIKRMNVDSAPGPDGILVRWVKSTMKKSKHIIASITTYMISFNYVPKFMHEARTVLIYKSGDTRESKNWRPITVSSVIRRIIEKVLDADLRDYITLNQNQRGFTHQAGTVINTTLVNECLKKAKRDKSDCTIIFGDITQAFDNVGHAHISSQLKSRPAPGLLKNLVYNLATNNFTRISTVEGNTKQIKFERGVMQGSPLSPLLFNIAIDPMIRELSEKEVTDKFGFNLHPLHDNISNEEFADDTGLFGNSRNSAIELYQQCSESLSGMGLCMNPCKSVAICVVKGVLCQDPLPVGLNSSIPCISPEDTIKYLGVTFNDSIVFDEIKCVKKFKEKIECLTASTMLRPDQKLKVLKDYVWPTLVYPFQSAPLSKLSISFLETIDKIIRSSVKEFLSIPTSTPTNMLYSSPKMKGLGLIRAKWEAGIQNFNYVEILQNSNHALIHEVKNLELEKSISLDYLDVPQDLRETMITFKGKKSNIIRDYLRKLEYESWCKLPHKGQGVIQFQECPYANKLIHSKNGLSSSEWITAIKMVGNVLPINAIPRPDQGSLYCRHGCKEIETIGHILGKCPRGELIRNNRHHTVRRLIAEAMSKLGWKTLEEVECTGNGSRRVDIIAYNLVSKEGIILDPTIRMEQNDTNQAEAVNQEKQEIYEPCIPYFKQKLGLVDIKVIGLYIGSRGTIPKFFLNFLRTQRLPTTLIEDIVISVVKKSVQICVHHLYSCTTNT

SEQ ID NO: 19970 - protein, 897 aa, Zanna intricata
MARPLVQVMSPPTEQESTASPPSSGDEEPRLSAREEEGGRPWSEDPRTTWLGKEHVHPLACSLAAKWREEDCPSLDWVDDFVARLTAVALERGKSVPIRTTNRTRRNDKVGVKRKRYANTQELFRRSPAKLGEMVGRNQLGSLLPGDGVGPPAALIRRAYEELWGDVGVCRLQAPGSGRTMVCGPITSSEVRTRFKAMKPNGAAGPDGLKKEMLAGIPGIFDLLAGLFNMLLCTGRYPTTWGNNWTTMIPKEGKDLSSAGAWRPITVGSLLARLFSGVVEGKLRAFVELSSAQRGFTKGNGCYINTRLMDMAIAAGKKSRLCAAVLDISKAFDCVSHEALMKVLKAQGVNEDFRRMVWSMYQGVSTKFKNCGGFELPIRRGVKQGDPLSPLLFNLVMDPMIRQIQGLPVVFSIGREAMPVLAFADDMVLLFEDEESLQGALDCAHAFLKKVGLGMSLDKCKIFGVEGRSKSWIDLDLDVSIDGVTLRRYGMEEEIRYLGSYFTVAEGVSSKRGVKEVKLAVERISRLALKPRQKLDLLCFYVLPGYYHAFVADLPSTNQLCLVDSVVREAVKDFFHLPRGASNGLLYCKRKDGGLGVPRMVDLVRAAHMKANCSLTNTDDNIIQRLLVERQAVTNEKIARGMGLEWPTSLPAIERWKLERKTIEFDTWKEQPVQGKGIGSFKGNSAGNCWLRKQALHAGEEIDLLKMRSNVFPTKKYLHRIDPSVGKICRRCFSKEESLGHVLGECPRGRGARIVRHDRVVELIEEKAKDMGCIVAREQLFQEGTDILRPDLVIKTPGKALIVDVTIRFEQGDSLKDAAREKKEKYQKIFGAVKRDMGVQDVLVLPVVIGARGGLISETQRNLRIFGLGGVQEMETIVLGVLRSSINIARAHMDCGN

SEQ ID NO: 19971 - protein, 1254 aa, Frankliniella occidentalis
MRTLFVEVPLGNRFLCPPPCPLAKPGKSPHRYKNLKNLRKHARDHHQVTCVTYVCRVCRRTDKETETCVNHSKNHLLQAHGLAWEDTGLPRTRCSWRLADIAGQSPPPSPESPLPDQPAPGSQAATPSPVPGGLPRASSQASGPRTSPVAYVRPFRRSPGAPPPPPEQNKSPPAALQVPPAAAGVTPIQLTPEVRQQLSAGFAAMMRRVQAGAPPAATPHRAPPGLQSATSVASRLRRAHLGARTPPALRRSPIIRSVLLPSPPPIQAAPVSRTVQFTPPAGVAPHTTSSPGRSSPGCSQQPEPTHVSPPPSGFGFIPESPSERPPNRFQAQWVGKLKACQNFAELEDVIGELTKVLQPPPKPQRPGGRQRGRGGRDPKQEAKRIQQLYKKNRKKAMRDIRQLDSPLCEVPGDEVANHFEEVFKETITVLPPPPASAVLPPTQRQDPVLVANIDRETITARLARCSETSPGADGITYSTIKRKDPGAHMLAEVYNACLRYKRIPAAWKESRTILLHKKGDKGDLGNWRPIALSSSLYKIYSGILADRLGRWAASTGAVSKVQKGFMPAEGCLEHNFIVQQAIDEVRESGRELTITWLDLRNAFGSVPHTVILEMLRRHGVHEHLVDVVQDAYQGCTTNFSTASGETRFVPMASGVKQGDPLSPITFNLALEVLIRSLLVLARLHGFLLHDEPIVCLGYADDLVVTAKSAADMQTLLDIIGEVATWTGLQFNAAKCATLHIVKKKAQLETLTFIQGAPIPTLADGDAYQHLGVPTGLRVDQTPEATIEAMLHDIGSIERSQLSDWQKLDALRTFVVPQAQFSLMTAKVQKQAFAELDREVKRVAKAALHLPQRASAEPVYLPPHKGGANLLPLGDLADIGAIVHAFKVLTCPDPLVRKIAETSAKKTVRRLLGHHPSNPELAEVLSGGPTPRGVHNASNIWTAARNASRRLSNKIHGFKWGWSASLERLEVHVPFPGKPVESAIVDSESRKLLHHKLRQGLQHHHLVSLVSKPDQGKVYAATCRDPASNHFYGSGQQMRFCDWRFIHRARLGVLPLNGCVRGIAGRDRSCRACGHPDETTAHVLNHCFARHSLAINNRHRAILKDVLEVMSEDVRRNTRVERCIAGSGSADKPDIVVMNNTTKTALIVDICCPFEKRYHALEVARRYKEDKYEHLVQHLRGRGFEASAAAIVVGSLGSWDPANNPILTKLGVPKFRQNKLKRKCVSDAIRWSRDIYVEHVTQQRQFTQNVTLPAC

SEQ ID NO: 19972 - protein, 930 aa, Mesobuthus martensii
MQRPRIPKLHNSQQLNNTLHCMNTHILPKLINAETTLMELHTFIYAAAVTVTTHLGHKTLPNKIDTNTKHHLKPAWQKRLEKQINEIRTELGRLTQYTKNNTSPKLMKSIRKIFRKLKTHTRHENHNTHIKEYMDTLKQKLAAKSQRLKRYKTSLARKLDNTLFTNNEKTFYRNINTKDPKQTQNSEIPTQQSLTSFWSALWAVPVTHNQRASWITEEETRTLDVPEMPYTTITTEELTNTIRYTHNWKAPGVDGIQNFWYKHFTCFHDLLAKHLTNLIHEPKDTPSFLTHGITFMKPKSTNTGNPSQYRPITCLPTLYKILTSCITNKIYAHVEENNILTEQQKGCRRSHMGCKEQLIIDTTILKQVHRQRRHLHAAYIDYKKAFDSILHSWLIQTLQIYKINTKYITFLQNIMQHWRTTLHITINNNHVATEPIHIRRGIFQGDSLSPLWFCLALNPLSNKLNRSNYGYDIRQNQTTHYIHSHLFYMDDIKLYASTQTQLQQLLQITHTFSKDIHMEFGLDKCKTLHIEKGVLKKGGFTLEHGDTIKSMEEGELYKYLGFQQARLTEQKKTKQTLSKLYTNRLNNILKTHLNGKNTVKAINTFAIPILTYSFGVIQWTRTELESLQRKTRTTLTKYQYHHPKSAIERTTLPRKEGGRGLIDIPHLHDRQIYNLREFFHKKQHTSQLHKAIVLADRNMTPLNLQNNTPCQIDNTAHIHEKKTSWCKKELHGRHPHDLQKHFIDAKASNSWLVGGDLFTETEGFIIAIQDQVINTKNYRKYILKDSTLTNDTCRKCHIAPETIQHITSGCKLLAQTDYLHRHNQVANIIHQKLATKHKLMNTLTPYYNYIPDTILENATHKMYYDRTILTDKTIHHNRPDITLIDKQNKVTYIIDISIPDTHNIQDAFTQKISKYTELSQEIKRLWECKK

SEQ ID NO: 19973 - protein, 1230 aa, Mesobuthus martensii
MLAGIPTLVVFFQFVMKQSRKRKHTGSDVARVNKVRICELGRGSHSESLLQSPLATGGESSTNPSQATAIQIPIVGNGSPHQSPTSQSVSLETQPETTKAGKPRQRMKWTIDMNEFIMRTYYTITKLETNITGYRRELYDKFTSRYPNITVTEQRIADQRRTIIHRNLIPHSTLQSIKTQVAQQISQHETDSHTQIEHDVEQTPEITYINDNTQPINNTDTDLINKLTDTLQETLTKFIGTDPMQRPRIPKLHNSQQLNNTLHCMNTHILPKLINAETTLMELHTLIYAAAVTVTTHLGHKTLPNKIDTNTKHHLKPAWQKRLEKQINEIRTELGRLTQYTKNNTSPKLMKSIRKIFRKLKTHTRHENHNTHIKEYMDTLKQKLAAKSQRLKRYKTSLARKLDNTLFTNNEKTFYRNINNKDPKQTQNSEIPTQQSLTSFWSALWAVPVTHNQRASWITEEETRTLDVPEMPYTTITTEELTNTIRYTHNWKAPGVDGIQNFWYKHFTCFHDLLAKHLTNLIHEPKDTPSFLTHGITFMKPKSTNTGNPSQYRPITCLPTLYKILTSCITNKIYAHVEENNILTEQQKGCRRSHMGCKEQLIIDTTILKQVHRQRRHLHAAYIDYKKAFDSIPHSWLIQILQIYKINTKYITFLQNIMQHWRTTLHITINNNHVATEPIHIRRGIFQGDSLSPLWFCLALNPLSNKLNTSNCGYDIRQNQTTHYIHSHLFYMDDIKLYASTQTQLQQLLQITHTFSKDIHMEFGLDKCKTLHIEKGVLKKGGFTLEHGDTIKSMEEGELYKYLGFQQARLTEQKKTKQTLSKLYTIRLNNILKTHLNGKNTVKAINTFAIPILTYSFGVIQWTRTELESLQRKTRTTLTKYQYHHPKSAIERTTLPRKEGGRGLIDIPHLHDRQIYNLREFFHKKQHTSQLHKAIVLADRNMTPLNLQNNTPCQIDNTAHIHEKKTSWCKKELHGRHPHDLQKHFIDAKASNSWLVRGDLFTETEGFIIAIQDQVINTKNYRKYILKDSTLTNDTCRKCHIAPETIQHITSGCKLLAQTDYLHRHNQVANIIHQKLATKHKLMNTLTPYYNYIPDTILENSTHKMYYDRTILTDKTIHHNRPDITLIDKQNKVTYIIDISIPDTHNIQDAFTQKISKYTELSQEIKRLWGMQKIVIVPIILSSTGVIPHTLHKSLKTLDLHPKTYITLQKASLLNTCNIVRKFLNIDTDS

SEQ ID NO: 19974 - protein, 881 aa, Mesobuthus martensii
MKSIRKIFRKLKTHTRHENHNTHIKEYMDTLKQKLAAKSQRLKRYKTSLARKLDNTLFTNNEKTFYRNINTKDPKQTQNSEIPTQQSLTSFWSALWAVPVTHNQRASWITEEETRTLDVPEMPYTTITTEELTNTIRYTHNWKAPGVDGIQNFWYKHFTCFHDLLAKHLTNLIHEPKDTPSFLTHGITFMKPKSTNTGNPSQYRPITCLPTLYKILTSCITNKIYAHVEENNILTEQQKGCRRSHMGCKEQLIIDTTILKQVHRQRRHLHEAYIDYKKAFDSIPHSWLIQILQIYKINTKYITFLQNIMQHWRTTLHITINNNHVATEPIHIRRGIFQGDSLSPLWFCLALNPLSNKLNTSNYGYDIRQNQTTHYIHSHLFYMDDIKLYASTQTQLQQLLQITHTFSKDIHMEFGLDKCKTLHIEKGVLKKGGFTLENGDTIKSMEEGELYKYLGFQQARLTEQKKTKQTLSKLYTNRLNNILKTHLNGKNTVKAINTFAIPILTYSFGVIQWTRTELESLQRKTRTTFTKYQYHHPKSAIERTTLPRKEGGRGLIDIPHLHDRQIYNLREFFHKKQHTSQLHKAIVLADRNMTPLNLQNNTPCQIDNIAHIQEKKTSWCKKELHGRHPHDLQKHFIDAKASNSWLVRGDLFTETEGFIIAIQDQVINTKNYRKYILKDSTLTNDTCRKCHIAPETIQHITSGCKLLAQTDYLHRHNQVANIIHQKLATKHKLMNTLTPYYNYIPDTILENSTHKMYYDRTILTDKTIHHNRPDITLIDKQNKVTYIIDISIPDTHNIQDAFTQKISKYTELSQEIKRLWGMQKVVIVPIILSSTGVIPQTLHKSLKTLDLHPKTYITLQKASLLNTCNIVRKFLNTDTDS

SEQ ID NO: 19975 - protein, 779 aa, Centruroides sculpturatus
MPCAEINIHDIRYAVNRTHNWKTPGVDNIHNFWYKKFTSLHQELAKHLTHIIINPQDMPKFLTQGITYMKPKNNKTTDPTQYRPITCLPTLYKLLTSCITNKIYKHVEEHDILTEQQKGCRRNHRGCKEQLLIDSVILRQAHKQHRNIHMAYIDYRKAFDSVPHSWLLHILHMYKIHPSLIAFFENTMQHWRTTLHLRVSNTSIQTNEIFIRRGIFQGDSLSPLWFCLALNPLSNMLNNTQYGYNIRHEKTTQFTLSHLMYMDDIKLYASTQKQLHQLLQITHSYTKDIQMEFGLDKCKKLHIEKGILKKEDFALGNGDVIESMEEGEFYKYLGFQQAKLTEHTQIKQRLIKEYQSRLNAILRTQLNAKHTVKAINTYVIPVLTYSFGVIHWTHTDLEQLQRKTRTTLTKHKQHHPKSATERLTLPRKEGGRGLIDIVNLHYKQIQSLREFFYKKQETSQLHKAVTLADSNNTPLNLHSHHTDMTQHIKSIDTIKQSWARKALHGRHPYDLAQDFVDKTASNSWLDRGCLFGETEGFMIAIQDQVINTKNYRKHILKDTTLTNDTCRKCHIMPETIQHITSGCKLLAQTDYLHRHNQVANIIHQELAKKHKLADIHEPYYKYIPQTVLENNTHKMYYDRAIITDKTIYHNRPDITLIDKHNKITYIIDIAIPNTHNVQNTCTEKISKYTELAQEIRHLWRMDRVVIVPVVLSCTGVIPHMLHKSLGTLQLNRNTYITLQKATILNTCHIVRKFLNTDTDTDTHLILVLFWLLCLDSGPA

SEQ ID NO: 19976 - protein, 1233 aa, Mesobuthus martensii
MLNQMLAGVPTLVVFCLYAMAQSRKRKHTGSDVSWVNKVRVCELGRGSHSESLLQSPLATGGESSTNPSLATAIHIPRVGNGSPHQSPTSQRVSQVTQPETTKAGKPRQRMKWTTDMNEFIMRTYYTITKLETDSTGYRRELYDKFTSRYPNITVTEQRIADQRRTIIHRNLIPHSTLENIKTQVAEQISQHKTDSHTQIEHDVEQTPEITYINDNMQPINNTDTDLINKLTDTLQETLTKFTGTDPTQRPRIPKLHNSQQLNNTLHCMNTHILPKFINAETTLIEIHTLIYAAAVTVTTHLGLKTLPNKLGTNTRHHLKPAWQKRLKKQINEIRMDLGRLTQYTKNNTSTKLMKSIRKIFRKLKTHTHHENHNIHIKEYIDTLKQKLTAKSQRLKRYKTSLTHKQDNTLFTNNEKTFYRNINTKDPRQAQNREIPTQQSLTSFWSALWAVPVIHNQRASWIAEEETRILNVPEMPYTAIATEELTNTIRRTHNWKAPGVDGIQNFWYKHFTCLHDLLAKHLTHLIHEPKDTPPFLTQGITFMKPKSTNTGNPSQYRPITCLPTLYKILTSCITNKIYTHIEENNILTEQQKGCRRSHMGCKEQLIIDTTILKQVHRQHRHLHAAYIDYKKAFDSVPHSWLIQTLQLYKINTTYITFLQNIIQHWRTTLHVTINNNHVATEPIHIRRGIFQGDSLSPLWFCLALNPLSNKLNTSNCGYNIRQNRTTHYTHSHLLYMDDIKLYASTQTQLQQLLQITHTFSKDICMEFGLDKCKTIHIEKGVLKKGDFTLENGDTIESMEEGEVYKYLGFQQARLTEQKKTKQTLSKQYTNRLNNILKTHLNGKNTEKAINTFAIPVLTYSFGVIQWTQTELESLQRKTRTALTKHQYHHPKSAIERTTLPRKEGGRGLIDIPHLHDRQIYSLREFFHKKQHTSQLHKAIVLADRNITPLNLQNNTSNPIDNIAHIQEKKTSWSRKELHGRHPHDLQKHFIDTKASNSWLVRGDLFTETEGFVIAIQDQVINTKNYRKYILKDSTLTNDTCRKCHIAPETIQHITSGCKLLAQTDYLHRHNQVANIIHQKLATKYKLINTLTPYYKYIPDTILENSTHKIYYDRTIITDKTIHHNRPDITLIDKQNKVTYIIDISIPNTHNIQDAFTQKISKYTELSQEIKRLLGMQKVLTVPIILSSTGVIPHTLHKSLGTLDLHPKTYITLQKASLLNTCNIVRKFLSNTDS

SEQ ID NO: 19977 - protein, 1177 aa, Centruroides sculpturatus
MATAMPSTDVRNQPSLGVSVAMHPQTTKAGKPRQRMKWTTEMNEFIIRTYYTITRLETNMTAYRQQLHHIFTQQYPHLTVTEQRVVDQKRTIIHNNLIPQTTLELIKQQVADQIHQQTETFNINEDHVTCQDNPATSTDYSTHTTSTTNDTAGTSPSITDNVDIELVNTLSLIFQETLTKYTGTDPTQRPRIPKINTSKVVGKTLNYVNTHLLPNYIHSISTLSDIHTLVYAGAVTVVTHHGLKIHSQTDTHKTQFYHKPAWQRRIETQINDIRQQLGRLTQYTKNNITPKLKKQLKNIFKKIKTHTKHEHHNTHITEYIDTLKQKLAAKARRLKRYKTCTLRKQQNKLFTNNEKLFYRQISTKTNTDTQHSGTPTEEELTTYWSSLWSNAVTHNADAGWIEEENRNLHNIPTMPCAEINIHDIRYAVNRTHNWKTPGVDNIHNFWYKKFTSLHQELAKHLTHIIINPQDMPKFLTQGITYMKPKNNKTTDPTQYRPITCLPTLYKLLTSCITNKIYKHVEEHDILTEQQKGCRRNHRGCKEQLLIDSVILRQAHKQHRNIHMAYIDYRKAFDSVPHSWLLHILHMYKIHPSLIAFFENTMQHWRTTLHLRVSNTSIQTNEIFIRRGIFQGDSLSPLWFCLALNPLSNMLNNTHYGYNIRHEKTTQFTLSHLMYMDDIKLYASTQKQLHQLLQITHSYTKDIQMEFGLDKCKKLHIEKGILKKEDFALGNGDVIESMEEGEFYKYLGFQQAKLTEHTQIKQRLIKEYQSRLNAILRTQLNAKHTVKAINTYVIPVLTYSFGVIHWTHTDLEQLQRKTRTTLTKHKQHHPKSATERLTLPRKEGGRGLIDIVNLHYKQIQSLREFFYKKQETSQLHKAVTLADSNNTPLNLHSQHTDMTQHIKSIDNIKQSWAQKALHGRHPYDLAQDFVDKTASNSWLDRGCLFGETEGFMIAIQDQVINTKNYRKHILKDTTLTNDTCRKCHIMPETIQHITSGCKLLAQTDYLHRHNQVANIIHQELAKKHKLADIHEPYYKYIPQTVLENNTHKMYYDRAIITDKTIYHNRPDITLIDKHNKITYIIDIAIPNTHNVQNTCTEKISKYTELAQEIRHLWRMDRVLIVPVVLSCTGVIPHTLHKSLGTLQLSRNTYITLQKATILNTCHIVRKFLNTDTHTDTLL

SEQ ID NO: 19978 - protein, 1233 aa, Mesobuthus martensii
MLNQMLAGVPTLVVFCLYAMAQSRKRKHTGSDVSRVNKVRVCELGRGSHSESLLQSPLATGGESSTNPSLATAIHIPRVGNGSPHQSPTSQRVSQVTQPETTKAGKPRQRMKWTTDMNEFIMRTYYTITKLETDSTGYRRELYDKFTSRYPNITVTEQRIADQRRTIIHRNLIPHSTLENIKTQVAEQISQHKTDSHTQIEHDVEQTPEITYINDNMQPINNTDTDLINKLTDTLQETLTKFTGTDPTQRPRIPKLHNSQQLNNTLHCMNTHILPKFINAETTLIEIHTLIYAAAVTVTTHLGLKTLPNKLGTNTRHHLKPAWQKRLEKQINEIRMDLGRLTQYTKNNTSTKLMKSIRKIFRKLKTHTHHENHNIHIKEYIDTLKQKLTAKSQRLKRYKTSLARKQDNTLFTNNEKTFYRNINTKDPRQAQNREIPTQQSLTSFWSALWAVPVIHNQRASWIAEEETRILNVPEMPYTAIATEELTNTIRRTHNWKAPGVDGIQNFWYKHFTCLHDLLAKHLTHLIHEPKDTPPFLTQGITFMKPKSTNTGNPSQYRPITCLPTLYKILTSCITNKIYTHIEENNILTEQQKGCRRSHMGCKEQLIIDTTILKQVHRQHRHLHAAYIDYKKAFDSVPHSWLIQTLQLYKINTTYITFLQNIIQHWRTTLHVTINNNHVATEPIHIRRGIFQGDSLSPLWFCLALNPLSNKLNTSNCGYNIRQNRTTHYTLSHLLYMDDIKLYASTQTQLQQLLQITHTFSKDICMEFGLDKCKTIHIEKGVLKKGDFTLENGDTIESMEEGEVYKYLGFQQARLTEQKKTKQTLSKQYTNRLNNILKTHLNGKNTVKAINTFAIPVLTYSFGVIQWTQTELESLQRKTRTALTKHQYHHPKSAIERTTLPRKEGGRGLIDIPHLHDRQIYSLREFFHKKQHTSQLHKAIVLADRNITPLNLQNNTSNPIDNIAHIQEKKTSWSRKELHGRHPHDLQKHFIDTKASNSWLVRGDLFTETEGFVIAIQDQVINTKNYRKYILKDSTLTNDTCRKCHIAPETIQHITSGCKLLAQTDYLHRHNQVANIIHQKLATKYKLINTLTPYYKYIPDTILENSTHKIYYDRTIITDKTIHHNRPDITLIDKQNKVTYIIDISIPNTHNIQDAFTQKISKYTELSQEIKRLWGMQKVLTVPIILSSTGVIPHTLHKSLGTLDLHPKTYITLQKASLLNTCNIVRKFLSNTDS

SEQ ID NO: 19979 - protein, 1225 aa, Centruroides sculpturatus
MVVTRSKCDTGSDVAWVNKVRVRGLGRGSHSKNRPQSPLVTGGESSTGPSMATSMPSTDVRNQPSLGVSVAMHPQTTKAGKPRQRMKWTTEMNEFIIRTYYTITRLETNMTAYRQQLHHRFTQQYPHLTVTEQRVVDQKRTIIHNNLIPQTTLELIKQQVADQIHQQTETFNINEDHVTCQDNPATSTDYSTHTTSTTNDTAGTSPSITDNIDIELVNTLSLIFQETLTKYTGTDPTQRPRIPKINTSKVVGKTLNYVNTHLLPNYIHSISTLSDIHTLVYAGAVTVVTHHGLKIHSQTDTHKTQFYHKPAWQRRIETQINDIRQQLGRLTQYTKNNITPKLKKQLKNIFKKIKTHTKHEHHNTHITEYIDTLKQKLAAKARRLKRYKTCTLRKQQNKLFTNNEKLFYRQISTKTNTDTQHSGTPTEEELTTYWSSLWSNAVTHNADAGWIEEENRNLHNIPTMPCAEINIHDIRYAVNRTHNWKTPGVDNIHNFWYKKFTSLHQELAKHLTHIIINPQDMPKFLTQGITYMKPKNNKTTDPTQYRPITCLPTLYKLLTSCITNKIYKHVEEHDILTEQQKGCRRNHRGCKEQLLIDSVILRQAHKQHRNIHMAYIDYRKAFDSVPHSWLLHILHMYKIHPSLIAFFENTMQHWRTTLHLRVSNTSIQTNEIFIRRGIFQGDSLSPLWFCLALNPLSNMLNNTQYGYNIRHEKTTQFTLSHLMYMDDIKLYASTQKQLHQLLQITHSYTKDIQMEFGLDKCKKLHIEKGILKKEDFALGNGDVIESMEEGEFYKYLGFQQAKLTEHTQIKQRLIKEYQSRLNAILRTQLNAKHTVKAINTYVIPVLTYSFGVIHWTHTDLEQLQRKTRTTLTKHKQHHPKSATERLTLPRKEGGRGLIDIVNLHYKQIQSLREFFYKKQETSQLHKAVTLADSNNTPLNLHSHHTDMTQHIKSIDTIKQSWARKALHGRHPYDLAQDFVDKTASNSWLDRGCLFGETEGFMIAIQDQVINTKNYRKHILKDTTLTNDTCRKCHIMPETIQHITSGCKLLAQTDYLHRHNQVANIIHQELAKKHKLADIHEPYYKYIPQTVLENNTHKMYYDRAIITDKTIYHNRPDITLIDKHNKITYIIDIAIPNTHNIQNTFTEKISKYTQLAHEISHLWRMESVLIVPVILSCTGVIPHTLHKSLETLELNRNTYITLQKATILNTFHIVRKFLNTDTDTFI

SEQ ID NO: 19980 - protein, 1241 aa, Centruroides sculpturatus
MKLRVTTHPHSVEKFMMVVTRSKYDTGSDVARVNKVRVRGLGRGSRSKNRLQSPLVTSGESSAGPSMATAMPSTDVRNQPSLGVSVAMHPQTTKAGKPRQRMKWTTEMNEFIIRTYYTITRLETNMTAYRQQLHHIFTQQYPHLTVTEQRVVDQKRTIIHNNLIPQTTLELIKQQVADQIHQQTETFNINEDHVTCQDNPATSTDYSTHTTSTTNDTAGTSPSITDNVDIELVNTLSLIFQETLIKYTGTDPTQRPRIPKINTSKAVGKTLDYVNTHLLPNYIHSISTLTDIHTLVYAGAVTVVTHHGLKIHSQTDTHKTQFYHKPAWQRRIETQINDIRQQLGRLTQYTKNNITPKLKKQLKNIFKKIKTHTKHEHHNTHITEYIDTLKQKLAAKARRLKRYKTCTLRKQQNKLFTNNEKLFYRQISTKTNTDTQHSGTPTEEELTTYWSSLWSNAVTHNADAGWIEEENRNLHNIPTMPCAEINVHDIRYAVNRTHNWKTPGVDNIHNFWYKKFTSLHQELAKHLTHIIINPQDMPKFLTQGITYMKPKNNKTTDPTQYRPITCLPTLYKLLTSCITNKIYKHVEEHDILTEQQKGCRRNHRGCKEQLLIDSVILRQAHKQHRNIHMAYIDYRKAFDSVPHSWLLHILHMYKIHPSLIAFFENTMQHWRTTLHLRVSNTSIQTNEIFIRRGIFQGDSLSPLWFCLALNPLSNMLNNTQYGYNIRHEKTTQFTLSHLMYMDDIKLYASTQKQLHQLLQITHSYTKDIQMEFGLDKCKKLHIEKGILKKEDFALGNGDVIESMEEGEFYKYLGFQQAKLTEHTQIKQRLIKEYQSRLNAILRTQLNAKHTVKAINTYVIPVLTYSFGVIHWTHTDLEQLQRKTRTTLTKHKQHHPKSATERLTLPRKEGGRGLIDIVNLHYKQIQSLREFFYKKQETSQLHKAVTLADSNNTPLNLHSQHTDMTQHIKSIDNIKQSWAQKALHGRHPYDLAQDFVDKTASNSWLDRGCLFGETEGFMIAIQDQVINTKNYRKHILKDTTLTNDTCRKCHIMPETIQHITSGCKLLAQTDYLHRHNQVANIIHQELAKKHKLADIHEPYYKYIPQTVLENNTHKMYYDRAIITDKTIYHNRPDITLIDKHNKITYIIDIAIPNTHNVQNTCTEKISKYTELAQEIRHLWRMDRVVIVPVVLSCTGVIPHTLHKSLGTLELSRNTYITLQKATILNTCHIVRKFLNTDTDTLI

SEQ ID NO: 19981 - protein, 1241 aa, Centruroides sculpturatus
MKLRVTTHPHSVEIIIMVVTRSKYDTGSDVARVNKVRVRGLGRGSRSKNRLQSPLVTGGESSAGPSMATAMPSTDVRNQPSLGVSVAMHPQTTKAGKPRQRMKWTTEMNEFIIRTYYTITRLETNMTAYRQQLHHRFTQQYPHLTVTEQRVVDQKRTIIHNNLIPQTTLELIKQQVADQIHQQTETFNINEDHVTCQDNPATSTDYSTHTTSTTNDTAGTSPSITDNIDIELVNTLSLIFQETLTKYTGTDPTQRPRIPKINTSKVVGKTLNYVNTHLLPNYIHSISTLSDIHTLVYAGAVTVVTHHGLKIHSQTDTHKTQFYHKPAWQRRIETQINDIRQQLGRLTQYTKNNITPKLKKQLKNIFKKIKTHTKHEHHNTHITEYIDTLKQKLAAKARRLKRYKTCTLRKQQNKLFTNNEKLFYRQISTKTNTDTQHSGTPTEEELTTYWSSLWSNAVIHNADAGWIEEENRNLHNIPTMPCAEINIHDIRYAVNRTHNWKTPGVDNIHNFWYKKFTSLHQELAKHLTHIIINPQDMPKFLTQGITYMKPKNNKTTDPTQYRPITCLPTLYKLLTSCITNKIYKHVEEHDILTEQQKGCRRNHRGCKEQLLIDSVILRQAHKQHRNIHMAYIDYRKAFDSVPHSWLLHILHMYKIHPSLIAFFENTMQHWRTTLHLRVSNTSIQTNEIFIRRGIFQGDSLSPLWFCLALNPLSNMLNNTQYGYNIRHEKTTQFTLSHLMYMDDIKLYASTQKQLHQLLQITHSYTKDIQMEFGLDKCKKLHIEKGILKKEDFALGNGDVIESMEEGEFYKYLGFQQAKLTEHTQIKQRLIKEYQSRLNAILRTQLNAKHTVKAINTYVIPVLTYSFGVIHWTHTDLEQLQRKTRTTLTKHKQHHPKSATERLTLPRKEGGRGLIDIVNLHYKQIQSLREFFYKKQETSQLHKAVTLADSNNTPLNLHSHHTDMTQHIKSIDTIKQSWARKALHGRHPYDLAQDFVDKTASNSWLDRGCLFGETEGFMIAIQDQVINTKNYRKHILKDTTLTNDTCRKCHIMPETIQHITSGCKLLAQTDYLHRHNQVANIIHQELAKKHKLADIHEPYYKYIPQTVLENNTHKMYYDRAIITDKTIYHNRPDITLIDKHNKITYIIDIAIPNTHNVQNTCTEKISKYTELAQEIRHLWRMDRVVIVPVVLSCTGVIPHMLHKSLGTLQLSRNTYITLQKATILNTCHIVRKFLNTDTDTHI

SEQ ID NO: 19982 - protein, 1156 aa, Centruroides sculpturatus
MHPQTTKAGKPCQRMKWTTEMNEFIIRTYYTITRLETNMTAYRQQLYHRFTQQYSHLTVTEQRVVDQKRTIIHNNLIPQTTLELIKQQVADQIHQQTETFNINEDHVTCQDNPATSTDYSTHTTSTTNDTAGTSPSITDNIDIELVNTLSLIFQETLTKYTGTDPTQRPRIPKINTSKVVGKTLNYVNTHLLPNYIHSISTLSDIHTLVYAGAVTVVTHHGLKIHSQTDTHKTQFYHKPAWQRRIETQINDIRQQLGRLTQYTKNNITPKLKKQLKNIFKKIKTHTKHEHHNTHITEYIDTLKQKLAAKARRLKRYKTCTLRKQQNKLFTNNEKLFYRQISTKTNTDTQHSGTPTEEELTTYWSSLWSNAVTHNADAGWIEEENRNLHNIPTMPCAEINIHDIRYAVNRTHNWKTPGVDNIHNFWYKKFTSLHQELAKHLTHIIINPQDMPKFLTRGITYMKPKNNKTTDPTQYRPITCLPTLYKLLTSCITNKIYKHVEEHDILTEQQKGCRRNHRGCKEQLLIDSVILRQAHKQHRNIHMAYIDYRKAFDSVPHSWLLHILHMYKIHPSLIAFFENTMQHWRTTLHLRVSNTSIQTNEIFIRRGIFQGDSLSPLWFCLALNPLSNMLNNTQYGYNIRHEKTTQFTLSHLMYMDDIKLYASTQKQLHQLLQITHSYTKDIQMEFGLDKCKKLHIEKGILKKEDFALGNGDVIESMEEGEFYKYLGFQQAKLTEHTQIKQRLIKEYQSRLNAILRTQLNAKHTVKAINTYVIPVLTYSFGVIHWTHTDLEQLQRKTRTTLTKHKQHHPKSATERLTLPRKEGGRGLIDIVNLHYKQIQSLREFFYKKQETSQLHKAVTLADSNNTPLNLHSQHTDMTQHIKSIDTIKQSWARKALHGRHPYDLAQDFVDKTASNSWLDRGCLFGETEGFMIAIQDQVINTKNYRKHILKDTTLTNDTCRKCHIMPETIQHITSGCKLLAQTDYLHRHNQVANIIHQELAKKHKLADIHEPYYKYIPQTVLENNTHKMYYDRAIITDKTIYHNRPDITLIDKHNKITYIIDIAIPNTHNVQNTCTEKISKYTELAQEIRHLWRMDRVLIVPVVLSCTGVIPHTLHKSLGTLQLSRNTYITLQKATILNTCHIVRKFLNTDTHTDTLL

SEQ ID NO: 19983 - protein, 1230 aa, Mesobuthus martensii
MLAGIPTLVVFFQFVMKQSRKRKHTGSDVARVNKVRVCELGRGSHSESLLQSPLATGGESSTNPSQATAIQIPIVGNGSPHQSPTSQSVSLETQPETTKAGKPRQRMKWTIDMNEFIMRTYYTITKLETNITGYRRELYDKFTSRYPNITVTEQRIADQRRTIIHRNLIPHSTLQSIKTQVAQQISQHETDSHTQIEHDVEQTPEITYINDNTQPINNTDTDLINKLTDTLQETLTKFIGTDPMQRPRIPKLHNSQQLNNTLHCMNTHILPKLINAETTLMELHTLIYAAAVTVTTHLGHKTLPNKIDTNTKHHLKPAWQKRLEKQINEIRTELGRLTQYTKNNTSPKLMKSIRKIFRKLKTHTRHENHNTHIKEYMDTLKQKLAAKSQRLKRYKTSLARKLDNTLFTNNEKTFYRNINTKDPKQTQNSEIPTQQSLTSFWSALWAVPVTHNQRASWITEEETRTLVVPEMPYTTITTEELTNTIRYTHNWKAPGVDGIQNFWYKHFTCLHDLLAKHLTHLIHEPKDTPSFLTHGITFMKPKSTNTGNPSQYRPITCLPTLYKILTSCITNKIYAHVEENNILTEQQKGCRRSHMGCKEQLIIDTTILKQVHRQCRHLHEAYIDYKKAFDSIPHSWLIQTLQIYKINTKYITFLQNIMQHWRTTLHITINNNHVATEPIHIRRGIFQGDSLSPLWFCLALNPLSNKLNTSNCGYDIRQNQTTHYIHSHLFYMDDIKLYASTQTQLQQLLQITHTFSKDIHMEFGLDKCKTLHIEKGVLKKGGFTLEHGDTIKSMEEGELYKYLGFQQARLTEQKKTKQTLSKLYTNRLNNILKTHLNGKNTVKAINTFAIPILTYSFGVIQWTRTELESLQRKTRTTLTKYQYHHPKSAIERTTLPRKEGGRGLIDIPHLHDRQIYNLREFFHKKQHTSQLHKAIVLADRNMTPLNLQNNTPCQIDNTAHIHEKKTSWCKKELHGRHPHDLQKHFIDAKASNSWLVRGDLFTETEGFIIAIQDQVINTKNYRKYILKDSTLTNDTCRKCHIAPETIQHITSGCKLLAQTDYLHRHNQVANIIHQKLATKHKLMNTLTPYYNYIPDTILENSTHKMYYDRTILTDKTIHHNRPDITLIDKQNKVTYIIDISIPDTHNIQDAFTQKISKYTELSQEIKRLWGMQKVVIVPIILSSTGVIPHTLHKSLKTLDLHPKTYITLQKASLLNTCNIVRKFLNTDTDS

SEQ ID NO: 19984 - protein, 1009 aa, Centruroides sculpturatus
MLSLIFQETLTKYTGTDPTQRPRIPKINTSKVVGKTLNYVNTHLLPNYIHSISTLSDIHTLVYAGAVTVVTHHGLKIHSQTDTHKTQFYHKPAWQRRIETQINDIRQQLGRLTQYTKNNITPKLKKQLKNIFKKIKTHTKHEHHNTHITEYIDTLKQKLAAKARRLKRYKTCTLRKQQNKLFTNNEKLFYRQISTKTNTDTQHSGTPTEEELTTYWSSLWSNAVTHNADAGWIEEENRNLHNIPTMPCAEINIHDIRYAVNRTHNWKTPGVDNIHNFWYKKFTSLHQELAKHLTHIIINPQDMPKFLTRGITYMKPKNNKTTDPTQYRPITCLPTLYKLLTSCITNKIYKHVEEHDILTEQQKGCRRNHRGCKEQLLIDSVILRQAHKQHRNIHMAYIDYRKAFDSVPHSWLLHILHMYKIHPSLIAFFENTMQHWRTTLHLRVSNTSIQTNEIFIRRGIFQGDSLSPLWFCLALNPLSNMLNNTQYGYNIRHEKTTQFTLSHLMYMDDIKLYASTQKQLHQLLQITHSYTKDIQMEFGLDKCKKLHIEKGILKKEDFALGNGDVIESMEEGEFYKYLGFQQAKLTEHTQIKQRLIKEYQSRLNAILRTQLNAKHTVKAINTYVIPVLTYSFGVIHWTHTDLEQLQRKTRTTLTKHKQHHPKSATERLTLPRKEGGRGLIDIVNLHYKQIQSLREFFYKKQETSQLHKAVTLADSNNTPLNLHSQHTDMTQHIKSIDNIKQSWAQKALHGRHPYDLAQDFVDKTASNSWLDRGCLFGETEGFMIAIQDQVINTKNYRKHILKDTTLTNDTCRKCHIMPETIQHITSGCKLLAQTDYLHRHNQVANIIHQELAKKHKLADIHEPYYKYIPQTVLENNTHKMYYDRAIITDKTIYHNRPDITLIDKHNKITYIIDIAIPNTHNVQNTCTEKISKYTELAQEIRHLWRMDRVLIVPVVLSCTGVIPHTLHKSLGTLQLSRNTYITLQKATILNTCHIVRKFLNTDTHTDTLI

SEQ ID NO: 19985 - protein, 762 aa, Centruroides sculpturatus
MPCAEINVHDIRYAVNRTHNWKTPGVDNIHNFWYKKFTSLHQELAKHLTHIIINPQDMPKFLTQGITYMKPKNNKTTDPTQYRPITCLPTLYKLLTSCITNKIYKHVEEHDILTEQQKGCRRNHRGCKEQLLIDSVILRQAHKQHRNIHMAYIDYRKAFDSVPHSWLLHILHMYKIHPSLIAFFENTMQHWRTTLHLRVSNTSIQTNEIFIRRGIFQGDSLSPLWFCLALNPLSNMLNNTQYGYNIRHEKTTQFTLSHLMYMDDIKLYASTQKQLHQLLQITHSYTKDIQMEFGLDKCKTLHIEKGILKKEDFALGNGDVIESMEEGEFYKYLGFQQAKLTEHTQIKQRLIKEYQSRLNAILRTQLNAKHTVKAINTYVIPVLTYSFGVIHWTHTDLEQLQRKTRTTLTKHKQHHPKSATERLTLPRKEGGRGLIDIVNLHYKQIQSLREFFYKKQETSQLHKAVTLADSNNTPLNLHSQHTDMTQHIKSIDNIKQSWAQKALHGRHPYDLAQDFVDKTASNSWLDRGCLFGETEGFMIAIQDQVINTKNYRKHILKDTTLTNDTCRKCHIMPETIQHITSGCKLLAQTDYLHRHNQVANIIHQELAKKHKLADIHEPYYKYIPQTVLENNTHKMYYDRAIITDKTIYHNRPDITLIDKHNKITYIIDIAIPNTHNVQNTCTEKISKYTELAQEIRHLWRMDRVLIVPVVLSCTGVIPHTLHKSLGTLELSRNTYITPQKATILNTCHIVRKFLNSDTDTLI

SEQ ID NO: 19986 - protein, 1241 aa, Centruroides sculpturatus
MKLRVTTHPHSVEIIIMVVTRSKFDTGSDVARVNKVRVRGLGRGSRSKNRLQSPLVTGGESSAGPSMATAMPSTDVRNQPSLGVSVAMHPQTTKAGKPRQRMKWTTEMNEFIIRTYYTITRLETNMTAYRQQLHHRFTQQYPHLTVTEQRVVDQKRTIIHNNLIPQTTLELIKQQVADQIHQQTETFNINEDHVTCQDNPATSTDYSTHTTSTTNDTAGTSPSITDNVDIELVNTLSLIFQETLTKYTGTDPTQRPRIPKINTSKVVGKTLNYVNTHLLPNYIHSISTLSDIHTLVYAGAVTVVTHHGLKIHSQTDTHKTQFYHKPAWQRRIETQINDIRQQLGRLTQYTKNNITPKLKKQLKNIFKKIKTHTKHEHHNTHITEYIDTLKQKLAAKARRLKRYKTCTLRKQQNKLFTNNEKLFYRQISTKTNTDTQHSGTPTEEELTTYWSSLWSNAVTHNADAGWIEEENRNLHNIPTMPCAEINIHDIRYAVNRTHNWKTPGVDNIHNFWYKKFTSLHQELAKHLTHIIINPQDMPKFLTQGITYMKPKNNKTTDPTQYRPITCLPTLYKLLTSCITNKIYKHVEEHDILTEQQKGCRRNHRGCKEQLLIDSVILRQAHKQHRNIHMAYIDYRKAFDSVPHSWLLHILHMYKIHPSLIAFFENTMQHWRTTLHLRVSNTSIQTNEIFIRRGIFQGDSLSPLWFCLALNPLSNMLNNTHYGYNIRHEKTTQFTLSHLMYMDDIKLYASTQKQLHQLLQITHSYTKDIQMEFGLDKCKKLHIEKGILKKEDFALGNGDVIESMEEGEFYKYLGFQQAKLTEHTQIKQRLIKEYQSRLNAILRTQLNAKHTVKAINTYVIPVLTYSFGVIHWTHTDLEQLQRKTRTTLTKHKQHHPKSATERLTLPRKEGGRGLIDIVNLHYKQIQSLREFFYKKQETSQLHKAVTLADSNNTPLNLHSHHTDMTQHIKSIDTIKQSWARKALHGRHPYDLAQDFVDKTASNSWLDRGCLFGETEGFMIAIQDQVINTKNYRKHILKDTTLTNDTCRKCHIMPETIQHITSGCKLLAQTDYLHRHNQVANIIHQELAKKHKLADIHEPYYKYIPQTVLENNTHKMYYDRAIITDKTIYHNRPDITLIDKHNKITYIIDIAIPNTHNVQNTCTEKISKYTELAQEIRHLWRMDRVVIVPVVLSCTGVIPHTLHKSLGTLQLSRNTYITLQKATILNTCHIVRKFLNTDTDTHI

SEQ ID NO: 19987 - protein, 1173 aa, Mesobuthus martensii
MLNQMLAGVPTLVVFCLYAMAQSRKRKHTGSDVSRVNKVRVCELGRGSHSESLLQSPLATGGKSSTNPSLATAIHIPRVGNGSPHQSPTSQRVSQVTQPETTKAGKPRQRMKWTTDMKEFIMRTYYTITKLETNSTGYRRELYDKFTSRYPNITVTEQRIADQRRTIIHRNLIPHSTLENIKTQVAEQISQHKTDSHTQIEHDVEQTPEITYINDNMQPINNTDTDLINKLTDTLQETLTKFTGTDPTQRPRIPKLHNTQQLNNTLHCMNTHILPKFINAETTLIEIHTLIYAAAVTVTTHLGLKTLPNKLGTNTRHHLKPAWQKRLEKQINEIRMDLGRLTQYTKNNTSTKLMKSIRKIFRKLKTHTHHENHNIHIKEYIDTLKQKLTAKSQCLKRYKTSLARKQDNTLFTNNEKTFYRNINTKDPRQAQNREIPTQQSLTSFWSALWAVPVIHNQRASWIAEEETRILNVPEMPYTAIATEELTNTIRRTHNWKAPGVDGIQNFWYKHFTCLHDLLAKHLTHLIHEPKDTPPFLTQGITFMKPKSTNTGNPSQYRPITCLPTLYKILTSCITNKIYTHIEENNILTEQQKGCRRSHMGCKEQLIIDTTILKQVHRQHRHLHAAYIDYKKAFDSVPHSWIIQTLQLYKINTTYITFLQNIIQHWRTTLHVTINNNHVATEPIHIRRGIFQGDSLSPLWFCLALNPLSNKLNTSNCGYNIRQNRTTHYTLSHLLYMDDIKLYASTQTQLQQLLQITHTFSKDICMEFGLDKCKTIHIEKGVLKKGDFTLENGDTIESMEEGEVYKYLGFQQARLTEQKKTKQTLSKQYTNRLNNILKTHLNGKNTVKAINTFAIPVLTYSFGVIQWTQTELESLQRKTRTALTKHQYHHPKSAIERTTLPRKEGGHGLIDIPHLHDRQIYSLREFFHKKQHTSQLHKAIVLADRNITPLNLQNNTSNPIDNIAHIQEKKTSWSRKELHGRHPHDLQKHFIDTKASNSWLVRGDLFTETEGFVIAIQDQVINTKNYRKYILKDSTLTNDTCRKCHIAPETIQLFTSGCKLLAQTDYLHRHNQVANIIHQKLATKYKLINTLTPYYKYIPDTILENSTHKIYYDRTIITDKTIHHNRPDITLIDKQNKVTYIIDISIPNTHNIQDAFTQKISKYTERSKYTQHRN

SEQ ID NO: 19988 - protein, 1241 aa, Centruroides sculpturatus
MKLRVTTHPHSVEIIIMVVTRSKYDTGSDVARVNKVRVRGLGRGSRSKNRLQSPLVTGGESSAGPSMATAMPSTDVRNQPSPGVSVAMHPQTTKAGKPHQRMKWTTEMNEFIICTYYTITRLETNMTAYRQQLHHIFTQQYPHLTVTEQRAVDQKRTIIHNNLIPQTTLELIKQQVADQIHQQTETFNINEDHVTCQDNPATSIDNSTHTTTTINDTTDTSSSITDNIDIDLVNTLSLIFQETLTKYTGTDPTQRPRIPKINTSKVVGKTLNYVNTHLLPNYIHSISTLSDIHTLVYAGAVTVVTHHGLKIHSQTDTHKTQFYHKPAWQRRIETQINDIRQQLGRLTQYTKNNITPKLKKQLKNIFKKIKTHTKHEHHNTHITEYIDTLKQKLAAKARRLKRYKTCTLRKQQNKLFTNNEKLFYRQISTKTNTDTQHSGTPTEEELTTYWSSLWSNAVTHNADAGWIEEENRNLHNIPTMPCAEINIHDIRYAVNRTHNWKTPGVDNIHNFWYKKFTSLHQELAKHLTHIIINPQDMPKFLTQGITYMKPKNNKTTDPTQYRPITCLPTLYKLLTSCITNKIYKHVEEHDILTEQQKGCRRNHRGCKEQLLIDSVILRQAHKQHRNIHMAYIDYRKAFDSVPHSWLLHILHMYKIHPSLIAFFENTMQHWRTTLHLRVSNTSIQTNEIFIRRGIFQGDSLSPLWFCLALNPLSNMLNNTQYGYNIRHEKTTQFTLSHLMYMDDIKLYASTQKQLHQLLQITHSYTKDIQMEFGLDKCKKLHIEKGILKKEDFALGNGDVIESMEEGEFYKYLGFQQAKLTEHTQIKQRLIKEYQSRLNAILRTQLNAKHTVKAINTYVIPVLTYSFGVIHWTHTDLEQLQRKTRTTLTKHKQHHPKSATERLTLPRKEGGRGLIDIVNLHYKQIQSLREFFYKKQETSQLHKAVTLADSNNTPLNLHSHHTDMTQHIKSIDTIKQSWARKALHGRHPYDLAQDFVDKTASNSWLDRGCLFGETEGFMIAIQDQVINTKNYRKHILKDTTLTNDTCRKCHIMPETIQHITSGCKLLAQTDYLHRHNQVANIIHQELAKKHKLADIHEPYYKYIPQTVLENNTHKMYYDRAIITDKTIYHNRPDITLIDKHNKITYIIDIAIPNTHNVQNTCTEKISKYTELAQEIRHLWRMDRVVIVPVVLSCTGVIPHTLHKSLGTLELSRNTYITLQKATILNTCHIVRKFLNADTDTLI

SEQ ID NO: 19989 - protein, 1234 aa, Mesobuthus martensii
MLNQMLAGVPTLVVFCLYAMAQSRKRKHTGSDVSRVNKVRVCELGRGSHSESLLQSPLATGGESSTNPSQATAIQIPIVGNGSPHQSPTSQSVSQVTQPETTKAGKPRQRMKWTIDMNEFIMRTYYTITKLETNITGYRRELYDKFTSRYPNITVTEQRIADQRRTIIHRNLIPHSTLQSIKTQVAQQISQHETDSHTQIEHDVEQTPEITYINDNTQPINNTDTDLINKLTDTLQETLTKFIGTDPMQRPRIPKLHNSQQLNNTLHCLNTHILPKLINAETTLMELHTLIYAAAVTVTTHLGHKTLPNKIDTNTKHHLKPAWQKRLEKQINEIRTELGRLTQYTKNNTSPKLMKSIRKIFRKLKTHTRHENHNTHIKEYMDTLKQKLAAKSQRLKRYKTSLARKLDNTLFTNNEKTFYRNINNKDPKQTQNSEIPTQQSLTSFWSALWAVPVTHNQRASWITEEETRTLDVPEMPYTTITTEELTNTIRYTHNWKAPGVDGIQNFWYKHFTCFHDLLAKHLTNLIHEPKDTPSFLTHGITFMKPKSTNTGNPSQYRPITCLPTLYKILTSCITNKIYAHVEENNILTEQQKGCRRSHMGCKEQLIIDTTILKQVHRQRRHLHAAYIDYKKAFDSIPHSWLIQTLQIYKINTKYITFLQNLMQHWRTTLHITINNNHVATEPIHIRRGIFQGDSLSPLWFCLALNPLSNKLNTSNYGYDIRQNQTTHYIHLHLFYMDDIKLYASTQTQLQQLLQITHTFSKDIHMEFGLDKCKTLHIEKGVLKKGGFTLEHGDTIKSMEEGELYKYLGFQQARLTEQKKTKQTLSKLYTIRLNNILKTHLNGKNTVKAINTFAIPILTYSFGVIQWTRTELESLQRKTRTTLTKYQYHHPKSAIERTTLPRKEGGCGLIDIPHLHDRQIYNLREFFHKKQHTSQLHKAIVLADRNMTPLNLQNNTPCQIDNTAHIHEKKTSWCKKELHGRHPHDLQKHFIDAKASNSWLVRGDLFTETEGFIIAIQDQVINTKNYRKYILKDSTLTNDTCRKCHIAPETIQHITSGCKLLAQTDYLHRHNQVANIIHQKLATKHKLMNTLTPYYNYIPDTILENSTHKMYYDRTILTDKTIHHNRPDITLIDKQNKVTYIIDISIPDTHNIQDAFTQKISKYTELSQEIKRLWGMQKIVIVPIILSSTGVIPHTLHKSLKTLDLHPKTYITLQKASLLNTCNIVRKFLNTDTDS

SEQ ID NO: 19990 - protein, 1243 aa, Centruroides sculpturatus
MKLRVTTHPHSVEIIIMVVTRSKCDTGSDVARVNKVRVRGLGRGSRSKNRLQSPLVTGGESSAGPSMATAMPSTDVRNQPSLGVSVAMHPQTTKAGKPRQRMKWTTEMNEFIIRTYYTITRLETNMTAYRQQLHHRFTQQYPHLTVTEQRVVDQKRTIIHNNLIPQTTLELIKQQVADQIHQQTETFNINEDHVTCQDNPATSTDYSTHTTSTTNDTAGTSPSITDNIDIELVNTLSLIFQETLIKYTGTDPTQRPRIPKINTSKAVGKTLDYVNTHLLPNYIHSISTLTDIHTLVYAGAVTVVTHHGLKIHSQTDTHKTQFYHKPAWQRRIETQINDIRQQLGRLTQYTKNNITPKLKKQLKNIFKKIKTHTKHEHHNTHITEYIDTLKQKLAAKARRLKRYKTCTLRKQQNKLFTNNEKLFYRQISTKTNTDTQHSGTPTEEELTTYWSSLWSNAVTHNADAGWIEEENRNLHNIPTMPCAEINIHDIRYAVNRTHNWKTPGVDNIHNFWYKKFTSLHQELAKHLTHIIINPQDMPKFLTQGITYMKPKNNNTTDPTQYRPITCLPTLYKLLTSCITNKIYKHVEEHDILTEQQKGCRRNHRGCKEQLLIDSVILRQAHKQHRNIHMAYIDYRKAFDSVPHSWLLHILHMYKIHPSLIAFFENTMQHWRTTLHLRVSNTSIQTNEIFIRRGIFQGDSLSPLWFCLALNPLSNMLNNTQYGYNIRHEKTTQFTLSHLMYMDDIKLYASTQKQLHQLLQITHSYTKDIQMEFGLDKCKKLHIEKGILKKEDFALGNGDVIESMEEGEFYKYLGFQQAKLTEHTQIKQRLIKEYQSRLNAILRTQLNAKHTVKAINTYVIPVLTYSFGVIHWTHTDLEQLQRKTRTTLTKHKQHHPKSATERLTLPRKEGGRGLIDIVNLHYKQIQSLREFFYKKQETSQLHKAVTLADSNNTPLNLHSQHTDMTQHIKSIDNIKQSWAQKALHGRHPYDLAQDFVDKTASNSWLDRGCLFGETEGFMIAIQDQVINTKNYRKHILKDTTLTNDTCRKCHIMPETIQHITSGCKLLAQTDYLHRHNQVANIIHQELAKKHKLADIHEPYYKYIPQTVLENNTHKMYYDRAIITDKTIYHNRPDITLIDKHNKITYIIDIAIPNTHNVQNTCTEKISKYTELAQEIRHLWRMDRVLIVPVVLSCTGVIPHTLHKSLGTLQWSRNTYITLQKATILNTCHIVRKFLNTDTHTDTLI

SEQ ID NO: 19991 - protein, 1207 aa, Centruroides sculpturatus
MKLRVTTHPHSVEIIIMVVTRSKYDTGSDVARVNKVCIRGLGRGSRSKNRPQSPLVTSGKSSIGPSMATAMPSTNVRNQPSLGVSVAMHPQTTKAGKPRQRMKWTTEMNEFIIRTYYTITRLETNMTAYRQQLHHIFTQQYPHLTVTEQRVVDQKRTIIHNNLIPQTTLELIKQQVADQIHQQTETFNINEDHVTCQDNPATSTDYSTHTTSTTNDTAGTSPSITDNVDIELVNTLSLIFQETLIKYTGTDPTQRPRIPKINTSKAVGKTLDYVNTHLLPNYIHSISTLTDIHTLVYAGAVTVVTHHGLKIHSQTDTHKTQFYHKPAWQRRIETQINDIRQQLGRLTQYTKNNITPKLKKQLKNIFKKIKTHTKHEHHNTHITEYIDTLKQKLAAKARRLKRYKTCTLRKQQNKLFTNNEKLFYRQISTKTNTDTQHSGTPTEEELTTYWSSLWSNAVTHNADAGWIKEENRNLHNIPSMPCAEINIHDIRYAVNRTHNWKTPGVDNIHNFWYKKFTSLHQELAKHLTHIIINPQDMPKFLTRGITYMKPKNNKTTDPTQYRPITCLPTLYKLLTSCITNKIYKHVEEHDILTEQQKGCRRNHRGCKEQLLIDSVILRQAHKQHRNIHMAYIDYRKAFDSVPHSWLLHILHMYKIHPSLIAFFENTMQHWRTTLHLRVSNTSIQTNEIFIRRGIFQGDSLSPLWFCLALNPLSNMLNNTQYGYNIRHEKTTQFTLSHLMYMDDIKLYASTQKQLHQLLQITHSYTKDIQMEFGLDKCKKLHIEKGILKKEDFALGNGDVIESMEEGEFYKYLGFQQAKLTEHTQIKQRLIKEYQSRLNAILRTQLNAKHTVKAINTYVIPVLTYSFGVIHWTHTDLEQLQRKTRTTLTKHKQHHPKSATERLTLPRKEGGRGLIDIVNLHYKQIQSLREFFYKKQETSQLHKAVTLADSNNTPLNLHSQHTDMTQHIKSIDNIKQSWAQKALHGRHPYDLAQDFVDKTASNSWLDRGCLFGETEGFMIAIQDQVINTKNYRKHILKDTTLTNDTCRKCHIMPETIQHITSGCKLLAQTDYLHRHNQVANIIHQELAKKHKLADIHEPYYKYIPQTVLENNTHKMYYDRAIITDKTIYHNRPDITLIDKHNKITYIIDIAIPNTHNVQNTCTEKISKYTELAQEIRHLWRMDRVLIVPVVLSCTGYHTHYTKAWEHYN

SEQ ID NO: 19992 - protein, 1196 aa, Centruroides sculpturatus
MVVTKSKCDTGSDIAQVNKVRVRGLGRGSCSKNRPQSPLVTGGESSAGPSMATAMPSTDVRNQPSLGVSVAMHPQTTKAGKPRQRMKWTTEMNEFIIRTYYTITRLETNMTAYRQQLHHRFTQQYPHLTVTEQRVVDQKRTIIHNNLIPQTTLELIKQQVADQIHQQTETFNINEDHVTCQDNPATSTDYSTHTTSTTNDTAGTSPSITDNVDIELVNTLSLIFQETLTKYTGTDPTQRPRIPKINTSKVVGKTLNYVNTHLLPNYIHSISTLSDIHTLVYAGAVTVVTHHGLKIHSQTDTHKTQFYHKPAWQRRIETQINDIRQQLGRLTQYTKNNITPKLKKQLKNIFKKIKTHTKHEHHNTHITEYIDTLKQKLAAKARRLKRYKTCTLRKQQNKLFTNNEKLFYRQISTKTNTDTQHSGTPTEEELTTYWSSLWSNAVTHNADAGWIEEENRNLHNIPTMPCAEINIHDIRYAVNRTHNWKTPGVDNIHNFWYKKFTSLHQELAKHLTHIIINPQDMPKFLTQGITYMKPKNNKTTDPTQYRPITCLPTLYKLLTSCITNKIYKHVEEHDILTEQQKGCRRNHRGCKEQLLIDSVILRQAHKQHRNIHMAYIDYRKAFDSVPHSWLLHILHMYKIHPSLIAFFENTMQHWRTTLHLRVSNTSIQTNEIFIRRGIFQGDSLSPLWFCLALNPLSNMLNNTQYGYNIRHEKTTQFTLSHLMYMDDIKLYASTQKQLHQLLQITHSYTKDIQMEFGLDKCKKLHIEKGILKKEDFALGNGDVIESMEEGEFYKYLGFQQAKLTEHTQIKQRLIKEYQSRLNAILRTQLNAKHTVKAINTYVIPVLTYSFGVIHWTHTDLEQLQRKTRTTLTKHKQHHPKSATERLTLPRKEGGRGLIDIVNLHYKQIQSLREFFYKKQETSQLHKAVTLADSNNTPLNLHSQHTDMTQHIKSIDNIKHRHHQAIVGSKGTPWQAQDFIDKTASNSWLDQGCFFGEMEGFMIAIQDQVINTKNYRKHILKNTTVTNDTCRKCHIMPETIQHINSGCKLLAQTDYLHRYNQVANIIHQELANKHNLVDMHEPYYKYIPQTVLENNTHKMYYDRAIITDKTIYHNRPDITLIDKYNKITYIIDIAIPNTHNVQNTYTEKITKYTELAQEIRHLWRMDRMLIVSVVLSCTGRILHTLHKSLGTLQYSIE

SEQ ID NO: 19993 - protein, 1241 aa, Centruroides sculpturatus
MKLRVTTHPHSVEIIIMVVTRSKYDTGSDVARVNKVRVRGLGRGSRSKNRLQSPLVTGGESSAGPSMATAMPSTDVRNQPSLGVSVAMHPQTTKAGKPRQRMKWTTEMNEFIIRTYYTITRLETNMTAYRQQLHHRFTQQYPHLTVTEQRVVDQKRTIIHNNLIPQTTLELIKQQVADQIHQQTETFNINEDHVTCQDNPATSTDYSTHTTSTTNDTAGTSPSITDNVDIELVNTLSLIFQETLTKYTGTDPTQRPRIPKINTSKVVGKTLNYVNTHLLPNYIHSISTLSDIHTLVYAGAVTVVTHHGLKIHSQTDTHKTQFYHKPAWQRRIETQINDIRQQLGRLTQYTKNNITPKLKKQLKNIFKKIKTHTKHEHHNTHITEYIDTLKQKLAAKARRLKRYKTCTLRKQQNKLFTNNEKLFYRQISTKTNTDTQHSGTPTEEELTTYWSSLWSNAVTHNADAGWIEEENRNLHNIPTMPCAEINIHDIRYAVNRTHNWKTPGVDNIHNFWYKKFTSLHQELAKHLTHIIINPQDMPKFLTQGITYMKPKNNKTTDPTQYRPITCLPTLYKLLTSCITNKIYKHVEEHDILTEQQKGCRRNHRGCKEQLLIDSVILRQAHKQHRNIHMAYIDYRKAFDSVPHSWLLHILHMYKIHPSLIAFFENTMQHWRTTLHLRVSNTSIQTNEIFIRRGIFQGDSLSPLWFCLALNPLSNMLNNTQYGYNIRHEKTTQFTLSHLMYMDDIKLYASTQKQLHQLLQITHSYTKDIQMEFGLDKCKKLHIEKGILKKEDFALGNGDVIESMEEGEFYKYLGFQQAKLTEHTQIKQRLIKEYQSRLNAILRTQLNAKHTVKAINTYVIPVLTYSFGVIHWTHTDLEQLQRKTRTTLTKHKQHHPKSATERLTLPRKEGGRGLIDIVNLHYKQIQSLREFFYKKQETSQLHKAVTLADSNNTPLNLHSQHTDMTQHIKSIDNIKQSWAQKALHGRHPYDLAQDFVDKTASNSWLDRGCLFGETEGFMIAIQDQVINTKNYRKHILKDTTLTNDTCRKCHIMPETIQHITSGCKLLAQTDYLHRHNQVANIIHQELAKKHKLADIHEPYYKYIPQTVLENNTHKMYYDRAIITDKTIYHNRPDITLIDKHNKITYIIDIAIPNTHNVQNTCTEKISKYTELAQEIRHLWRMDRVVIVPVVLSCTGVIPHMLHKSLGTLQLSRNTYITLQKATTLNTGHIVRKFLNTDTDTHI

SEQ ID NO: 19994 - protein, 1241 aa, Centruroides sculpturatus
MKLRVTTHPHSVEIIIMVVTRSKYDTGSDVARVNKVRVRGLGRGSRSKNRLQSPLVTGGESSAGPSMATAMPSTDVRNQPSLGVSVAMHPQTTKAGKPRQRMKWTTEMNEFIIRTYYTITRLETNMTAYRQQLHHRFTQQYPHLTVTEQRVVDQKRTIIHNNLIPQTTLELIKQQVADQIHQQTETFNINEDHVTCQDNPATSTDYSTHTTSTTNDTAGTSPSITDNIDIELVNTLSLIFQETLTKYTGTDPTQRPRIPKINTSKVVGKTLNYVNTHLLPNYIHSISTLSDIHTLVYAGAVTVVTHHGLKIHSQTDTHKTQFYHKPAWQRRIETQINDIRQQLGRLTQYTKNNITPKLKKQLKNIFKKIKTHTKHEHHNTHITEYIDTLKQKLAAKARRLKRYKTCTLRKQQNKLFTNNEKLFYRQISTKTNTDTQHSGTPTEEELTTYWSSLWSNAVTHNADAGWIEEENRNLHNIPTMPCAEINIHDIRYAVNRTHNWKTPGVDNIHNFWYKKFTSLHQELAKHLTHIIINPQDMPKFLTRGITYMKPKNNKTTDPTQYRPITCLPTLYKLLTSCITNKIYKHVEEHDILTEQQKGCRRNHRGCKEQLLIDSVILRQAHKQHRNIHMAYIDYRKAFDSVPHSWLLHILHMYKIHPSLIAFFENTMQHWRTTLHLRVSNTSIQTNEIFIRRGIFQGDSLSPLWFCLALNPLSNMLNNTQYGYNIRHEKTTQFTLSHLMYMDDIKLYASTQKQLHQLLQITHSYTKDIQMEFGLDKCKKLHIEKGILKKEDFALGNGDVIESMEEGEFYKYLGFQQAKLTEHTQIKQRLIKEYQSRLNAILRTQLNAKHTVKAINTYVIPVLTYSFGVIHWTHTDLEQLQRKTRTTLTKHKQHHPKSATERLTLPRKEGGRGLIDIVNLHYKQIQSLREFFYKKQETSQLHKAVTLADSNNTPLNLHSHHTDMTQHIKSIDTIKQSWARKALHGRHPYDLAQDFVDKTASNSWLDRGCLFGETEGFMIAIQDQVINTKNYRKHILKDTTLTNDTCRKCHIMPETIQHITSGCKLLAQTDYLHRHNQVANIIHQELAKKHKLADIHEPYYKYIPQTVLENNTHKMYYDRAIITDKTIYHNRPDITLIDKHNKITYIIDIAIPNTHNVQNTCTEKISKYTELAQEIRHLWRMDRVVIVPVVLSCTGVIPHTLHKSLGTLELSRNTYITLQKATILNTCHIVRKFLNTDTATLI

SEQ ID NO: 19995 - protein, 972 aa, Centruroides sculpturatus
MLNYVNTHLLPNYIHSISTLSDIHTLVYAGAVTVVTHHGLKIHSQTDTHKTQSYHKPAWQRRIETQINDIRQQLGRLTQYTKNNITPKLKKQLKNIFKKIKTHTKHEHHNTHITEYIDTLKQKLAAKARRLKRYKTCTLRKQQNKLFTNNEKLFYRQISTKTNTDTQHSGTPTEEELTTYWSSLWSNAVTHNADAGWIEEENRNLHNIPTMPCAEINVHDIRYAVNRTHNWKTPGVDNIHNFWYKKFTSLHQELAKHLTHIIINPQDMPKFLTQGITYMKPKNNKTTDPTQYRPITCLPTLYKLLTSCITNKIYKHVEEHDILTEQQKGCRRNHRGCKEQLLIDSVILRQAHKQHRNIHMAYIDYRKAFDSVPHSWLLHILHMYKIHPSLIAFFENTMQHWRTTLHLRVSNTSIQTNEIFIRRGIFQGDSLSPLWFCLALNPLSNMLNNTQYGYNIRHEKTTQFTLSHLMYMDDIKLYASTQKQLHQLLQITHSYTKDIQMEFGLDKCKKLHIEKGILKKEDFALGNGDVIESMEEGEFYKYLGFQQAKLTEHTQIKQRLIKEYQSRLNAILRTQLNAKHTVKAINTYVIPVLTYSFGVIHWTHTDLEQLQRKTRTTLTKHKQHHPKSATERLTLPRKEGGRGLIDIVNLHYKQIQSLREFFYKKQETSQLHKAVTLADSNNTPLNLHSQHTDMTQHIKSIDNIKQSWAQKALHGRHPYDLAQDFVDKTASNSWLDRGCLFGETEGFMIAIQDQVINTKNYRKHILKDTTLTNDTCRKCHIMPETIQHITSGCKLLAQTDYLHRHNQVANIIHQELAKKHKLADIHEPYYKYIPQTVLENNTHKMYYDRAIITDKTIYHNRPDITLIDKHNKITYIIDIAIPNTHNVQNTCTEKISKYTELAQEIRHLWRMDRVLIVPVVLSCTGVIPHTLHKSLGTLELNRNTYIILQKATILNTCHIVRKSLNTDTNKLI

SEQ ID NO: 19996 - protein, 1123 aa, Centruroides sculpturatus
MVVTRSKYDTGSEVARVNKVHICGLGRVSHSKNRPQSPLVTGGESSDVPSMATAMPSTDIKARLIPHVSVAMHPQTKKAGKPRQRMKWTTEMNEFIIRTYYTITRLETNMTAYRQQLHHRFTQQYPHLTVTEQRVVDQKRTIIHNNLIPQTTLELIKQQVADQIHQQTETFNINEDHVTCQDNPATSTDYSTHTTSTTNDTAGTSPSITDNVDIELVNTLSLIFQETLTKYTGTDPTQRPRIPKINTSKVVGKTLNYVNTHLLPNYIHSISTLSDIHTLVYAGAVTVVTHHGLKIHSQTDTHKTQFYHKPAWQRRIETQINDIRQQLGRLTQYTKNNITPKLKKQLKNIFKKIKTHTKHEHHNTHITEYIDTLKQKLAAKARRLKRYKTCTLRKQQNKLFTNNEKLFYRQISTKTNTDTQHSGTPTEEELTTYWSSLWSNAVTHNADAGWIKEENRNLHNIPTMPCAEINIHDIRYAVNRTHNWKTPGVDNIHNFWYKKFTSLHQELAKHLTHIIINPQDMPKFLTQGITYMKPKNNKTTDPTQYRPITCLPTLYKLLTSCITNKIYKHVEEHDILTEQQKGCRRNHRGCKEQLLIDSVILRQAHKQHRNIHMAYIDYRKAFDSVPHSWLLHILHMYKIHPSLIAFFENTMQHWRTTLHLRVSNTSIQTNEIFIRRGIFQGDSLSPLWFCLALNPLSNMLNNTQYGYNIRHEKTTQFTLSHLMYMDDIKLYASTQKQLHQLLQITHSYTKDIQMEFGLDKCKKLHIEKGILKKEDFALGNGDVIESMEEGEFYKYLGFQQAKLTEHTQIKQRLIKEYQSRLNAILRTQLNAKHTVKAINTYVIPVLTYSFGVIHWTHTDLEQLQRKTRTTLTKHKQHHPKSATERLTLPRKEGGRGLIDIVNLHYKQIQSLREFFYKKQETSQLHKAVTLADSNNTPLNLHSQHTDMTQHIKSIDNIKQSWAQKALHGRHPYDLAQDFVDKTASNSWLDRGCLFGETEGFMIAIQDQVINTKNYRKHILKDTTLTNDTCRKCHIMPETIQHITSGCKLLAQTDYLHRHNQVANIIHQELAKKHKLVNIHEPYYKYVPQTVLENNTHKMYYERAVIADKTIYHNRPDITLIDKQ

SEQ ID NO: 19997 - protein, 1241 aa, Centruroides sculpturatus
MKLRVTTHPHSVEIIIMVVTRSKYDTGSDVARVNKVRVRGLGRGSRSKNRLQSPLVTGGESSAGPSMATAMPSTDVRNQPSLGVSVAMHPQTTKAGKPRQRMKWTTEMNEFIIRTYYTITRLETNMTAYRQQLHHRFTQQYPHLTVTEQRVVDQKRTIIHNNLIPQTTLELIKQQVADQIHQQTETFNINEDHVTCQDNPATSTDYSTHTTSTTNDTAGTSPSITDNVDIELVNTLSLIFQETLTKYTGTDPTQRPRIPKINTSKVVGKTLNYVNTHLLPNYIHSISTLSDIHTLVYAGAVTVVTHHGLKIHSQTDTHKTQFYHKPAWQRRIETQINDIRQQLGRLTQYTKNNITPKLKKQLKNIFKKIKTHTKHEHHNTHITEYIDTLKQKLAAKARRLKRYKTCTLRKQQNKLFTNNEKLFYRQISTKTNTDTQHSGTPTEEELTTYWSSLWSNAVTHNADAGWIEEENRNLHNIPTMPCAEINIHDIRYAVNRTHNWKTPGVDNIHNFWYKKFTSLHQELAKHLTHIIINPQDMPKFLTQGITYMKPKNNKTTDPTQYRPITCLPTLYKLLTSCITNKIYKHVEEHDILTEQQKGCRRNHRGCKEQLLIDSVILRQAHKQHRNIHMAYIDYRKAFDSVPHSWLLHILHMYKIHPSLIAFFENTMQHWRTTLHLRVSNTSIQTNEIFIRRGIFQGDSLSPLWFCLALNPLSNMLNNTQYGYNIRHEKTTQFTLSHLMYMDDIKLYASTQKQLHQLLQITHSYTKDIQMEFGLDKCKKLHIEKGILKKEDFALGNGDVIESMEEGEFYKYLGFQQAKLTEHTQIKQRLIKEYQSRLNAILRTQLNAKHTVKAINTYVIPVLTYSFGVIHWTHTDLEQLQRKTRTTLTKHKQHHPKSATERLTLPRKEGGRGLIDIVNLHYKQIQSLREFFYKKQETSQLHKAVTLADSNNTPLNLHSHHTDMTQHIKSIDTIKQSWARKALHGRHPYDLAQDFVDKTASNSWLDRGCLFGETEGFMIAIQDQVINTKNYRKHILKDTTLTNDTCRKCHIMPETIQHITSGCKLLAQTDYLHRHNQVANIIHQELAKKHKLADIHEPYYKYIPQTVLENNTHKMYYDRAIITDKTIYHNRPDITLIDKHNKITYIIDIAIPNTHNVQNTCTEKISKYTELAQEIRHLWRMDRVLIVPVVLSCTGVIPHTLHKSLGTLELSRNTYITLQKATILNTCHIVRKFLNTDTDTLL

SEQ ID NO: 19998 - protein, 1241 aa, Centruroides sculpturatus
MKLRVTTHPHSVEIIIMVVTRSKYDTGSDVARVNKVRVRGLGRGSRSKNRLQSPLVTGGESSAGPSMATAMPSTDVRNQPSLGVSVAMHPQTTKAGKPRQRMKWTTEMNEFIIRTYYTITRLETNMTAYRQQLHHRFTQQYPHLTVTEQRVVDQKRTIIHNNLIPQTTLELIKQQVADQIHQQTETFNINEDHVTCQDNPATSTDYSTHTTSTTNDTAGTSPSITDNIDIELVNTLSLIFQETLTKYTGTDPTQRPRIPKINTSKVVGKTLNYVNTHLLPNYIHSISTLSDIHTLVYAGAVTVVTHHGLKIHSQTDTHKTQFYHKPAWQRRIETQINDIRQQLGRLTQYTKNNITPKLKKQLKNIFKKIKTHTKHEHHNTHITEYIDTLKQKLAAKARRLKRYKTCTLRKQQNKLFTNNEKLFYRQISTKTNTDTQHSGTPTEEELTTYWSSLWSNAVTHNADAGWIEEENRNLHNIPTMPCAEINIHDIRYAVNRTHNWKTPGVDNIHNFWYKKFTSLHQELAKHLTHIIINPQDMPKFLTQGITYMKPKNNKTTDPTQYRPITCLPTLYKLLTSCITNKIYKHVEEHDILTEQQKGCRRNHRGCKEQLLIDSVILRQAHKQHRNIHMAYIDYRKAFDSVPHSWLLHILHMYKIHPSLIAFFENTMQHWRTTLHLRVSNTSIQTNEIFIRRGIFQGDSLSPLWFCLALNPLSNMLNNTHYGYNIRHEKTTQFTLSHLMYMDDIKLYASTQKQLHQLLQITHSYTKDIQMEFGLDKCKKLHIEKGILKKEDFALGNGDVIESMEEGEFYKYLGFQQAKLTEHTQIKQRLSKEYQSRLNGILRTQLNAKHTVKAINTYVIPVLTYSFGVIHWTHTDLEQLQRKTRTTLTKHKQHHPKSATERLTLPRKEGGRGLIDIVNLHYKQIQSLREFFYKKQETSQLHKAVTLADSNNTPLNLHSHHTDMTQHIKSIDTIKQSWARKALHGRHPYDLAQDFVDKTASNSWLDRGCLFGETEGFMIAIQDQVINTKNYRKHILKDTTLTNDTCRKCHIMPETIQHITSGCKLLAQTDYLHRHNQVANIIHQELAKKHKLADIHEPYYKYIPQTVLENNTHKMYYDRAIITDKTIYHNRPDITLIDKHNKITYIIDIAIPNTHNVQNTCTEKISKYTELAQEIRHLWRMDRVVIVPVVLSCTGVIPHTLHKSLGTLQLSRNTYITLQKATILSTCHIVRKFLNTDTDTHI

SEQ ID NO: 19999 - protein, 1243 aa, Centruroides sculpturatus
MKLRVTTHPHSVEIIIMVVTRSKCDTGSDVARVNKVRVRELGRGSRSKNRLQSPLATGGESSAGPSMATAMPSTDVRNQPSPGVSVAMHPQTTKAGKPRQRMKWTTEMNEFIIRTYYTITKLETNMTAYRQQLHHRFTQQYPHLTVTEQRVVDQKRTIIHNNLIPQTTLEHIKQQVADQIHQQTETFNINEDHVTCQDNPATSIDNSTHTTTTINDTPDTSSSITDNIDIHLVNTLSLIFQETLTKYTGTDPTQRPRIPKINTSRAVGKTLHYVNTHLLPNYIHSISTLSDIHTLVYAGAVTVVTHHGLKIHSQTDTHKTQSYHKPAWQRRIETQINDIRQQLGRLTQYTKNNITPKLKKQLKNIFKKIKTHTKHEHHNTHITEYIDTLKQKLAAKARRLKRYKTCTLRKQQNKLFTNNEKLFYRQISTKTNTDTQHSGTPTEEELTTYWSSLWSTAVMHNADAGWIEEENRNLHNITTMPCAEINVHDIRYAVNRTHNWKTPGVDNIHNFWYKKFTSLHQELAKHLTHIIINPQDMPKFLTQGITYMKPKNNKTTDPTQYRPITCLPTLYKLLTSCITNKIYKHVEEHDILTEQQKGCRRNHRGCKEQLLIDSVILRQAHKQHRNIHMAYIDYRKAFDSVPHSWLLHILHMYKIHPSLIAFFQNTMQHWRTTLHLRVSNTSIQTNEIFIRRGIFQGDSLSPLWFCLALNPLSNMLNNTQYGYNIRHEKTTQFTLSHLMYMDDIKLYASTQKQLQQFLQITHSYTKDIQMEFGLDKCKTLHIEKGVLKKEDFALGNGDVIESMEEDEFYKYLGFQQAKLTEHTQIKQRLSKEYQSRLNGILRTQLNAKHTVKAINTYVIPVLTYSFGVIHWTHTDLEQLQRKTRTTLTKHKQHHPKSTIERLTLPRKDGGRGLIDIVNLHYKQIQSLREFFYRKQETSQLHKAVTLADSNNTPLNLHSHHTDMTQHIKSIDTIKQSWARKALHGRHPYDLAQDFVDKTASNSWLDRGCLFGETEGFMIAIQDQVINTKNYRKHILKDTTLTNDTCRKCHIMPETIQHITSGCKLLAQTDYLHRHNQVANIIHQELAKKHKLVDIHKPYYKYIPQTVLENNTHKMYYDRAIITDKTIYHNRPDITLIDKHNKITYIIDIAIPNTHNVQNTCTEKISKYTELAQEVRHLWRMERVLIVPVVLSCTGVIPHTLHKSLGTLQLNRNTYITLQKATILNTCHIVRKFLNTDTDTDTLI

SEQ ID NO: 20000 - protein, 1201 aa, Centruroides sculpturatus
MVVTRSKCDTGLDVARVNKVRVCGLGRGSHSKNRPQSPLVTGGESSAGPSMATAMSSTDVRNQPSLGVSVAMRPQTTKAGKPRQRMKWTTEMNQFIIRTYYIITKLETNMTAYRQLHHRFTQQYPHLTVTEQKRTIVHNNLIPQPTLKLIKQQVADQIHQQAETFNINEDHVTCHDNPATSIDNSTHTTTTNSDTTDTPSSITDNIDIDLVNTLSLIFQETLTKYTGTDPTQRPRIPKINTSKVVGKTLNYVNTHLLPNYIHSISTLSDIHTLVYAGAVTVVTHHGLKIHSQTDTHKTQFYHKPAWQRRIETQINDIRQQLGRLTQYTKNNITPKLKKQLKNIFKKIKTHTKHEHHNTHITEYIDTLKQKLAAKARRLKRYKTCTLRKQQNKLFTNNEKLFYRQISTKTNTDTQHSGTPTEEELTTYWSSLWSNAVTHNADAGWIKEENRNLHNIPSMPCAEINIHDIRYAVNRTHNWKTPGVDNIHNFWYKKFTSLHQELAKHLTHIIINPQDMPKFLTQGITYMKPKNNKTTDPTQYRPITCLPTLYKLLTSCITNKIYKHVEEHDILTEQQKGCRRNHRGCKEQLLIDSVILRQAHKQHRNIHMAYIDYRKAFDSVPHSWLLHILHMYKIHPSLIAFFENTMQHWRTTLHLRVSNTSIQTNEIFIRRGIFQGDSLSPLWFCLALNPLSNMLNNTHYGYNIRHEKTTQFTLSHLMYMDDIKLYASTQKQLHQLLQITHSYTKDIQMEFGLDKCKKLHIEKGILKKEDFALGNGDVIESMEEGEFYKYLGFQQAKLTEHTQIKQRLIKEYQSRLNAILRTQLNAKHTVKAINTYVIPVLTYSFGVIHWTHTDLEQLQRKTRTTLTKHKQHHPKSATERLTLPRKEGGRGLIDIVNLHYKQIQSLREFFYKKQETSQLHKAVTLADSNNTPLNLHSHHTDMTQHIKSIDTIKQSWARKALHGRHPYDLAQDFVDKTASNSWLDRGCLFGETEGFMIAIQDQVINTKNYRKHILKDTTLTNDTCRKCHIMPETIQHITSGCKLLAQTDYLHRYNQVANIIHQELANKHKLSDIHEPYYKYIPQTVLENNTHKMYYDRAIIIDKTIHNRPDITLIDKHNKITYIIDIAISNTYNVQNPCAEKISKYTELAQEIRHLWRMDRVLIAPVVLSCTGVIPHTLHKRLRTLQLNRNTEGHYIEYMPHC

SEQ ID NO: 20001 - protein, 1230 aa, Mesobuthus martensii
MLAGIPTLVVFFQFVMKQSRKRKHTGSDVARVNKVRVCELGRGSHSESLLQSPLATGGESSTNPSQATAIQIPIVGNGSPHQSPTSQSVSLETQPETTKAGKPRQRMKWTIDMNEFIMRTYYTITKLETDITGYRRELYDKFTSRYPNITVTEQRIADQRRTIIHRNLIPHSTLQSIKTQVAQQISQHETDSHTQIEHDVEQTPEITYINDNTQPINNTDTDLINKLTDTLQETLTKFIGTDPMQRPRIPKLHNSQQLNNTLHCMNTHILPKLINAETTLMELHTLIYAAAVTVTTHLGHKTLPNKIDTNTKHHLKPAWQKRLEKQINEIRTELGRLTQYTKNNTSPKLMKSIRKIFRKLKTHTRHENHNTHIKEYMDTLKQKLAAKSQRLKRYKTSLARKLDNTLFTNNEKTFYRNINTKDPKQTQNSEIPTQQSLTSFWSALWAVPVTHNQRASWITEEETHTLDVPEMPYTTITTEELTNTIRYTHNWKAPGVDGIQNFWYKHFTCFHDLLAKHLTNLIHEPKDTPSFLTHGITFMKPKSTNTGNPSQYRPITCLPTLYKILTSCITNKIYAHVEENNILTEQQKGCRRSHMGCKEQLIIDTTILKQVHRQRRHLHAAYIDYKKAFDSIPHSWLIQTLQIYKINTKYITFLQNIMQHWRTTLHITINNNHVATEPIHIRRGIFQGDSLSPLWFCLALNPLSNKLNRSNYGYDIRQNQTTHYIHSHLFYMDDIKLYASTQTQLQQLLQITHTFSKDIHMEFGLDKCKTLHIEKGVLKKGGFTLEHGDTIKSMEEGELYKYLGFQQARLTEQKKTKQTLSKLYTNRLNNILKTHLNGKNTVKAINTFAIPILTYSFGVIQWTRTELESLQRKTRTTLTKYQYHHPKSAIERTTLPRKEGGRGLIDIPHLHDRQIYNLREFFHKKQHTSQLHKAIVLADRNMTPLNLQNNTPCQIDNTAHIHEKKTSWCKKELHGRHPHDLQKHFIDAKASNSWLVRGDLFTETEGFIIAIQDQVINTKNYRKYILKDSTLTNDTCRKCHIAPETIQHITSGCKLLAQTDYLHRHNQVANIIHQKLATKHKLMNTLTPYYNYIPDTILENSTHKMYYDRTILTDKTIHHNRPDITLIDKQNKVTYIIDISIPDTHNIQDAFTQKISKYTELSQEIKRLWGMQKVVIVPIILSSTGVIPHTLHKSLKTLDLHPKTYITLQKASLLNTCNIVRKFLNTDTDS

SEQ ID NO: 20002 - protein, 1177 aa, Centruroides sculpturatus
MATAMPSTDVRNQPSLGVSVAMHQHTTKAGKPRQQVKWTSEMNEFIIRTYYTITRLETNMTAYRQQLHHRFTQQYPHLTVTEQRVVDQKRTIIHNNLIPQTTLELIKQQVADQIHQQTETFNINEDHVTCQDNPATSTDYSTHTTSTTNDTAGTSPSITDNIDIELVNTLSLIFQETLTKYTGTDPTQRPRIPKINTSKVVGKTLNYVNTHLLPNYIHSISTLSDIHTLVYAGAVTVVTHHGLKIHSQTDTHKTQFYHKPAWQRRIETQINDIRQQLGRLTQYTKNNITPKLKKQLKNIFKKIKTHTKHEHHNTHITEYIDTLKQKLAAKARRLKRYKTCTLRKQQNKLFTNNEKLFYRQISTKTNTDTQHSGTPTEEELTTYWSSLWSNAVTHNADAGWIEEENRNLHNIPTMPCAEINIHDIRYAVNRTHNWKTPGVDNIHNFWYKKFTSLHQELAKHLTHIIINPQDMPKFLTQGITYMKPKNNKTTDPTQYRPITCLPTLYKLLTSCITNKIYKHVEEHDILTEQQKGCRRNHRGCKEQLLIDSVILRQAHKQHRNIHMAYIDYRKAFDSVPHSWLLHILHMYKIHPSLIAFFENTMQHWRTTLHLRVSNTSIQTNEIFIRRGIFQGDSLSPLWFCLALNPLSNMLNNTHYGYNIRHEKTTQFTLSHLMYMDDIKLYASTQKQLHQLLQITHSYTKDIQMEFGLDKCKKLHIEKGILKKEDFALGNGDVIESMEEGEFYKYLGFQQAKLTEHTQIKQRLIKEYQSRLNAILRTQLNAKHTVKAINTYVIPVLTYSFGVIHWTHTDLEQLQRKTRTTLTKHKQHHPKSATERLTLPRKEGGRGLIDIVNLHYKQIQSLREFFYRKQETSQLHKAVTLADSNSTPLNLHSHHTDMTQHIKSIDTIKQSWARKALHGRHPYDLAQDFVDKTASNSWLDRGCLFGETEGFMIAIQDQVINTKNYRKHILKDTTLTNDTCRKCHIMPETIQHITSGCKLLAQTDYLHRHNQVANIIHQELAKKHKLADIHEPYYKYIPQTVLENNTHKMYYDRAIITDKTIYHNRPDITLIDKHNKITYIIDIAIPNTHNVQNTCTEKISKYTELAQEIRHLWRMDRVLVVPVVLSCTGVIPHTLHKSLGTLQLSRNTYITLQKATILNTCHIVRKFLNTETHTDILI

SEQ ID NO: 20003 - protein, 1225 aa, Centruroides sculpturatus
MVVTRSKCDTGSDVARVNKVRVHELGRGSCSKNRPQSPLVTGGESSAGPSMATAMPSTDVRNQPSLGVSVAMHPQTTKAGKPRQRMKWTTEMNEFIIRTYYTITRLETNMTAYRQQLHHRFTQQYPHLTVTEQRVVDQKRTIIHNNLIPQTTLELIKQQVADQIHQQTETFNINEDHVTCQDNPATSTDYSTHTTSTTNDTAGTSPSITDNIDIELVNTLSLIFQETLTKYTGTDPTQRPRIPKINTSKVVGKTLNYVNTHLLPNYIHSISTLSDIHTLVYAGAVTVVTHHGLKIHSQTDTHKTQFYHKPAWQRRIETQINDIRQQLGRLTQYTKNNITPKLKKQLKNIFKKIKTHTKHEHHNTHITEYIDTLKQKLAAKARRLKRYKTCTLRKQQNKLFTNNEKLFYRQISTKTNTDTQHSGTPTEEELTTYWSSLWSNAVTHNADAGWIEEENRNLHNIPTMPCAEINIHDIRYAVNRTHNWKTPGVDNIHNFWYKKFTSLHQELAKHLTHIIINPQDMPKFLTRGITYMKPKNNKTTDPTQYRPITCLPTLYKLLTSCITNKIYKHVEEHDILTEQQKGCRRNHRGCKEQLLIDSVILRQAHKQHRNIHMAYIDYRKAFDSVPHSWLLHILHMYKIHPSLIAFFENTMQHWRTTLHLRVSNTSIQTNEIFIRRGIFQGDSLSPLWFCLALNPLSNMLNNTQYGYNIRHEKTTQFTLSHLMYMDDIKLYASTQKQLHQLLQITHSYTKDIQMEFGLDKCKKLHIEKGILKKEDFALGNGDVIESMEEGEFYKYLGFQQAKLTEHTQIKQRLIKEYQSRLNAILRTQLNAKHTVKAINTYVIPVLTYSFGVIHWTHTDLEQLQRKTRTTLTKHKQHHPKSATERLTLPRKEGGRGLIDIVNLHYKQIQSLREFFYKKQETSQLHKAVTLADSNNTPLNLHSHHTDMTQHIKSIDTIKQSWARKALHGRHPYDLAQDFVDKTASNSWLDRGCLFGETEGFMIAIQDQVINTKNYRKHILKDTTLTNDTCRKCHIMPETIQHITSGCKLLAQTDYLHRHNQVANIIHQELAKKHKLADIHEPYYKYIPQTVLENNTHKMYYDRAIITDKTIYHNRPDITLIDKHNKITYIIDIAIPNTHNVQNTCTEKISKYTELAQEIRHLWRMDRVLIVPVVLSCTGVIPHTLHKSLGTLQLNRNTYITLQKATILNTCHIVRKFLNTDTDKLI

SEQ ID NO: 20004 - protein, 1214 aa, Mesobuthus martensii
MAQSRKRKHTGSDVSRVNKVRVCELGRGSHSESLLQSPLATGGESSTNPSLATAIHIPRVGNGSPHQSPTSQRVSQVTQPETTKAGKPRQRMKWTTDMNEFIMRTYYTITKLETDSTGYRRELYDKFTSRYPNITVTEQRIADQRRTIIHRNLIPHSTLENIKTQVAEQISQHKTDSHTQIEHDVEQTPEITYINDNMQPINNTDTDLINKLTDTLQETLTKFTGTDPTQRPRIPKLHNSQQLNNTLHCMNTHILPKFINAETTLIEIHTLIYAAAVTVTTHLGLKTLPNKLGTNTRHHLKPAWQKRLEKQINEIRMDLGRLTQYTKNNTSTKLMKSIRKIFRKLKTHTHHENHNIHIKEYIDTLKQKLTAKSQRLKRYKTSLARKQDNTLFTNNEKTFYRNINTKDPRQAQNREIPTQQSLTSFWSALWAVPVIHNQRASWIAEEETRILNVPEMPYTAIATEELTNTIRRTHNWKAPGVDGIQNFWYKHFTCLHDLLAKHLTHLIHEPKDTPPFLTQGITFMKPKSTNTGNPSQYRPITCLPTLYKILTSCITNKIYTHIEENNILTEQQKGCRRSHMGCKEQLIIDTTILKQVHRQHRHLHAAYIDYKKAFDSVPHSWLIQTLQLYKINTTYITFLQNIIQHWRTTLHVTINNNHVATEPIHIRRGIFQGDSLSPLWFCLALNPLSNKLNTSNCGYNIRQNRTTHYTLSHLLYMDDIKLYASTQTQLQQLLQITHTFSKDICMEFGLDKCKTIHIEKGVLKKGDFTLENGDTIESMEEGEVYKYLGFQQARLTEQKKTKQTLSKQYTNRLNNILKTHLNGKNTVKAINTFAIPVLTYSFGVIQWTQTELESLQRKTRTALTKHQYHHPKSAIERTTLPRKEGGRGLIDIPHLHDRQIYSLREFFHKKQHTSQLHKAIVLADRNITPLNLQNNTSNPIDNIAHIQEKKTSWSRKELHGRHPHDLQKHFIDTKASNSWLVRGDLFTETEGFVIAIQDQVINTKNYRKYILKDSTLTNDTCRKCHITPETIQHISSGCKLLAQTDYLHRHNQVANIIHQKLATKYKLINTLTPYYKYIPDTILENSTHKIYYDRTIITDKTIHHNRPDITLIDKQNKVTYIIDISIPNTHNIQDAFTQKISKYTELSQEIKRLWGMQKVITVPIILSSTGVIPHTLHKSLGTLDLHPKTYITLQKASLLNTCNIVRKFLSNTDS

SEQ ID NO: 20005 - protein, 764 aa, Centruroides sculpturatus
MPCAEINIHDIRYAVNRTHNWKTPGVDNIHNFWYKKFTSLHQELAKHLTHIIINPQDMPKFLTQGITYMKPKNNKTTDPTQYRPITCLPTLYKLLTSCITNKIYKHVEEHDILTEQQKGCRRNHRGCKEQLLIDSVILRQAHKQHRNIHMAYIDYRKAFDSVPHSWLLHILHMYKIHPSLIAFFENTMQHWRTTLHLRVSNTSIQTNEIFIRRGIFQGDSLSPLWFCLALNPLSNMLNNTQYGYNIRHEKTTQFTLSHLMYMDDIKLYASTQKQLHQLLQITHSYTKDIQMEFGLDKCKKLHIEKGILKKEDFALGNGDVIESMEEGEFYKYLGFQQAKLTEHTQIKQRLIKEYQSRLNAILRTQLNAKHTVKAINTYVIPVLTYSFGVIHWTHTDLEQLQRKTRTTLTKHKQHHPKSATERLTLPRKEGGRGLIDIVNLHYKQIQSLREFFYKKQETSQLHKAVTLADSNNTPLNLHSHHTDMTQHIKSIDTIKQSWARKALHGRHPYDLAQDFVDKTASNSWLDRGCLFGETEGFMIAIQDQVINTKNYRKHILKDTTLTNDTCRKCHIMPETIQHITSGCKLLAQTDYLHRHNQVANIIHQELAKKHKLADIHEPYYKYIPQTVLENNTHKMYYDRAIITDKTIYHNRPDITLIDKHNKITYIIDIAIPNTHNVQNTCTEKISKYTELAQEIRHLWRMDRVLIVPVVLSCTGVIPHTLHKSLGTLQLNRNTYITLQKATILNTCHIVRKFLNTNTDTDILI

SEQ ID NO: 20006 - protein, 1241 aa, Centruroides sculpturatus
MKLRVTTHPHSVEIIIMVVTRSKYDTGSDVARVNKVRVRGLGRGSRSKNRLQSPLVTGGESSAGPSMATAMPSTDVRNQPSLGVSVAMHPQTTKAGKPRQRMKWTTEMNEFIIRTYYTITRLETNMTAYRQQLHHRFTQQYPHLTVTEQRVVDQKRTIIHNNLIPQTTLELIKQQVADQIHQQTETFNINEDHVTCQDNPATSTDYSTHTTSTTNDTAGTSPSITDNIDIELVNTLSLIFQETLTKYTGTDPTQRPRIPKINTSKVVGKTLNYVNTHLLPNYIHSISTLSDIHTLVYAGAVTVVTHHGLKIHSQTDTHKTQFYHKPAWQRRIETQINDIRQQLGRLTQYTKNNITPKLKKQLKNIFKKIKTHTKHEHHNTHITEYIDTLKQKLAAKARRLKRYKTCTLRKQQNKLFTNNEKLFYRQISTKTNTDTQHSGTPTEEELTTYWSSLWSNAVTHNADAGWIEEENRNLHNIPTMPCAEINIHDIRYAVNRTHNWKTPGVDNIHNFWYKKFTSLHQELAKHLTHIIINPQDMPKFLTQGITYMKPKNNKTTDPTQYRPITCLPTLYKLLTSCITNKIYKHVEEHDILTEQQKGCRRNHRGCKEQLLIDSVILRQAHKQHRNIHMAYIDYRKAFDSVPHSWLLHILHMYKIHPSLIAFFENTMQHWRTTLHLRVSNTSIQTNEIFIRRGIFQGDSLSPLWFCLALNPLSNMLNNTQYGYNIRHEKTTQFTLSHLMYMDDIKLYASTQKQLHQLLQITHSYTKDIQMEFGLDKCKKLHIEKGILKKEDFALGNGDVIESMEEGEFYKYLGFQQAKLTEHTQIKQRLIKEYQSRLNAILRTQLNAKHTVKAINTYVIPVLTYSFGVIHWTHTDLEQLQRKTRTTLTKHKQHHPKSATERLTLPRKEGGRGLIDIVNLHYKQIQSLREFFYKKQETSQLHKAVTLADSNNTPLNLHSHHTDMTQHIKSIDTIKQSWARKALHGRHPYDLAQDFVDKTASNSWLDRGCLFGETEGFMIAIQDQVINTKNYRKHILKDTTLTNDTCRKCHIMPETIQHITSGCKLLAQTDYLHRHNQVANIIHQELAKKHKLADIHEPYYKYIPQTVLENNTHKMYYDRAIITDKTIYHNRPDITLIDKHNKITYIIDIAIPNTHNVQNTCTEKISKYTELAQEIRHLWRMDRVLIVPVVLSCTGVIPHTLHKSLGTLQLNRNTYITLQKATILNTCHIVRKFLNTDADTLI

SEQ ID NO: 20007 - protein, 1076 aa, Centruroides sculpturatus
MFDRLQSPLVTGGKSSAGPSMATAMPSTDVRNQPSLGVSVAMHPQTTKAGKPRQRMKWTTEMNEFIIRTYYTITRLETNMTAYRQQLHHIFTQQYPHLTVTEQRVVDQKRTIIHNNLIPQTTLELIKQQVADQIHQQTETFNINEDHVTCQDNPATSTDYSTHTTSTTNDTAGTSPSITDNVDIELVNTLSLIFQETLIKYTGTDPTQRPRIPKINTSKAVGKTLDYVNTHLLPNYIHSISTLSDIHTLVYAGAVTVVTHHGLKIHSQTDTHKTQFYHKPAWQRRIETQINDIRQQLGRLTQYTKNNITPKLKKQLKNIFKKIKTHTKHEHHNTHITEYIDTLKQKLAAKARRLKRYKTCTLRKQQNKLFTNNEKLFYRQISTKTNTDTQHSGTPTEEELTTYWSSLWSNAVTHNADAGWIKEENRNLHNIPSMPCAEINIHDIRYAVNRTHNWKTPGVDNIHNFWYKKFTSLHQELAKHLTHIIINPQDMPKFLTQGITYMKPKNNNTTDPTQYRPITCLPTLYKLLTSCITNKIYKHVEEHDILTEQQKGCRRNHRGCKEQLLIDSVILRQAHKQHRNIHMAYIDYRKAFDSVPHSWLLHILHMYKIHPSLIAFFENTMQHWRTTLHLRVSNTSIQTNEIFIRRGIFQGDSLSPLWFCLALNPLSNMLNNTHYGYNIRHEKTTQFTLSHLMYMDDIKLYASTQKQLHQLLQITHSYTKDIQMEFGLDKCKKLHIEKGILKKEDFALGNGDVIESMEEGEFYKYLGFQQAKLTEHTQIKQRLIKEYQSRLNAILRTQLNAKHTVKAINTYVIPVLTYSFGVIHWTHTDLEQLQRKTRTTLTKHKQHHPKSATERLTLPRKEGGRGLIDIVNLHYKQIQSLREFFYKKQETSQLHKAVTLADSNNTPLNLHSQHTDMTQHIKSIDNIKQSWAQKALHGRHPYDLAQDFVDKTASNSWLDRGCLFGETEGFMIAIQDQVINTKNYRKHILKDTTLTNDTCRKCHIMPETIQHIISGCKLLAQTDYLHRHNQIPNTIHQELANNHKLLDIHEPYYKYIQQTVLGNNMHKMYYNSHNRR

SEQ ID NO: 20008 - protein, 1241 aa, Centruroides sculpturatus
MKLRVTTHPHSVEIIIMVVTRSKYDTGSDVARVNKVRVRGLGRGSRSKNRLQSPLVTGGESSAGPSMATAMPSTDVRNQPSLGVSVAMHPQTTKAGKPRQRMKWTTEMNEFIIRTYYTITRLETNMTAYRQQLHHRFTQQYPHLTVTEQRVVDQKRTIIHNNLIPQTTLELIKQQVADQIHQQTETFNINEDHVTCQDNPATSTDYSTHTTSTTNDTAGTSPSITDNVDIELVNTLSLIFQETLTKYTGTDPTQRPRIPKINTSKVVGKTLNYVNTHLLPNYIHSISTLSDIHTLVYAGAVTVVTHHGLKIHSQTDTHKTQFYHKPAWQRRIETQINDIRQQLGRLTQYTKNNITPKLKKQLKNIFKKIKTHTKHEHHNTHITEYIDTLKQKLAAKARRLKRYKTCTLRKQQNKLFTNNEKLFYRQISTKTNTDTQHSGTPTEEELTTYWSSLWSNAVTHNADAGWIEEENRNLHNIPTMPCAEINIHDIRYAVNRTHNWKTPGVDNIHNFWYKKFTSLHQELAKHLTHIIINPQDMPKFLTQGITYMKPKNNKTTDPTQYRPITCLPTLYKLLTSCITNKIYKHVEEHDILTEQQKGCRRNHRGCKEQLLIDSVILRQAHKQHRNIHMAYIDYRKAFDSVPHSWLLHILHMYKIHPSLIAFFENTMQHWRTTLHLRVSNTSIQTNEIFIRRGIFQGDSLSPLWFCLALNPLSNMLNNTHYGYNIRHEKTTQFTLSHLMYMDDIKLYASTQKQLHQLLQITHSYTKDIQMEFGLDKCKKLHIEKGILKKEDFALGNGDVIESMEEGEFYKYLGFQQAKLTEHTQIKQRLIKEYQSRLNAILRTQLNAKHTVKAINTYVIPVLTYSFGVIHWTHTDLEQLQRKTRTTLTKHKQHHPKSATERLTLPRKEGGRGLIDIVNLHYKQIQSLREFFYKKQETSQLHKAVTLADSNNTPLNLHSHHTDMTQHIKSIDTIKQSWARKALHGRHPYDLAQDFVDKTASNSWLDRGCLFGETEGFMIAIQDQVINTKNYRKHILKDTTLTNDTCRKCHIMPETIQHITSGCKLLAQTDYLHRHNQVANIIHQELAKKHKLADIHEPYYKYIPQTVLENNTHKMYYDRAIITDKTIYHNRPDITLIDKHNKITYIIDIAIPNTHNVQNTCTEKISKYTELAQEIRHLWRMDRVVIVPVVLSCTGVIPHTLHKSLGTLQLSRNTYITLQKATILNTCHIVRKFLNTDTDTHI

SEQ ID NO: 20009 - protein, 1241 aa, Centruroides sculpturatus
MKLRVTTHPHSVEIFIMVVTRSKYDTSLDIARDNKVRVRGLGRGSQSKNRLQSPLVTGGESSAGPSMATAMPSTDVRNQPSLGVSVAMHPQTTKAGKPRQRMKWTTEMNEFIIRTYYTITRLETNMTAYRQQLHHRFTQQYPHLTVTEQRVVDQKRTIIHNNLIPQTTLELIKQQVADQIHQQTETFNINEDHVTCQDNPATSTDYSTHTTSTTNDTAGTSPSITDNIDIELVNTLSLIFQETLTKYTGTDPTQRPRIPKINTSKVVGKTLNYVNTHLLPNYIHSISTLSDIHTLVYAGAVTVVTHHGLKIHSQTDTHKTQFYHKPAWQRRIETQINDIRQQLGRLTQYTKNNITPKLKKQLKNIFKKIKTHTKHEHHNTHITEYIDTLKQKLAAKARRLKRYKTCTLRKQQNKLFTNNEKLFYRQISTKTNTDTQHSGTPTEEELTTYWSSLWSNAVTHNADAGWIKEENRNLHNIPSMPCAEINIHDIRYAVNRTHNWKTPGVDNIHNFWYKKFTSLHQELAKHLTHIIINPQDMPKFLTRGITYMKPKNNKTTDPTQYRPITCLPTLYKLLTSCITNKIYKHVEEHDILTEQQKGCRRNHRGCKEQLLIDSVILRQAHKQHRNIHMAYIDYRKAFDSVPHSWLLHILHMYKIHPSLIAFFENTMQHWRTTLHLRVSNTSIQTNEIFIRRGIFQGDSLSPLWFCLALNPLSNMLNNTQYGYNIRHEKTTQFTLSHLMYMDDIKLYASTQKQLHQLLQITHSYTKDIQMEFGLDKCKKLHIEKGILKKEDFALGNGDVIESMEEGEFYKYLGFQQAKLTEHTQIKQRLIKEYQSRLNAILRTQLNAKHTVKAINTYVIPVLTYSFGVIHWTHTDLEQLQRKTRTTLTKHKQHHPKSATERLTLPRKEGGRGLIDIVNLHYKQIQSLREFFYKKQETSQLHKAVTLADSNNTPLNLHSHHTDMTQHIKSIDTIKQSWARKALHGRHPYDLAQDFVDKTASNSWLDRGCLFGETEGFMIAIQDQVINTKNYRKHILKDTTLTNDTCRKCHIMPETIQHITSGCKLLAQTDYLHRHNQVANIIHQELAKKHKLADIHEPYYKYIPQTVLENNTHKMYYDRAIITDKTIYHNRPDITLIDKHNKITYIIDIAIPNTHNVQNTCTEKISKYTELAQEIRHLWRMDRVLIVPVVLSCTGVIPHTLHKSLGTLQLSRNTTSHYRRPLYTCHIVRKFLNTDTYTDTLI

SEQ ID NO: 20010 - protein, 677 aa, Centruroides sculpturatus
MPCAEINVHDIRYAVNRTHNWKTPGVDNIHNFWYKKFTSLHQELAKHLTHIIINPQDMPKFLTQGITYMKPKNNNTTDPTQYRPITCLPTLYKLLTSCITNKIYKHVEEHDILTEQQKGCRRNHRGCKEQLLIDSVILRQAHKQHRNIHMAYIDYRKAFDSVPHSWLLHILHMYKIHPSLIAFFENTMQHWRTTLHLRVSNTSIQTNEIFIRRGIFQGDSLSPLWFCLALNPLSNMLNNTQYGYNIRHEKTTQFTLSHLMYMDDIKLYASTQKQLHQLLQITHSYTKDIQMEFGLDKCKKLHIEKGILKKEDFALGNGDVIESMEEGEFYKYLGFQQAKLTEHTQIKQRLIKEYQSRLNAILRTQLNAKHTVKAINTYVIPVLTYSFGVIHWTHTDLEQLQRKTRTTLTKHKQHHPKSATERLTLPRKEGGRGLIDIVNLHYKQIQSLREFFYKKQETSQLHKAVTLADSNNTPLNLHSQHTDMTQHIKSIDNIKQSWAQKALHGRHPYDLAQDFVDKTASNSWLDRGCLFGETEGFMIAIQDQVINTKNYRKHILKDTTLTNDTCRKCHIMPETIQHITSGCKLLAQTDYLHRHNQVANIIHQELAKKHKLADIHEPYYKYIPQTVLENNTHKMYYDRAIITDKTIYHNRPDITLIDKHNKITYIIDISIQNPHNI

SEQ ID NO: 20011 - protein, 764 aa, Centruroides sculpturatus
MPCAEINVHDIRYAVNRTHNWKTPGVDNIHNFWYKKFTSLHQELAKHLTHIIINPQDMPKFLTQGITYMKPKNNNTTDPTQYRPITCLPTLYKLLTSCITNKIYKHVEEHDILTEQQKGCRRNHRGCKEQLLIDSVILRQAHKQHRNIHMAYIDYRKAFDSVPHSWLLHILHMYKIHPSLIAFFENTMQHWRTTLHLRVSNTSIQTNEIFIRRGIFQGDSLSPLWFCLALNPLSNMLNNTQYGYNIRHEKTTQFTLSHLMYMDDIKLYASTQKQLHQLLQITHSYTKDIQMEFGLDKCKKLHIEKGILKKEDFALGNGDVIESMEEGEFYKYLGFQQAKLTEHTQIKQRLIKEYQSRLNAILRTQLNAKHTVKAINTYVIPVLTYSFGVIHWTHTDLEQLQRKTRTTLTKHKQHHPKSATERLTLPRKEGGRGLIDIVNLHYKQIQSLREFFYKKQETSQLHKAVTLADSNNTPLNLHSQHTDMTQHIKSIDNIKQSWAQKALHGRHPYDLAQDFVDKTASNSWLDRGCLFGETEGFMIAIQDQVINTKNYRKHILKDTTLTNDTCRKCHIMPETIQHITSGCKLLAQTDYLHRHNQVANIIHQELAKKHKLADIHEPYYKYIPQTVLENNTHKMYYDRAIITDKTIYHNRPDITLIDKHNKITYIIDIAIPNTHNVQNTCTEKISKYTELAQEIRHLWRMDRVIIVPVVLSCTGVIPHTLHKSLGTLQLNRNTYITLQKATILNTCHIVRKFLNTDTHTDTLI

SEQ ID NO: 20012 - protein, 1018 aa, Mesobuthus martensii
MQPINNTYTDLINKLTDTLQETLTKFTGTDPTQRPRIPKLHNSQQSNNTLHCMNTHILPKFINAETTLIEIHTVIYAAAVTVTTHLGLKTLPNKLGTNTRHHLKPAWQKRLEKQINEIRMDLGRLTQYTKNNTSTKLMKSIRKIFRKLKTHTHHENHNIHIKEYIDTLKQKLTAKSQRLKRYKTSLARKQDNTLFTNNEKTFYRNINTKDPRQAQNREIPTQQSLTSFWSALWAVPVIHNQRASWIAEEETRILNVPEMPYTAIATEELTNTIRCTHNWKAPGVDGIQNFWYKHFTCLHDLLAKHLTHLIHEPKDTPSFLTHGITFMKPKSTNTGNPSQYRPITCLPTLYKILTSCITNKIYTHIEENNILTEQQKGCRRSHMGCKEQLIIDTTILKQVHRQHRHLHAAYIDYKKAFDSVPHSWLIQTLQLYKINTTYITFLQNIIQHWRTTLHVTINNNHIATEPIHIRRGIFQGDSLSPLWFCLALNPLSNKLNTSNCGYNIRQNRTTHYTLSHLLYMDDIKLYASTQTQLQQLLQITHTFSKDICMEFGLDKCKTIHIEKGVLKKGDFTLENGDTIESMEEGEVYKYLGFQQARLTEQKKTKQTLSKQYTNRLNNILKTHLNGKNTVKAINTFAIPVLTYSFGVIQWTQTELESLQRKTRTALTKHQYHHPKSAIERTTLPCKEGGRGLIDIPHLHDRQIYSLREFFHKKQHTSQLHKAIVLADRNITPLNLQNNTSNPIDNIAHIQEKKTSWSRKELHGRHPHDLQKHFIDTKASNSWLVRGDLFTETEGFVIAIQDQVINTKNYRKYILKDSTLTNDTCRKCHIAPETIQHITLGCKLLAQTDYLHRHNQVANIIHQKLATKYKLINTLTPYYKYIPDTILENSTHKIYYDRTIITDKTIHHNRPDITLIDKQNKVTYIIDISIPNTHNIQDSFTQKISKYTELSQDIKRLWGMQKVLTVPIILSSTGVIPHTLHKSLGTLDLHPKTHTTLQKASLLNTCNIVRKFLSIDTDS

SEQ ID NO: 20013 - protein, 1241 aa, Centruroides sculpturatus
MKLRVTTHPHSVEIIIMVVTRSKYDTGSDVARVNKVRVRGLGRGSRSKNRLQSPLVTGGESSAGPSMATAMPSTDVRNQPSLGVSVAMHPQTTKAGKPRQRMKWTTEMNEFIIRTYYTITRLETNMTAYRQQLHHRFTQQYPHLTVTEQRVVDQKRTIIHNNLIPQTTLELIKQQVADQIHQQTETFNINEDHVTCQDNPATSTDYSTHTTSTTNDTAGTSPSITDNVDIELVNTLSLIFQETLIKYTGTDPTQRPRIPKINTSKAVGKTLDYVNTHLLPNYIHSISTLSDIHTLVYAGAVTVVTHHGLKIHSQTDTHKTQFYHKPAWQRRIETQINDIRQQLGRLTQYTKNNITPKLKKQLKNIFKKIKTHTKHEHHNTHITEYIDTLKQKLAAKARRLKRYKTCTLRKQQNKLFTNNEKLFYRQISTKTNTDTQHSGTPTEEELTTYWSSLWSNAVTHNADAGWIEEENRNLHNIPTMPCAEINVHDIRYAVNRTHNWKTPGVDNIHNFWYKKFTSLHQELAKHLTHIIINPQDMPKFLTQGITYMKPKNNKTTDPTQYRPITCLPTLYKLLTSCITNKIYKHVEEHDILTEQQKGCRRNHRGCKEQLLIDSVILRQAHKQHRNIHMAYIDYRKAFDSVPHSWLLHILHMYKIHPSLIAFFENTMQHWRTTLHLRVSNTSIQTNEIFIRRGIFQGDSLSPLWFCLALNPLSNMLNNTQYGYNIRHEKTTQFTLSHLMYMDDIKLYASTQKQLHQLLQITHSYTKDIQMEFGLDKCKKLHIEKGILKKEDFALGNGDVIESMEEGEFYKYLGFQQAKLTEHTQIKQRLIKEYQSRLNAILRTQLNAKHTVKAINTYVIPVLTYSFGVIHWTHTDLEQLQRKTRTTLTKHKQHHPKSATERLTLPRKEGGRGLIDIVNLHYKQIQSLREFFYKKQETSQLHKAVTLADSNNTPLNLHSQHTDMTQHIKSIDNIKQSWAQKALHGRHPYDLAQDFVDKTASNSWLDRGCLFGETEGFMIAIQDQVINTKNYRKHILKDTTLTNDTCRKCHIMPETIQHITSGCKLLAQTDYLHRHNQVANIIHQELAKKHKLADIHEPYYKYIPQTVLENNTHKMYYDRAIITDKTIYHNRPDITLIDKHNKITYIIDIAIPNTHNVQNTCTEKISKYTELAQEIRHLWRMDRVLIVPVVLSCTGVIPHTLHKSLGTLQLNRNTYITLQKATILNTCHIVRKFLNTDTDTHI

SEQ ID NO: 20014 - protein, 1188 aa, Centruroides sculpturatus
MATAMPSTDVRNQPSLGVSVAMHPQTTKAGKPRQRMKWTTEMNEFIIRTYYTITRLETNMTAYRQQLHHRFTQQYPHLTVTEQRVVDQKRTIIHNNLIPQTTLELIKQQVADQIHQQTETFNINEDHVTCQDNPATSTDYSTHTTSTTNDTAGTSPSITDNIDIELVNTLSLIFQETLTKYTGTDPTQRPRIPKINTSKVVGKTLNYVNTHLLPNYIHSISTLSDIHTLVYAGAVTVVTHHGLKIHSQTDTHKTQFYHKPAWQRRIETQINDIRQQLGRLTQYTKNNITPKLKKQLKNIFKKIKTHTKHEHHNTHITEYIDTLKQKLAAKARRLKRYKTCTLRKQQNKLFTNNEKLFYRQISTKTNTDTQHSGTPTEEELTTYWSSLWSNAVTHNADAGWIEEENRNLHNIPTMPCAEINIHDIRYAVNRTHNWKTPGVDNIHNFWYKKFTSLHQELAKHLTHIIINPQDMPKFLTQGITYMKPKNNKTTDPTQYRPITCLPTLYKLLTSCITNKIYKHVEEHDILTEQQKGCRRNHRGCKEQLLIDSVILRQAHKQHRNIHMAYIDYRKAFDSVPHSWLLHILHMYKIHPSLIAFFENTMQHWRTTLHLRVSNTSIQTNEIFIRRGIFQGDSLSPLWFCLALNPLSNMLNNTQYGYNIRHEKTTQFTLSHLMYMDDIKLYASTQKQLHQLLQITHSYTKDIQMEFGLDKCKKLHIEKGILKKEDFALGNGDVIESMEEGEFYKYLGFQQAKLTEHTQIKQRLIKEYQSRLNAILRTQLNAKHTVKAINTYVIPVLTYSFGVIHWTHTDLEQLQRKTRTTLTKHKQHHPKSATERLTLPRKEGGRGLIDIVNLHYKQIQSLREFFYKKQETSQLHKAVTLADSNNTPLNLHSHHTDMTQHIKSIDTIKQSWARKALHGRHPYDLAQDFVDKTASNSWLDRGCLFGETEGFMIAIQDQVINTKNYRKHILKDTTLTNDTCRKCHIMPETIQHITSGCKLLAQTDYLHRHNQVANIIHQELAKKHKLADIHEPYYKYIPQTVLENNTHKMYYDRAIITDKTIYHNRPDITLIDKHNKITYIIDIAIPNTHNVQNTCTEKISKYTELAQEIRHLWRMDRVLIVPVVLSCTGVIPHTLHKSLGTLQLSRNTYITLQKATILNTCHIVRKFLNTDTHTLTHLFNFSFVFVAMP

SEQ ID NO: 20015 - protein, 1225 aa, Centruroides sculpturatus
MIVTRSKCDTSSDVAWVNKVCIRGLGRGSRSKNRSQSSLVTGGESSAGPSMATAMPSTDVRNQPSLGVSVAMHPQTTKAGKPRQRMKWTTEMNEFIIRTYYTITRLETNMTAYRQQLHHRFTQQYPHLTVTEQRVVDQKRTIIHNNLIPQTTLELIKQQVADQIHQQTETFNINEDHVTCQDNPATSTDYSTHTTSTTNDTAGTSPSITDNVDIELVNTLSLIFQETLTKYTGTDPTQRPRIPKINTSKVVGKTLNYVNTHLLPNYIHSISTLSDIHTLVYAGAVTVVTHHGLKIHSQTDTHKTQFYHKPAWQRRIETQINDIRQQLGRLTQYTKNNITPKLKKQLKNIFKKIKTHTKHEHHNTHITEYIDTLKQKLAAKARRLKRYKTCTLRKQQNKLFTNNEKLFYRQISTKTNTDTQHSGTPTEEELTTYWSSLWSNAVTHNADAGWIEEENRNLHNIPTMPCAEINIHDIRYAVNRTHNWKTPGVDNIHNFWYKKFTSLHQELAKHLTHIIINPQDMPKFLTQGITYMKPKNNKTTDPTQYRPITCLPTLYKLLTSCITNKIYKHVEEHDILTEQQKGCRRNHRGCKEQLLIDSVILRQAHKQHRNIHMAYIDYRKAFDSVPHSWLLHILHMYKIHPSLIAFFENTMQHWRTTLHLRVSNTSIQTNEIFIRRGIFQGDSLSPLWFCLALNPLSNMLNNTHYGYNIRHEKTTQFTLSHLMYMDDIKLYASTQKQLHQLLQITHSYTKDIQMEFGLDKCKKLHIEKGILKKEDFALGNGDVIESMEEGEFYKYLGFQQAKLTEHTQIKQRLIKEYQSRLNAILRTQLNAKHTVKAINTYVIPVLTYSFGVIHWTHTDLEQLQRKTRTTLTKHKQHHPKSATERLTLPRKEGGRGLIDIVNLHYKQIQSLREFFYKKQETSQLHKAVTLADSNNTPLNLHSQHTDMTQHIKSIDNIKQSWAQKALHGRHPYDLAQDFVDKTASNSWLDRGCLFGETEGFMIAIQDQVINTKNYRKHILKDTTLTNDTCRKCHIMPETIQHITSGCKLLAQTDYLHRHNQVANIIHQELAKKHKLADIHEPYYKYIPQTVLENNTHKMYYDRAIITDKTIYHNRPDITLIDKHNKITYIIDIAIPNTHNVQNTCTEKISKYTELAQEIRHLWRMDRVVIVPVVLSCTGVIPHTLHKSLGTLELSRNTYITLQKATILNTCHIVRKFLNTDTDTLI

SEQ ID NO: 20016 - protein, 1215 aa, Mesobuthus martensii
MQWHKVENESIPAQTSPGLKVRICELGRGSHSESLLQSPLATGGESSTNPSLATAIHIPRVGNGSPHQSPTSQRVSQVTQPETTKAGKPRQRMKWTTDMNEFIMRTYYTITKLETDSTGYRRELYDKFTSRYPNITVTEQRIADQRRTIIHRNLIPHSTLENIKTQVAEQISQHKTDSHTQIEHDVEQTPEITYINDNMQPINNTDTDLINKLTDTLQETLTKFTGTDPTQRPRIPKLHNSQQLNNTLHCMNTHILPKFINAETTLIEIHTLIYAAAVTVTTHLGLKTLPNKLGTNTRHHLKPAWQKRLEKQINEIRMDLGRLTQYTKNNTSTKLMKSIRKIFRKLKTHTHHENHNIHIKEYIDTLKQKLTAKSQRLKRYKTSLARKQDNTLFTNNEKTFYRNINTKDPRQAQNREIPTQQSLTSFWSALWAVPVIHNQRASWIAEEETRILNVPEMPYTAIATEELTNTIRRTHNWKAPGVDGIQNFWYKHFTCLHDLLAKHLTHLIHEPKDTPPFLTQGITFMKPKSTNTGNPSQYRPITCLPTLYKILTSCITNKIYTHIEENNILTEQQKGCRRSHMGCKEQLIIDTTILKQVHRQHRHLHTAYIDYKKAFDSVPHSWLIQTLQLYKINTTYITFLQNIIQHWRTTLHVTINNNHVATEPIHIRRGIFQGDSLSPLWFCLALNPLSNKLNTSNCGYNIRQNRTTHYTLSHLLYMDDIKLYASTQTQLQQLLQITHTFSKDICMEFGLDKCKTIHIEKGVLKKGDFTLENGDTIESMEEGEVYKYLGFQQARLTEQKKTKQTLSKQYTNRLNNILKKHLNGKNTVKAINTFAIPVLTYSFGVIQWTQTELESLQRKTRTALTKHQYHHPKSAIERTTLPRKEGGRGLIDIPHLHDRQIYSLREFFHKKQHTSQLHKAIVLADRNITPLNLQNNTSNPIDNIAHIQEKKTSWSRKELHGRHPHDLQKHFIDAKASNSWLVRGDLFTETEGFVIAIQDQVINTKNYRKYILKDSTLTNDTCRKCHIAPETIQHITSGCKLLAQTDYLHRHNQVANIIHQKLATKYKLINTLTPYYKYIPDTILENSTHKIYYDRTIITDKTIHHNRPDITLIDKQNKVTYIIDISIPNTHNIQDAFTQKISKYTELSQEIKRLWGMQKVLTVPIILSSTGGLPHTLHKSLGTLDLHPKTYITLQKASLLNTCNIVRKFLSNTDS

SEQ ID NO: 20017 - protein, 1241 aa, Centruroides sculpturatus
MKLRVTTHPHSVEIIIMVVTRSKCDTGSDVARVNKVRVRGLGRGSRSKNRLQSPLVTGGESSAGPSMATAMPSTDVRNQPSLGVSVAMHPQTTKAGKPRQRMKWTTEMNEFIIRTYYTITRLETNMTAYRQQLHHRFTQQYPHLTVTEQRVVDQKRTIIHNNLIPQTTLELIKQQVADQIHQQTETFNINEDHVTCQDNPATSTDYSTHTTSTTNDTAGTSPSITDNIDIELVNTLSLIFQETLIKYTGTDPTQRPRIPKINTSKAVGKTLDYVNTHLLPNYIHSISTLTDIHTLVYAGAVTVVTHHGLKIHSQTDTHKTQFYHKPAWQRRIETQINDIRQQLGRLTQYTKNNITPKLKKQLKNIFKKIKTHTKHEHHNTHITEYIDTLKQKLAAKARRLKRYKTCTLRKQQNKLFTNNEKLFYRQISTKTNTDTQHSGTPTEEELTTYWSSLWSNAVTHNADAGWIEEENRNLHNIPTMPCAEINVHDIRYAVNRTHNWKTPGVDNIHNFWYKKFTSLHQELAKHLTHIIINPQDMPKFLTQGITYMKPKNNKTTDPTQYRPITCLPTLYKLLTSCITNKIYKHVEEHDILTEQQKGCRRNHRGCKEQLLIDSVILRQAHKQHRNIHMAYIDYRKAFDSVPHSWLLHILHMYKIHPSLIAFFENTMQHWRTTLHLRVSNTSIQTNEIFIRRGIFQGDSLSPLWFCLALNPLSNMLNNTQYGYNIRHEKTTQFTLSHLMYMDDIKLYASTQKQLHQLLQITHSYTKDIQMEFGLDKCKKLHIEKGILKKEDFALGNGDVIESMEEGEFYKYLGFQQAKLTEHTQIKQRLIKEYQSRLNAILRTQLNAKHTVKAINTYVIPVLTYSFGVIHWTHTDLEQLQRKTRTTLTKHKQHHPKSATERLTLPRKEGGRGLIDIVNLHYKQIQSLREFFYKKQETSQLHKAVTLADSNNTPLNLHSQHTDMTQHIKSIDNIKQSWAQKALHGRHPYDLAQDFVDKTASNSWLDRGCLFGETEGFMIAIQDQVINTKNYRKHILKDTTLTNDTCRKCHIMPETIQHITSGCKLLAQTDYLHRHNQVANIIHQELAKKHKLADIHEPYYKYIPQTVLENNTHKMYYDRAIITDKTIYHNRPDITLIDKHNKITYIIDIAIPNTHNVQNTCTEKISKYTELAQEIRHLWRMDRVLIVPVVLSCTGVIPHTLHKSLGTLQLNRNTYITLQKATILNTCHIVRKFLNTGTDTHI

SEQ ID NO: 20018 - protein, 758 aa, Centruroides sculpturatus
MPCAEINIHDIRYAVNRTHNWKTPGVDNIHNFWYKKFTSLHQELAKHLTHIIINPQDMPKFLTQGITYMKPKNNKTTDPTQYRPITCLPTLYKLLTSCITNKIYKHVEEHDILTEQQKGCRRNHRGCKEQLLIDSVILRQAHKQHRNIHMAYIDYRKAFDSVPHSWLLHILHMYKIHPSLIAFFENTMQHWRTTLHLRVSNTSIQTNEIFIRRGIFQGDSLSPLWFCLALNPLSNMLNNTQYGYNIRHEKTTQFTLSHLMYMDDIKLYASTQKQLHQLLQITHSYTKDIQMEFGLDKCKKLHIEKGILKKEDFALGNGDVIESMEEGEFYKYLGFQQAKLTEHTQIKQRLIKEYQSRLNAILRTQLNAKHTVKAINTYVIPVLTYSFGVIHWTHTDLEQLQRKTRTTLTKHKQHHPKSATERLTLPRKEGGRGLIDIVNLHYKQIQSLREFFYKKQETSQLHKAVTLADSNNTPLNLHSHHTDMTQHIKSIDTIKQSWARKALHGRHPYDLAQDFVDKTASNSWLDRGCLFGETEGFMIAIQDQVINTKNYRKHILKDTTLTNDTCRKCHIMPETIQHITSGCKLLAQTDYLHRHNQVANIIHQELAKKHKLADIHEPYYKYIPQTVLENNTHKMYYDRAIITDKKIYHNRPDITLIDKHNKITYIIDIAIPNTYNVQNTCTEKISKYTELAQEIRHLWRIDRVLIVPVVLSCTGVIPHTLHITIEWKLQLNGNTYITLQKATILNTCHIVRKFLNRH

SEQ ID NO: 20019 - protein, 1134 aa, Centruroides sculpturatus
MDEFIIRTYYTITRLETNMTAYRQQLHHIFTQQYPHLTVTEQRVVDQKRTIIHNNLIPQTTLELIKQQVADQIHQQTETFNINEDHVTCQDNPATSTDYSTHTTSTTNDTAGFFSSITDNIDIELVNTLSLIFQETLTKYTGTDPTQRPRIPKINTSKAVGKTLDYVNTHLLPNYIHSISTLSDIHTLVYAGAVTVVTHHGLKIHSQTDTHKTQFYHKPAWQRRIETQINDIRQQLGRLTQYTKNNITPKLKKQLKNIFKKIKTHTKHEHHNTHITEYIDTLKQKLAAKARRLKRYKTCTLRKQQNKLFTNNEKLFYRQISTKTNTDTQHSGTPTEEELTTYWSSLWSNAVTHNADAGWIEEENRNLHNIPTMPCAEINVHDIRYAVNRTHNWKTPGVDNIHNFWYKKFTSLHQELAKHLTHIIINPQDMPKFLTQGITYMKPKNNNTTDPTQYRPITCLPTLYKLLTSCITNKIYKHVEEHDILTEQQKGCRRNHRGCKEQLLIDSVILRQAHKQHRNIHMAYIDYRKAFDSVPHSWLLHILHMYKIHPSLIAFFENTMQHWRTTLHLRVSNTSIQTNEIFIRRGIFQGDSLSPLWFCLALNPLSNMLNNTHYGYNIRHEKTTQFTLSHLMYMDDIKLYASTQKQLHQLLQITHSYTKDIQMEFGLDKCKKLHIEKGILKKEDFALGNGDVIESMEEGEFYKYLGFQQAKLTEHTQIKQRLIKEYQSRLNAILRTQLNAKHTVKAINTYVIPVLTYSFGVIHWTHTDLEQLQRKTRTTLTKHKQHHPKSATERLTLPRKEGGRGLIDIVNLHYKQIQSLREFFYKKQETSQLHKAVTLADSNNTPLNLHSQHTDMTQHIKSIDNIKQSWAQKALHGRHPYDLAQDFVDKTASNSWLDRGCLFGETEGFMIAIQDQVINTKNYRKHILKDTTLTNDTCRKCHIMPETIQHITSGCKLLAQTDYLHRHNQVANIIHQELAKKHKLADIHEPYYKYIPQTVLENNTHKMYYDRAIITDKTIYHNRPDITLIDKHNKITYIIDIAIPNTHNVQNTCTEKISKYTELAQEIRHLWRMDRVLIVPVILSCTGVIPHTLHKSLGTLQLSINTYITTQKATILNTCHIVRKFLNTDTDTLI

SEQ ID NO: 20020 - protein, 1241 aa, Centruroides sculpturatus
MKLRVTTHPHSVEIIIMVVTRSKYDTGSDVARVNKVRVRGLGRGSRSKNRLQSPLVTGGESSAGPSMATAMPSTDVRNQPSLGVSVAMHPQTTKAGKPRQRMKWTTEMNEFIIRTYYTITRLETNMTAYRQQLHHRFTQQYPHLTVTEQRVVDQKRTIIHNNLIPQTTLELIKQQVADQIHQQTETFNINEDHVTCQDNPATSTDYSTHTTSTTNDTAGTSPSITDNIDIELVNTLSLIFQETLTKYTGTDPTQRPRIPKINTSKVVGKTLNYVNTHLLPNYIHSISTLSDIHTLVYAGAVTVVTHHGLKIHSQTDTHKTQFYHKPAWQRRIETQINDIRQQLGRLTQYTKNNITPKLKKQLKNIFKKIKTHTKHEHHNTHITEYIDTLKQKLAAKARRLKRYKTCTLRKQQNKLFTNNEKLFYRQISTKTNTDTQHSGTPTEEELTTYWSSLWSNAVTHNADAGWIEEENRNLHNIPTMPCAEINIHDIRYAVNRTHNWKTPGVDNIHNFWYKKFTSLHQELAKHLTHIIINPQDMPKFLTQGITYMKPKNNKTTDPTQYRPITCLPTLYKLLTSCITNKIYKHVEEHDILTEQQKGCRRNHRGCKEQLLIDSVILRQAHKQHRNIHMAYIDYRKAFDSVPHSWLLHILHMYKIHPSLIAFFENTMQHWRTTLHLRVSNTSIQTNEIFIRRGIFQGDSLSPLWFCLALNPLSNMLNNTQYGYNIRHEKTTQFTLSHLMYMDDIKLYASTQKQLHQLLQITHSYTKDIQMEFGLDKCKKLHIEKGILKKEDFALGNGDVIESMEEGEFYKYLGFQQAKLTEHTQIKQRLIKEYQSRLNAILRTQLNAKHTVKAINTYVIPVLTYSFGVIHWTHTDLEQLQRKTRTTLTKHKQHHPKSATERLTLPRKEGGRGLIDIVNLHYKQIQSLREFFYKKQETSQLHKAVTLADSNNTPLNLHSHHTDMTQHIKSIDTIKQSWARKALHGRHPYDLAQDFVDKTASNSWLDRGCLFGETEGFMIAIQDQVINTKNYRKHILKDTTLTNDTCRKCHIMPETIQHITSGCKLLAQTDYLHRHNQVANIIHQELAKKHKLADIHEPYYKYIPQTVLENNTHKMYYDRAIITDKTIYHNRPDITLIDKHNKITYIIDIAIPNTHNVQNTCTEKISKYTELAQEIRHLWRMDRVLIVPVVLSCTGVIPHTLHKSLGTLELSRNTYITLQKATILNTCHIVRKFLNTDTDTLI

SEQ ID NO: 20021 - protein, 1241 aa, Centruroides sculpturatus
MKLRVTTHPHYVEIIIMVVTRSKCDTGSDVARVNKVRVRGLGRGSRSKNRLQSPLVTGGESSAGPSMATAMPSTDVRNQPSLGVSVAMHPQTTKAGKPRQRMKWTTEMNEFIIRTYYTITRLETNMTAYRQQLHHRFTQQYPHLTVTEQRVVDQKRTIIHNNLIPQTTLELIKQQVADQIHQQTETFNINEDHVTCQDNPATSTDYSTHTTSTTNDTAGTSPSITDNIDIELVNTLSLIFQETLIKYTGTDPTQRPRIPKINTSKAVGKTLDYVNTHLLPNYIHSISTLTDIHTLVYAGAVTVVTHHGLKIHSQTDTHKTQFYHKPAWQRRIETQINDIRQQLGRLTQYTKNNITPKLKKQLKNIFKKIKTHTKHEHHNTHITEYIDTLKQKLAAKARRLKRYKTCTLRKQQNKLFTNNEKLFYRQISTKTNTDTQHSGTPTEEELTTYWSSLWSNAVTHNADAGWIEEENRNLHNIPTMPCAEINVHDIRYAVNRTHNWKTPGVDNIHNFWYKKFTSLHQELAKHLTHIIINPQDMPKFLTQGITYMKPKNNNTTDPTQYRPITCLPTLYKLLTSCITNKIYKHVEEHDILTEQQKGCRRNHRGCKEQLLIDSVILRQAHKQHRNIHMAYIDYRKAFDSVPHSWLLHILHMYKIHPSLIAFFENTMQHWRTTLHLRVSNTSIQTNEIFIRRGIFQGDSLSPLWFCLALNPLSNMLNNTQYGYNIRHEKTTQFTLSHLMYMDDIKLYASTQKQLHQLLQITHSYTKDIQMEFGLDKCKKLHIEKGILKKEDFALGNGDVIESMEEGEFYKYLGFQQAKLTEHTQIKQRLIKEYQSRLNAILRTQLNAKHTVKAINTYVIPVLTYSFGVIHWTHTDLEQLQRKTRTTLTKHKQHHPKSATERLTLPRKEGGRGLIDIVNLHYKQIQSLREFFYKKQETSQLHKAVTLADSNNTPLNLHSQHTDMTQHIKSIDNIKQSWAQKALHGRHPYDLAQDFVDKTASNSWLDRGCLFGETEGFMIAIQDQVINTKNYRKHILKDTTLTNDTCRKCHIMPETIQHITSGCKLLAQTDYLHRHNQVANIIHQELAKKHKLADIHEPYYKYIPQTVLENNTHKMYYDRAIITDKTIYHNRPDITLIDKHNKITYIIDIAIPNTHNVQNTCTEKISKYTELAQEIRHLWRMDRVLIVPVVLSCTGVIPHTLHKSLGTLQLNRNTYITLQTATILNTCHIVRKFLNTDTDTLI

SEQ ID NO: 20022 - protein, 1233 aa, Mesobuthus martensii
MLNQMLAGVPTLVVFCLYAMAQSRKRKHTGSDVSRVNKVRVCELGRGSHSESLLQSPLATGGESSTNPSLATAIHIPRVGNGSPHQSPTSQRVSQVTQPETTKAGKPRQRMKWTTDMNEFIMRTYYTITKLETDSTGYRRELYDKFTSRYPNITVTEQRIADQRRTIIHRNLIPHSTLENIKTQVAEQISQHKTDSHTQIEHDVEQTPEITYINDNMQPINNTDTDLINKLTDTLQETLTKFTGTDPTQRPRIPKLHNSQQLNNTLHCMNTHILPKFINAETTLIEIHTLIYAAAVTVTTHLGLKTLPNKLGTNTRHHLKPAWQKRLEKQINEIRMDLGRLTQYTKNNTSTKLMKSIRKIFRKLKTHTHHENHNIHIKEYIDTLKQKLTAKSQRLKRYKTSLARKQDNTLFTNNEKTFYRNINTKDPRQAQNREIPTQQSLTSFWSALWAVPVIHNQRASWIAEEETRILNVPEMPYTAIATEELTNTIRRTHNWKAPGVDGIQNFWYKHFTCLHDLLAKHLTHLIHEPKDTPPFLTQGITFMKPKSTNTGNPSQYRPITCLPTLYKILTSCITNKIYTHIEENNILTEQQKGCRRSHMGCKEQLIIDTTILKQVHRQHRHLHAAYIDYKKAFDSVPHSWLIQTLQLYKINTTYITFLQNIIQHWRTTLHVTINNNHVATEPIHIRRGIFQGDSLSPLWFCLALNPLSNKLNTSNCGYNIRQNRTTHYTLSHLLYMDDIKLYASTQTQLQQLLQITHTFSKDICMEFGLDKCKTIHIEKGVLKKGDFTLENGDTIESMEEGEVYKYLGFQQARLTEQKKTKQTLSKQYTNRLNNILKTHLNGKNTVKAINTFAIPVLTYSFGVIQWTQTELESLQRKTRTALTKHQYHHPKSAIERTTLPRKEGGRGLIDIPHLHDRQIYSLREFFHKKQHTSQLHKAIVLADRNITPLNLQNNTSNPIDNIAHIQEKKTSWSRKELHGRHPHDLQKHFIDTKASNSWLVRGDLFTETEGFVIAIQDQVINTKNYRKYILKDSTLTNDTCRKCHIAPETIQHITSGCKLLAQTDYLHRHNQVANIIHQKLATKYKLINTLTPYYKYIPDTILENSTHKIYYDRTIITDKTIHHNRPDITLIDKQNKVTYIIDISIPNTHNIQDAFTQKISKYTELSQEIKRLWGMQKVLTVPIILSSTGVIPHTLHKSLGTLDLHPKTYITLQKASLLNTCNIVRKFLSNTES

SEQ ID NO: 20023 - protein, 1225 aa, Centruroides sculpturatus
MMVVTRSKYDTGSDVARVNKVRVHGLGRGSRSKNRLQSPLVTGGESSAGPSMATAMPSTDVRNQPSLGVSVAMHPQTTKAGKPRQRMKWTTEMNEFIIRTYYTITRLETNMTAYRQQLHHIFTQQYPHLTVTEQRVVDQKRTIIHNNLIPQTTLELIKQQVADQIHQQTETFNINEDHVTCQDNPATSTDYSTHTTSTTNDTAGTSPSITDNIDIELVNTLSLIFQETLIKYTGTDPTQRPRIPKINTSKVVGKTLNYVNTHLLPNYIHSISTLSDIHTLVYAGAVTVVTHHGLKIHSQTDTHKTQFYHKPAWQRRIETQINDIRQQLGRLTQYTKNNITPKLKKQLKNIFKKIKTHTKHEHHNTHITEYIDTLKQKSAAKERRLKRYKTCTLQKQQNKLFTNNEELFYRQIGNKTNTDTQHSGTPTEEVTTYWSSLWSSAVTHNADAGWIEEENRNLHNILNMPCAEINVHDIRYAVNRTHNWKTPGVDNIHNFWYKKFTSLHQELAKHLTHTIINPQDMPKFLTQGITYMKPKNNKTTDPTQYRPITCLPTLYKLLTSCITNKIYKHVEEHDILTEQQKGCRRNHRGCKEQLLIDSVILRQAHKQHRNIHMAYIDYRKAFDSVPHSWLLHILHMYKIHPSLIAFFENTMQHWRTTLHLRVSNTSIQTNEIFIRRGIFQGDSLSPLWFCLALNPLSNMLNNTQYGYNIRHEKTTQFTLSHLMYMDDIKLYASTQKQLHQLLQITHSYTKDIQMEFGLDKCKKLHIEKGILKKEDFALGNGDVIESMEEGEFYKYLGFQQAKLTEHTQIKQRLIKEYQSRLNAILRTQLNAKHTVKAINTYVIPVLTYSFGVIHWTHTDLEQLQRKTRTTLTKHKQHHPKSATERLTLPRKEGGRGLIDIVNLHYKQIQSLREFFYKKQETSQLHKAVTLADSNNTPLNLHSHHTDMTQHIKSIDTIKQSWARKALHGRHPYDLAQDFVDKTASNSWLDRGCLFGETEGFMIAIQDQVINTKNYRKHILKDTTLTNDTCRKCHIMPETIQHITSGCKLLAQTDYLHRHNQVANIIHQELAKKHKLADIHEPYYKYIPQTVLENNTHKMYYDRAIITDKTIYHNRPDITLIDKHNKITYIIDIAIPNTHNVQNTCTEKISKYTELAQEIRHLWRMGKMLIVPVVLSFTGVIPHTLHKSLGTLQLNRNTYIKVQKATILNTCHILRKFLNTDSDTHI

SEQ ID NO: 20024 - protein, 1178 aa, Mesobuthus martensii
MLNQMLAGVPTLVVFCLYAMAQSRKRKHIGSDVSRVNKVRVCELGRGSHSESLLQSPLATGGESSTNPSLATAIHIPRVGNGSPHQSPTSQRVSQVTQPETTKAGKPRQRMKWTTDMNEFIMRTYYTITKLETDSTGYRRELYDKFTSRYPNITVTEQRIADQRRTIIHRNLIPHSTLENIKTQVAEQISQHKTDSHTQIEHDVEQTPEITYINDNMQPINNTDTDLINKLTDTLQETLTKFTGTDPTQRPRIPKIHNSQQLNNTLHCMNTHILPKFINAETTLIEIHTLIYAAAVTVTTHLGLKTLPNKLGTNTRHHLKPAWQKRLEKQINEIRMDLGRLTQYTKNNTSTKLMKSIRKIFRKLKTHTHHENHNIHIKEYIDTLKQKLTAKSQRLKRYKTSLARKQDNTLFTNNEKTFYRNINTKDPRQAQNREIPTQQSLTSFWSALWAVPVIHNQRASWIAEEETRILNVPEMPYTAIATEELTNTIRHTHNWKAPGVDGIQNFWYKHFTCLHDLLAKHLTHLIHEPKDTPPFLTQGITFMKPKSTNTGNPSQYRPITCLPTLYKILTSCITNKIYTHIEENNILTEQQKGCRRSHMGCKEQLIIDTTILKQVHRQHRHLHTAYIDYKKAFDSVPHSWLIQTLQLYKINTTYITFLQNIIQHWRTTLHVTINNNHVATEPIHIRRGIFQGDSLSPLWFCLALNPLSNKLNTSNCSYNIRQNRITHYILSHLLYMDDIKLYASTQTQLQQLLQITHTFSKDICMEFGLDKCKTIHIEKGVLKKGDFTLENGDTIESMEEGEVYKYLGFQQARLTEQKKTKQTLSKQYTNRLNNILKTHLNGKNTVKAINTFAIPVLTYSFAVIQWTQTELESLQRKTRTALTKYQYHHPKSAIERTTLPRKEGGRGLIDIPHLHDRQIYSLREFFHKKQHTSQLHKAIVLADRNITPLNLQNNTSNPIDNIAHIQEKKTSWSRKELHGRHPHDLQKHFIDTKASNSWLVRGDLFTETEGFVIAIQDQVINTKNYRKYILKDSTLTNDTCRKCHIAPETIQHITSGCKLLAQTDYLHRHNQVANIIHQKLATKYKLINTLTPYYKYIPDTILENSTHKIYYDRTIITDKTIHHNRPDITLIDKQNKVTYIIDISIPNTHNIQDAFTQKISKYTELSQEIKRLWGMQNF

SEQ ID NO: 20025 - protein, 1154 aa, Centruroides sculpturatus
MHPQTTKAGKPRQRMKWTTEMNEFIIRTYYTITRLETNMTAYRQQLHHRFTQQYPHLTVTEQRVVDQKRTIIHNNLIPQTTLELIKQQVADQIHQQTETFNINEDHVTCQDNPATSTDYSTHTTSTTNDTAGTSPSITDNIDIELVNTLSLIFQETLTKYTGTDPTQRPRIPKINTSKVVGKTLNYVNTHLLPNYIHSISTLSDIHTLVYAGAVTVVTHHGLKIHSQTDTHKTQFYHKPAWQRRIETQINDIRQQLGRLTQYTKNNITPKLKKQLKNIFKKIKTHTKHEHHNTHITEYIDTLKQKLAAKARRLKRYKTCTLRKQQNKLFTNNEKLFYRQISTKTNTDTQHSGTPTEEELTTYWSSLWSNAVTHNADAGWIEEENRNLHNIPTMPCAEINIHDIRYAVNRTHNWKTPGVDNIHNFWYKKFTSLHQELAKHLTHIIINPQDMPKFLTRGITYMKPKNNKTTDPTQYRPITCLPTLYKLLTSCITNKIYKHVEEHDILTEQQKGCRRNHRGCKEQLLIDSVILRQAHKQHRNIHMAYIDYRKAFDSVPHSWLLHILHMYKIHPSLIAFFENTMQHWRTTLHLRVSNTSIQTNEIFIRRGIFQGDSLSPLWFCLALNPLSNMLNNTQYGYNIRHEKTTQFTLSHLMYMDDIKLYASTQKQLHQLLQITHSYTKDIQMEFGLDKCKKLHIEKGILKKEDFALGNGDVIESMEEGEFYKYLGFQQAKLTEHTQIKQRLIKEYQSRLNAILRTQLNAKHTVKAINTYVIPVLTYSFGVIHWTHTDLEQLQRKTRTTLTKHKQHHPKSATERLTLPRKEGGRGLIDIVNLHYKQIQSLREFFYKKQETSQLHKAVTLADSNNTPLNLHSHHTDMTQHIKSIDTIKQSWARKALHGRHPYDLAQDFVDKTASNSWLDRGCLFGETEGFMIAIQDQVINTKNYRKHILKDTTLTNDTCRKCHIMPETIQHITSGCKLLAQTDYLHRHNQVANIIHQELAKKHKLADIHEPYYKYIPQTVLENNTHKMYYDRAIITDKTIYHNRPDITLIDKHNKITYIIDIAIPNTHNVQNTCTEKISKYTELAQEIRHLWRMDRVVIVPVVLSCTGVIPHTLHKSLGTLELSRNTYITLQKATILNTCHIVRKFLNTDTDTLI

SEQ ID NO: 20026 - protein, 1241 aa, Centruroides sculpturatus
MKLRVTTHPHYVEIIIMVVTRSKCDTGSDVARVNKVRVRGLGRGSRSKNRLQSPLVTGGESSAGPSMATAMPSTDVRNQPSLGVSVAMHPQTTKAGKPRQRMKWTTEMNEFIIRTYYTITRLETNMTAYRQQLHHRFTQQYPHLTVTEQRVVDQKRTIIHNNLIPQTTLELIKQQVADQIHQQTETFNINEDHVTCQDNPATSTDYSTHTTSTTNDTAGTSPSITDNIDIELVNTLSLIFQETLTKYTGTDPTQRPRIPKINTSKVVGKTLNYVNTHLLPNYIHSISTLSDIHTLVYAGAVTVVTHHGLKIHSQTDTHKTQFYHKPAWQRRIETQINDIRQQLGRLTQYTKNNITPKLKKQLKNIFKKIKTHTKHEHHNTHITEYIDTLKQKLAAKARRLKRYKTCTLRKQQNKLFTNNEKLFYRQISTKTNTDTQHSGTPTEEELTTYWSSLWSNAVTHNADAGWIKEENRNLHNIPSMPCAEINIHDIRYAVNRTHNWKTPGVDNIHNFWYKKFTSLHQELAKHLTHIIINPQDMPKFLTRGITYMKPKNNKTTDPTQYRPITCLPTLYKLLTSCITNKIYKHVEEHDILTEQQKGCRRNHRGCKEQLLIDSVILRQAHKQHRNIHMAYIDYRKAFDSVPHSWLLHILHMYKIHPSLIAFFENTMQHWRTTLHLRVSNTSIQTNEIFIRRGIFQGDSLSPLWFCLALNPLSNMLNNTQYGYNIRHEKTTQFTLSHLMYMDDIKLYASTQKQLHQLLQITHSYTKDIQMEFGLDKCKKLHIEKGILKKEDFALGNGDVIESMEEGEFYKYLGFQQAKLTEHTQIKQRLIKEYQSRLNAILRTQLNAKHTVKAINTYVIPVLTYSFGVIHWTHTDLEQLQRKTRTTLTKHKQHHPKSATERLTLPRKEGGRGLIDIVNLHYKQIQSLREFFYKKQETSQLHKAVTLADSNNTPLNLHSHHTDMTQHIKSIDTIKQSWARKALHGRHPYDLAQDFVDKTASNSWLDRGCLFGETEGFMIAIQDQVINTKNYRKHILKDTTLTNDTCRKCHIMPETIQHITSGCKLLAQTDYLHRHNQVANIIHQELAKKHKLADIHEPYYKYIPQTVLENNTHKMYYDRAIITDKTIYHNRPDITLIDKHNKITYIIDIAIPNTHNVQNTCTEKISKYTELAQEIRHLWRMDRVVIVPVVLSCTGVIPHTLHKSLGTLQLSRNTYITLQKATILNTCHIVRKFLNTDTDTHI

SEQ ID NO: 20027 - protein, 1225 aa, Centruroides sculpturatus
MVVTRSKCDTGSDVARVNKVRVRGLGRGSRSKNRPQSPLVTGGESSAGPSMATAMPSIDVRNQPSLGVSVAIHPQTTKAGKPRQRMKWTTEMNEFIIRTYYTITRLETNMTAYRQQLHHIFTQQYPHLTVTEQRVVDQKRTIIHNNLIPQTTLELIKQQVADQIHQQTETFNINEDHVTCQDNPATSTDYSTHTTSTTNDTAGTSPSITDNVDIELVNTLSLIFQETLIKYTGTDPTQRPRIPKINTSKAVGKTLDYVNTHLLPNYIHSISTLSDIHTLVYAGAVTVVTHHGLKIHSQTDTHKTQSYHKPAWQRRIETQINDIRQQLGRLTQYTKNNITPKLKKQLKNIFKKIKTHTKHEHHNTHITEYIDTLKQKLAAKARRLKRYKTCTLRKQQNKLFTNNEKLFYRQISTKTNTDTQHSGTPTEEELTTYWSSLWSNAVTHNADAGWIEEENRNLHNIPTMPCAEINIHDIRYAVNRTHNWKTPGVDNIHNFWYKKFTSLHQELAKHLTHIIINPQDMPKFLTQGITYMKPKNNNTTDPTQYRPITCLPTLYKLLTSCITNKIYKHVEEHDILTEQQKGCRRNHRGCKEQLLIDSVILRQAHKQHRNIHMAYIDYRKAFDSVPHSWLLHILHMYKIHPSLIAFFENTMQHWRTTLHLRVSNTSIQTNEIFIRRGIFQGDSLSPLWFCLALNPLSNMLNNTQYGYNIRHEKTTQFTLSHLMYMDDIKLYASTQKQLHQLLQITHSYTKDIQMEFGLDKCKTLHIEKGILKKEDFALGNGDVIESMEEGEFYKYLGFQQAKLTEHTQIKQRLIKEYQSRLNAILRTQLNAKHTVKAINTYVIPVLTYSFGVIHWTHTDLEQLQRKTRTTLTKHKQHHPKSATERLTLPRKEGGRGLIDIVNLHYKQIQSLREFFYKKQETSQLHKAVTLADSNNTPLNLHSQHTDMTQHIKSIDNIKQSWAQKALHGRHPYDLAQDFVDKTASNSWLDRGCLFGETEGFMIAIQDQVINTKNYRKHILKDTTLTNDTCRKCHIMPETIQHITSGCKLLAQTDYLHRHNQVANIIHQELAKKHKLADIHEPYYKYIPQTVLENNTHKMYYDRAIITDKTIYHNRPDITLIDKHNKITYIIDIAIPNTHNVQNTCTEKISKYTELAQEIRHLWRMDRVLIVPVVLSCTGVIPHTLHKSLGTLELSRNTYITLQKATILNTCHIVRKFLNTDTDTLI

SEQ ID NO: 20028 - protein, 1230 aa, Mesobuthus martensii
MLAGIPTLVVFFQFVMKQSRKRKHTGSDVARVNKVRICELGRGSHSESLLQSPLATGGESSTNPSQATAIQILIVGNGSPHQSPTSQSVSLETQPETTKAGKPRQRMKWTIDMNEFIMRTYYTITKLETNITGYRRELYDKFTSRYPNITVTEQRIADQRRTIIHRNLIPHSTLQSIKTQVAQQISQHETDSHTQIEHDVEQTPEITYINDNTQPINNTDTDLINKLTDTLQETLTKFIGTDPMQRPRIPKLHNSQQLNNTLHCMNTHILPKLINAETTLMELHTLIYAAAVTVTTHLGHKTLPNKIDTNTKHHLKPAWQKRLEKQINEIRTELGRLTQYTKNNTSPKLMKSIRKIFRKLKTHTRHENHNTHIKEYMDTLKQKLAAKSQRLKRYKTSLARKLDNTLFTNNEKTFYRNINNKDPKQTQNSEIPTQQSLTSFWSALWAVPVTHNQRASWITEEETRTLDVPEMPYTTITTEELTNTLTNTHNWKAPGVDGIQNFWYKHFTCFHDLLAKHLTNLIHEPKDTPSFLTHGITFMKPKSTNTGNPSQYRPITCLPTLYKILTSCITNKIYAHVEENNILTEQQKGCHRSHMGCKEQLIIDTTILKQVHRQRRHLHAAYIDYKKAFDSIPHSWLIQTLQIYKINTKYITFLQNIMQHWRTTLHITINNNHVATEPIHIRRGIFQGDSLSPLWFCLALNPLSNKLNTSNCGYDIRQNQTTHYIHSHLFYMDDIKLYASTQTQLQQLLQITHTFSKDIHMEFGLDKCKTLHIEKGVLKKGGFTLEHGDTIKSMEEGELYKYLGFQQARLTEQKKTKQTLSKLYTIRLNNILKTHLNGKNTVKAINTFAIPILTYSFGVIQWTRTELESLQRKTRTTLTKYQYHHPKSAIERTTLPRKEGGRGLIDIPHLHDRQIYNLREFFHKKQHTSQLHKAIVLADRNMTPLNLQNNTPCQIDNTAHIHEKKTSWCKKELHGRHPHDLQKHFIDTKASNSWLVRGDLFTETEGFIIAIQDQVINTKNYRKYILKDSTLTNDTCRKCHIAPETIQHITSGCKLLAQTDYLHRHNQVANIIHQKLATKHKLMNTLTPYYNYIPDTILENSTHKMYYDRTILTDKTIHHNRPDITLIDKQNKVTYIIDISIPDTHNIQDAFTQKISKYTELSQEIKRLWGMQKVVIIPIILSSTGVIPHTLHKSLKTLDLHPKIYITLQKASLLNTCYIVRKFLSTDTDS

SEQ ID NO: 20029 - protein, 762 aa, Centruroides sculpturatus
MPCAEINIHDIRYAVNRTHNWKTPGVDNIHNFWYKKFTSLHQELAKHLTHIIINPQDMPKFLTRGITYMKPKNNKTTDPTQYRPITCLPTLYKLLTSCITNKIYKHVEEHDILTEQQKGCRRNHRGCKEQLLIDSVILRQAHKQHRNIHMAYIDYRKAFDSVPHSWLLHILHMYKIHPSLIAFFENTMQHWRTTLHLRVSNTSIQTNEIFIRRGIFQGDSLSPLWFCLALNPLSNMLNNTHYGYNIRHEKTTQFTLSHLMYMDDIKLYASTQKQLHQLLQITHSYTKDIQMEFGLDKCKKLHIEKGILKKEDFALGNGDVIESMEEGEFYKYLGFQQAKLTEHTQIKQRLIKEYQSRLNAILRTQLNAKHTVKAINTYVIPVLTYSFGVIHWTHTDLEQLQRKTRTTLTKHKQHHPKSATERLTLPRKEGGRGLIDIVNLHYKQIQSLREFFYKKQETSQLHKAVTLADSNNTPLNLHSHHTDMTQHIKSIDTIKQSWARKALHGRHPYDLAQDFVDKTASNSWLDRGCLFGETEGFMIAIQDQVINTKNYRKHILKDTTLTNDTCRKCHIMPETIQHITSGCKLLAQTDYLHRHNQVANIIHQELAKKHKLADIHEPYYKYIPQTVLENNTHKMYYDRAIITDKTIYHNRPDITLIDKHSKITYIIDIVIPNTNNVQNTCTKKISKYTELAQEIRHLWRMDRVLIVPVVLSCTGVIPHTLQTSLGTLQLSRNTYITLQKATILNTCHIVRKFLNADTDTLI

SEQ ID NO: 20030 - protein, 1085 aa, Mesobuthus martensii
MLYEGFRNFQIVLEQRFTLESIKKFHITLESIKTQVAQQISQHETDSHTQIEHKAEQTPVITYIDNNTQPINNTDTNLITKLTDTLQETLTKFTGTDPMQRPRIPKLHNSQQLNNTLHCMNTHILPKLINAETTLMELHTLIYAAAVTVTTHLGHKTLPNKIDTNTKHHLKPAWQKRLEKQINEIRTELGRLTQYTKNNTSPKLMKSIRKIFRKLKTHTRHENHNTHIKEYMDTLKQKLAAKSQRLKRYKTSLARKLDNTLFTNNEKTFYRNINNKDPKQTQNSEIPTQQSLTSFWSALWAVPVTHNQRASWITEEETRTLDVPEMPYTTITTEELTNTIRYTHNWKAPGVDGIQNFWYKHFTCFHDLLAKHLTNLIHEPKDTPSFLTHGITFMKPKSTNTGNPSQYRPITCLPTLYKILTSCITNKIYAHVKENNILTEQQKGCHRSHMGCKEQLIIDTTILKQVHRQHRHLHAAYIDYKKAFDSIPHSWLIQTLQIYKINTKYITFLQNIMQHWRTTLHITINNNHVATEPIHIRRGIFQGDSLSPLWFCLALNPLSNKLNTSNCGYDIRQNQTTHYIHSHLFYMDDIKLYASTQTQLQQLLQITHTFSKDIHMEFGLDKCKTLHIEKGVLKKGGFTLEHGDTIKSMEEGELYKYLGFQQARLTEQKKTKQTLSKLYTNRLNNILKTHLNGKNTVKAINTFAIPILTYSFGVIQWTRTELESLQRKTRTTLTKYQYHHPKSAIERTTLPRKEGGRGLIDIPHLHDRQIYNLREFFHKKQHTSQLHKAIVLADRNMTPLNLQNNTPCQIDNTAHIHEKKTSWCKKELHGRHPHDLQKHFIDAKASNSWLVRGDLFTETEGFIIAIQDQVINTKNYRKYILKDSTLTNDTCRKCHIAPETIQHITSGCKLLAQTDYLHRHNQVANIIHQKLATKHKLMNTLTPYYNYIPDTILENSTHKMYYDRTILTDKTIHHNRPDITLIDKQNKVTYIIDISIPDTHNIQDAFTQKISKYTELSQEIKRLWGMQKVVIVPIILSSTGVIPHTLHKSLKTLDLHPKTYITLQKASLLNTCNIVRKFLNSDTDS

SEQ ID NO: 20031 - protein, 764 aa, Centruroides sculpturatus
MPCAEINIHDIRYAVNRTHNWKTPGVDNIHNFWYKKFTSLHQELAKHLTHIIINPQDMPKFLTQGITYMKPKNNNTTDPTQYRPITCLPTLYKLLTSCITNKIYKHVEEHDILTEQQKGCRRNHRGCKEQLLIDSVILRQAHKQHRNIHMAYIDYRKAFDSVPHSWLLHILHMYKIHPSLIAFFENTMQHWRTTLHLRVSNTSIQTNEIFIRRGIFQGDSLSPLWFCLALNPLSNMLNNTQYGYNIRHEKTTQFTLSHLMYMDDIKLYASTQKQLHQLLQITHSYTKDIQMEFGLDKCKKLHIEKGILKKEDFALGNGDVIESMEEGEFYKYLGFQQAKLTEHTQIKQRLIKEYQSRLNAILRTQLNAKHTVKAINTYVIPVLTYSFGVIHWTHTDLEQLQRKTRTTLTKHKQHHPKSATERLTLPRKEGGRGLIDIVNLHYKQIQSLREFFYKKQETSQLHKAVTLADSNNTPLNLHSQHTDMTQHIKSIDNIKQSWAQKALHGRHPYDLAQDFVDKTASNSWLDRGCLFGETEGFMIAIQDQVINTKNYRKHILKDTTLTNDTCRKCHIMPETIQHITSGCKLLAQTDYLHRHNQVANIIHQELAKKHKLADIHEPYYKYIPQTVLENNTHKMYYDRAIITDKTIYHNRPDITLIDKHNKITYIIDIAIPNTHNVQNTCTEKISKYTELAQEIMHLWRMDRVLIVPVVLSCTGVIPHTLHKSLGTLQLNRNTYITLQKATILNTCHIVKKFLNTDTDTDTHI

SEQ ID NO: 20032 - protein, 1230 aa, Mesobuthus martensii
MLAGIPTLVVFFQFVMKQSRKRKHTGSDVARVNKVRVCELGRGSHSESLLQSPLATGGESSTNPSQATAIQILIVGYGSPHQSPTSQSVSLETQPETTKAGKPRQRMKWTIDMNEFIMRTYYTITKLETNITGYRRELYDKFTSRYPNITVTEQRIADQRRTIIHRNLIPHSTLQSIKTQVAQQISQHETDSHTQIEHDVEQTPEITYINDNTQPINNTDTDLINKLTDTLQETLTKFIGTDPMQRPRIPKLHNSQQLNNTLHCMNTHILPKLINAETTLMELHTLIYAAAVTVTTHLGHKTLPNKIDTNTKHHLKPAWQKRLEKQINEIRTELGRLTQYTKNNTSPKLMKSIRKIFRKLKTHTRHENHNTHIKEYMDTLKQKLAAKSQRLKRYKTSLARKLDNTLFTNNEKTFYRNINTKDPKQTQNSEIPTQQSLTSFWSALWAVPVTHNQRASWITEEETRTLDVPEMPYTTITTEELTNTIRYTHNWKAPGVDGIQNFWYKHFTCFHDLLAKHLTNLIHEPKDTPSFLTHGITFMKPKSTNTGNPSQYRPITCLPTLYKILTSCITNKIYAHVEENNILTEQQKGCRRSHMGCKEQLIIDTTILKQVHRQRRHLHAAYIDYKKAFDSIPHSWLIQTLQIYKINTKYITFLQNIMQHWRTTLHITINNNHVATEPIHIRRGIFQGDSLSPLWFCLALNPLSNKLNRSNYGYDIRQNQTTHYIHSHLFYMDDIKLYASTQTQLQQLLQITHTFSKDIHMEFGLDKCKTLHIEKGVLKKGGFTLEHGDTIKSMEEGELYKYLGFQQARLTEQKKTKQTLSKLYSNRLNNILKTHLNGKNTVKAINTFAIPILTYSFGVIQWTRTELESLQRKTRTTLTKYQYHHPKSAIERTTLPRKEGGRGLIDIPHLHDRQIYNLREFFHKKQHTSQLHKAIVLADRNMTPLNLQNSTPCQIDNSAHIHEKKTSWCKKELHGRHPHDLQKHFIDAKASNSWLVRGDLFTETEGFIIAIQDQVINTKNYRKYILKDSTLTNDTCRKCHIAPETIQHITSGCKLLAQTDYLHRHNQVANIIHQKLATKHKLMNTLTPYYNYIPDTILENTTHKMYYDRTILTDKTIHHNRPDITLIDKQNKVTYIIDISIPDTHNIQDAFTQKISKYTELSQEIKHPWGMQKVVIVPIILSSTGVIPHTLHKSLKTLDLHPKTYITLQKASLLNTCNIVRKFISTDTDS

SEQ ID NO: 20033 - protein, 1243 aa, Centruroides sculpturatus
MKLRVTTHPHSVEIIIMVVTRSKYDTGSDVARVNKVRVRGLGRGSRSKNRLQSPLVTGGESSAGPSMATAMPSTDVRNQPSLGVSVAMHPQTTKAGKPRQRMKWTTEMNEFIIRTYYTITRLETNMTAYRQQLHHRFTQQYPHLTVTEQRVVDQKRTIIHNNLIPQTTLELIKQQVADQIHQQTETFNINEDHVTCQDNPATSTDYSTHTTSTTNDTAGTSPSITDNIDIELVNTLSLIFQETLIKYTGTDPTQRPRIPKINTSKAVGKTLDYVNTHLLPNYIHSISTLTDIHTLVYAGAVTVVTHHGLKIHSQTDTHKTQFYHKPAWQRRIETQINDIRQQLGRLTQYTKNNITPKLKKQLKNIFKKIKTHTKHEHHNTHITEYIDTLKQKLAAKARRLKRYKTCTLRKQQNKLFTNNEKLFYRQISTKTNTDTQHSGTPTEEELTTYWSSLWSNAVTHNADAGWIKEENRNLHNIPSMPCAEINIHDIRYAVNRTHNWKTPGVDNIHNFWYKKFTSLHQELAKHLTHIIINPQDMPKFLTQGITYMKPKNNNTTDPTQYRPITCLPTLYKLLTSCITNKIYKHVEEHDILTEQQKGCRRNHRGCKEQLLIDSVILRQAHKQHRNIHMAYIDYRKAFDSVPHSWLLHILHMYKIHPSLIAFFENTMQHWRTTLHLRVSNTSIQTNEIFIRRGIFQGDSLSPLWFCLALNPLSNMLNNTQYGYNIRHEKTTQFTLSHLMYMDDIKLYASTQKQLHQLLQITHSYTKDIQMEFGLDKCKKLHIEKGILKKEDFALGNGDVIESMEEGEFYKYLGFQQAKLTEHTQIKQRLIKEYQSRLNAILRTQLNAKHTVKAINTYVIPVLTYSFGVIHWTHTDLEQLQRKTRTTLTKHKQHHPKSATERLTLPRKEGGRGLIDIVNLHYKQIQSLREFFYKKQETSQLHKAVTLADSNNTPLNLHSQHTDMTQHIKSIDNIKQSWAQKALHGRHPYDLAQDFVDKTASNSWLDRGCLFGETEGFMIAIQDQVINTKNYRKHILKDTTLTNDTCRKCHIMPETIQHITSGCKLLAQTDYLHRHNQVANIIHQELAKKHKLADIHEPYYKYIPQTVLENNTHKMYYDRAIITDKTIYHNRPDITLIDKHNKITYIIDIAIPNTHNVQNTCTEKISKYTELAQEISHLWRMDRVLIVPVVLSCTGVIPHTLHKSLETLQLSRNTYITLQKATILNTCHIVRKFLNTDTDTDTHI

SEQ ID NO: 20034 - protein, 1018 aa, Mesobuthus martensii
MQPINNTDTDLINKLTDTLQETLTKFTGTDPTQRPRIPKLHNSQQLNNTLHCMNTHILPKFINAETTLIEIHTLIYAAAVTVTTHLGLKTLPNKLGTNTRHHLKPAWQKRLEKQINEIRMDLGRLTQYTKNNTSTKLMKSIRKIFRKLKTHTHHENHNIHIKEYIDTLKQKLTAKSQRLKRYKTSLARKQDNTLFTNNEKTFYRNINTKDPRQAQNREIPTQQSLTSFWSALWAVPVIHNQRASWIAEEETRILNVPEMPYTAIATEELTNTIRRTHNWKAPGVDGIQNFWYKHFTCLHDLLAKHLTHLIHEPKDTPPFLTQGITFMKPKSTNTGNPSQYRPITCLPTLYKILTSCITNKIYTHIEENNILTEQQKGCRRSHMGCKEQLIIDTTILKQVHRQHRHLHAAYIDYKKAFDSVPHSWLIQTLQLYKINTTYITFLQNIIQHWRTTLHVTINNNHVATEPIHIRRGIFQGDSLSPLWFCLALNPLSNKLNTSNCGYNIRQNRTTHYTLSHLLYMDDIKLYASTQTQLQQLLQITHTFSKDICMEFGLDKCKTIHIEKGVLKKGDFTLENGDTIESMEEGEVYKYLGFQQARLTEQKKTKQTLSKQYTNRLNNILKTHLNGKNTVKAINTFAIPVLTYSFGVIQWTQTELESLQRKTRTALTKHQYHHPKSAIERTTLPRKEGGRGLIDIPHLHDRQIYSLREFFHKKQHTSQLHKAIVLADRNITPLNLQNNTSNPIDNIAHIQEKKTSWSRKELHGRHPHDLQKHFIDTKASNSWLVRGDLFTETEGFVIAIQDQVINTKNYRKYILKDSTLTNDTCRKCHIAPETIQHITSGCKLLAQTDYLHRHNQVANIIHQKLATKYKLINTLTPYYKYIPDTILENSTHKIYYDRTIITDKTIHHNRPDITLIDKQNKVTYIIDISIPNTHNIQDAFTQKISKYTELSQEIKHLWGMQKVLTVPIILSSTGVIPHTLHKSLGTLDLHPKTYITLQKASLLNTCNIVRKFLSIDTDS

SEQ ID NO: 20035 - protein, 762 aa, Centruroides sculpturatus
MPCAEINIHDIRYAVNRTHNWKTPGVDNIHNFWYKKFTSLHQELAKHLTHIIINPQDMPKFLTRGITYMKPKNNKTTDPTQYRPITCLPTLYKLLTSCITNKIYKHVEEHDILTEQQKGCRRNHRGCKEQLLIDSVILRQAHKQHRNIHMAYIDYRKAFDSVPHSWLLHILHMYKIHPSLIAFFENTMQHWRTTLHLRVSNTSIQTNEIFIRRGIFQGDSLSPLWFCLALNPLSNMLNNTHYGYNIRHEKTTQFTLSHLMYMDDIKLYASTQKQLHQLLQITHSYTKDIQMEFGLDKCKKLHIEKGILKKEDFALGNGDVIESMEEGEFYKYLGFQQAKLTEHTQIKQRLIKEYQSRLNAILRTQLNAKHTVKAINTYVIPVLTYSFGVIHWTHTDLEQLQRKTRTTLTKHKQHHPKSATERLTLPRKEGGRGLIDIVNLHYKQIQSLREFFYKKQETSQLHKAVTLADSNNTPLNLHSQHTDMTQHIKSIDNIKQSWAQKALHGRHPYDLAQDFVDKTASNSWLDRGCLFGETEGFMIAIQDQVINTKNYRKHILKDTTLTNDTCRKCHIMPETIQHITSGCKLLAQTDYLHRHNQVANIIHQELAKKHKLADIHEPYYKYIPQTVLENNTHKLYYNRAIITDKTIYHNRPDITLIDKHNKITYIIDIAIPNTHNVQNRCTEKISKYTELAQKIRHLWRIKRVLIVLVVLSCTGVIPHTLHKSLGTLQLNINTYITLQKATILNTCHIVRKFLNTDTDTLI

SEQ ID NO: 20036 - protein, 1293 aa, Centruroides sculpturatus
MSYNDLLVYLSVQFSRLFRFVFVHSMMPKKYYYYYCPGGEYLTQFKHQCLVLCQTPFVLIIIIIIIIIMVVTRSKCDTGSDVARVNKVRVRGLGRGSRSKNRPQSPLVTGGESSAGPSMATAMPSTDVRNQPSLGVSVAIHPQTTKAGKPRQRMKWTTEMNEFIIRTYYTITRLETNMTAYRQQLHHRFTQQYPHLTVTEQRVVDQKRTIIHNNLIPQTTLELIKQQVADQIHQQTETFNINEDHVTCQDNPATSTDYSTHTTSTTNDTAGTSPSITDNVDIELVNTLSLIFQETLTKYTGTDPTQRPRIPKINTSKVVGKTLNYVNTHLLPNYIHSISTLSDIHTLVYAGAVTVVTHHGLKIHSQTDTHKTQFYHKPAWQRRIETQINDIRQQLGRLTQYTKNNITPKLKKQLKNIFKKIKTHTKHEHHNTHITEYIDTLKQKLAAKARRLKRYKTCTLRKQQNKLFTNNEKLFYRQISTKTNTDTQHSGTPTEEELTTYWSSLWSNAVTHNADAGWIKEENRNLHNIPTMPCAEINIHDIRYAVNRTHNWKTPGVDNIHNFWYKKFTSLHQELAKHLTHIIINPQDMPKFLTRGITYMKPKNNKTTDPTQYRPITCLPTLYKLLTSCITNKIYKHVEEHDILTEQQKGCRRNHRGCKEQLLIDSVILRQAHKQHRNIHMAYIDYRKAFDSVPHSWLLHILHMYKIHPSLIAFFENTMQHWRTTLHLRVSNTSIQTNEIFIRRGIFQGDSLSPLWFCLALNPLSNMLNNTQYGYNIRHEKTTQFTLSHLMYMDDIKLYASTQKQLHQLLQITHSYTKDIQMEFGLDKCKKLHIEKGILKKEDFALGNGDVIESMEEGEFYKYLGFQQAKLTEHTQIKQRLIKEYQSRLNAILRTQLNAKHTVKAINTYVIPVLTYSFGVIHWTHTDLEQLQRKTRTTLTKHKQHHPKSATERLTLPRKEGGRGLIDIVNLHYKQIQSLREFFYKKQETSQLHKAVTLADSNNTPLNLHSQHTDMTQHIKSIDNIKQSWAQKALHGRHPYDLAQDFVDKTASNSWLDRGCLFGETEGFMIAIQDQVINTKNYRKHILKDTTLTNDTCRKCHIMPETIQHITSGCKLLAQTDYLHRHNQVANIIHQELAKKHKLADIHEPYYKYIPQTVLENNTHKMYYDRAIITDKTIYHNRPDITLIDKHNKITYIIDIAIPNTHNVQNTCTEKISKYTELAQEIRHLWRMDRVLIVPVVLSCTGVIPHTLHKSLGTLQLSRNTYITLQKATILNTCHIVRKFLNTDTDTHI

SEQ ID NO: 20037 - protein, 1028 aa, Centruroides sculpturatus
MILQKSSSITNNIDIDLVNTLSLIFQETLTKYTGTDPTQRPRIPKINTSKVVGKTLNYVNTHLLPNYIHSISTLSDIHTLVYAGAVTVVTHHGLKIHSQTDTHKTQFYHKPAWQRRIETQINDIRQQLGRLTQYTKNNITPKLKKQLKNIFKKIKTHTKHEHHNTHITEYIDTLKQKLAAKARRLKRYKTCTLRKQQNKLFTNNEKLFYRQISTKTNTDTQHSGTPTEEELTTYWSSLWSNAVTHNADAGWIEEENRNLHNIPTMPCAEINIHDIRYAVNRTHNWKTPGVDNIHNFWYKKFTSLHQELAKHLTHIIINPQDMPKFLTQGITYMKPKNNKTTDPTQYRPITCLPTLYKLLTSCITNKIYKHVEEHDILTEQQKGCRRNHRGCKEQLLIDSVILRQAHKQHRNIHMAYIDYRKAFDSVPHSWLLHILHMYKIHPSLIAFFENTMQHWRTTLHLRVSNTSIQTNEIFIRRGIFQGDSLSPLWFCLALNPLSNMLNNTQYGYNIRHEKTTQFTLSHLMYMDDIKLYASTQKQLHQLLQITHSYTKDIQMEFGLDKCKKLHIEKGILKKEDFALGNGDVIESMEEGEFYKYLGFQQAKLTEHTQIKQRLIKEYQSRLNAILRTQLNAKHTVKAINTYVIPVLTYSFGVIHWTHTDLEQLQRKTRTTLTKHKQHHPKSATERLTLPRKEGGRGLIDIVNLHYKQIQSLREFFYKKQETSQLHKAVTLADSNNTPLNLHSHHTDMTQHIKSIDTIKQSWARKALHGRHPYDLAQDFVDKTASNSWLDRGCLFGETEGFMIAIQDQVINTKNYRKHILKDTTLTNDTCRKCHIMPETIQHITSGCKLLAQTDYLHRHNQVANIIHQELAKKHKLADIHEPYYKYIPQTVLENNTHKMYYDRAIITDKTIYHNRPDITLIDKHNKITYIIDIAIPNTHNVQNTCTEKISKYTELAQEIRHLWRMDRVLIVPVVLSCTGVIPHTLHKSLGTLQLNRNTYITLQKATILNTFHIVRKFLNTDTDSDTLI

SEQ ID NO: 20038 - protein, 1075 aa, Mesobuthus martensii
MVEFSDDSDTLRQPHSISQETQPETTKAGKPCQRMKWTIDMNEFIMRTYYTITKLETNITGYRRELYDKFTCRYPNITVTEQRIADQRRTIIHRNLIPHSTLQRIKTQVAQQISQHETDSHTQIEHDVEQTPEITYINDNTQPINNTDTDLINKLTDTLQETLTKFIGTDPMQRPRIPKLHNSQQLNNTLHCMNTHILPKLINAETTLMELHTLIYAAAVTVTTHLGHKTLPNKIDTNTKHHLKPAWQKRLEKQINEIRTELGRLTQYTKNNTSPKLMKSIRKIFRKLKTHTRHENHNTHIKEYMDTLKQKLAAKSQRLKRYKTSLARKLDNTLFTNNEKTFYRNINTKDPKQTQNSEIPTQQSLTSFWSALWAVPVTHNQRASWITEEETRTLDVPEMPYTTITTEELTNTIRYTHNWKAPGVDGIQNFWYKHFTCFHDLLAKHLTNLIHEPKDTPSFLTHGITFMKPKSTNTGNPSQYRPITCLPTLYKILTSCITNKIYAHIEENNILTEQQKGCRRSHMGCKEQLIIDTTILKQVHRQRRHLHAAYIDYKKAFDSIPHSWLIQTLQIYKINTKYITFLQNIMQHWRTTLHITINNNHVATEPIHIRRGIFQGDSLSPLWFCLALNPLSNKLNRLNYGYDIRQNQTTHYIHSHLFYMDDIKLYASTQTQLQQLLQITHTFSKDIHMEFGLDKCKTLHIEKGVLKKGGFTLEHGDTIKSMEEGELYKYLGFQQARLTEQKKTKQTLSKLYTIRLNNILKTHLNGKNTVKAINTFAIPVLTYSFGVIQWTRTELESLQRKTRTTLTKYQYHHPKSAIERTTLPRKEGGRGLIDIPHLHDRQIYNLREFFHKKQHTSQLHKAIVLADRNMTPLNLQNNTPCQIDNIAHIHEKKTSWCKKELHGRHPHDLQKHFIDAKASNSWLVRGDLFTETEGFIIAIQDQVINTKNYRKYILKDSTLTNDTCRKCHIAPETIQHITSGCKLLAQTDYLHRHNQVANIIHQKLATKHKLMNTLTPYYNYIPDTILENATHKMYYDRTNLTDKTIYHNQSDITLIDKQNKVTYIIDISIPDTHNI

SEQ ID NO: 20039 - protein, 1243 aa, Centruroides sculpturatus
MKLRVTTHLHSVEIIIMVVTRSKYDTGSDVARINKVRATIHGLGRGSRSKNRLQSPLVTGGESSAGPSMATAMPSTDVRNQPSRGVSVAMHPQTTKAGKPCQRMKWTIEMNEFIIRTYYTITRLETNMTAYRQQLHHIFTQQYPHLTVTEQRVVDQKRTIIHNNLIPQTTLELIKQQVADQIHQQTETFNINEDHVTCQDNPATSTDYSTHTTSTTNDTAGTSPSITDNVDIELVNTLSLIFQETLIKYTGTDPTQRPRIPKINTSKAVGKTLDYVNTHLLPNYIHSISTLSDIHTLVYAGAVTVVTHHGLKIHSQTDTHKTQFYHKPAWQRRIETQINDIRQQLGRLTQYTKNNITPKLKKQLKNIFKKIKTHTKHEHHNTHITEYIDTLKQKLAAKARRLKRYKTCTLRKQQNKLFTNNEKLFYRQISTKTNTDTQHSGTPTEEELTTYWSSLWSNAVTHNADAGWIKEENRNLHNIPSMPCAEINIHDIRYAVNRTHNWKTPGVDNIHNFWYKKFTSLYQELAKHLTHIFINPQDMPKFFTRGITYMKPKNNKTTDPTQYRPITCLPTLYKLLTSCITNKIYKHVKEHDILTEQQKGCRRNHRGCKEQLLIDSVILRQAHKQHRNIHMAYIDYRKAFDSVPHSWLLHILHMYKIHPSLIAFFENTMQHWRTTLHLRVSNTSIQTNEIFIRRGIFQGDSLSPLWFCLALNPLSNMLNNTQYGYNIRHEKTTQFTLSHLMYMDDIKLYASTQKQLHQLLQITHSYTKDIQMEFGLDKCKKLHIEKGILKKEDFALGNGDVIESMEEGEFYKYLGFQQAKLTEHTQIKQRLIKEYQSRLNAILRTQLNAKHTVKAINTYVIPVLTYSFGVIHWTHTDLEQLQRKTRTTLTKHKQHHPKSATERLTLPRKEGGRGLIDIVNLHYKQIQSLREFFYKKQETSQLHKAVTLADSNNTPLNLHSHHTDMTQHIKSIDTIKQSWARKALHGRHPYDLAQDFVDKTASNSWLDRGCLFGETEGFMIAIQDQVINTKNYRKHILKDTTLTNDTCRKCHIMPETIQHITSGCKLLAQTDYLHRHNQVANIIHQELAKKHKLADIHEPYYKYIPQTVLENNTHKMYYDRAIITDKTIYHNRPDITLIDKHNKITYIIDIAIPNTHNVQNTCTEKISKYTELAQEIRHLWRMDRVLIVPVVLSCTGVIPHTLHKSLGTLQLNRNTYITLQKATILNTCYIVRKFLNTDTDTLI

SEQ ID NO: 20040 - protein, 1258 aa, Centruroides sculpturatus
MKLRVTTHPHSVEIIIMVVTRSKYDTGSDVARVNKVRVRGLGRGSRSKNRLQSPLVTGGESSAGPSMATAMPSTDVRNQPSLGVSVAMHPQTTKAGKPRQRMKWTTEMNEFIIRTYYTITRLETNMTAYRQQLHHRFTQQYPHLTVTEQRVVDQKRTIIHNNLIPQTTLELIKQQVADQIHQQTETFNINEDHVTCQDNPATSTDYSTHTTSTTNDTAGTSPSITDNIDIELVNTLSLIFQETLTKYTGTDPTQRPRIPKINTSKVVGKTLNYVNTHLLPNYIHSISTLSDIHTLVYAGAVTVVTHHGLKIHSQTDTHKTQFYHKPAWQRRIETQINDIRQQLGRLTQYTKNNITPKLKKQLKNIFKKIKTHTKHEHHNTHITEYIDTLKQKLAAKARRLKRYKTCTLRKQQNKLFTNNEKLFYRQISTKTNTDTQHSGTPTEEELTTYWSSLWSNAVTHNADAGWIKEENRNLHNIPSMPCAEINIHDIRYAVNRTHNWKTPGVDNIHNFWYKKFTSLHQELAKHLTHIIINPQDMPKFLTRGITYMKPKNNKTTDPTQYRPITCLPTLYKLLTSCITNKIYKHVEEHDILTEQQKGCRRNHRGCKEQLLIDSVILRQAHKQHRNIHMAYIDYRKAFDSVPHSWLLHILHMYKIHPSLIAFFENTMQHWRTTLHLRVSNTSIQTNEIFIRRGIFQGDSLSPLWFCLALNPLSNMLNNTQYGYNIRHEKTTQFTLSHLMYMDDIKLYASTQKQLHQLLQITHSYTKDIQMEFGLDKCKKLHIEKGILKKEDFALGNGDVIESMEEGEFYKYLGFQQAKLTEHTQIKQRLIKEYQSRLNAILRTQLNAKHTVKAINTYVIPVLTYSFGVIHWTHTDLEQLQRKTRTTLTKHKQHHPKSATERLTLPRKEGGRGLIDIVNLHYKQIQSLREFFYKKQETSQLHKAVTLADSNNTPLNLHSHHTDMTQHIKSIDTIKQSWARKALHGRHPYDLAQDFVDKTASNSWLDRGCLFGETEGFMIAIQDQVINTKNYRKHILKDTTLTNDTCRKCHIMPETIQHITSGCKLLAQTDYLHRHNQVANIIHQELAKKHKLADIHEPYYKYIPQTVLENNTHKMYYDRAIITDKTIYHNRPDITLIDKHNKITYIIDIAIPNTHNVQNTCTEKISKYTELAQEIRHLWRMDRVLIVPVVLSCTGVIPHTLHKSLGTLQLSRNTYITLQKATILNTCHIVRKFLNTDTDTDTHLILVLFWLLCLDSGPA

SEQ ID NO: 20041 - protein, 1234 aa, Mesobuthus martensii
MLNQMLAGVPTLVVFCLYAMAQSRKRKHTGSDVSRVNKVRVCELGRGSHSESLLQSPLATGGESSTNPSLATAIHIPRVGNGSPHQSPTSQRVSQVTQPETTKAGKPRQRMKWTTDMNEFIMRTYYTITKLETDSTGYRRELYDKFTSRYPNITVTEQRIADQRRTIIHRNLIPHSTLENIKTQVAEQISQHKTDSHTQIEHDVEQTPEITYINDNMQPINNTDTDLINKLTDTLQETLTKFTGTDPTQRPRIPKLHNSQQLNNTLHCMNTHILPKFINAETTLIEIHTLIYAAAVTVTTHLGLKTLPNKLGTNTRHHLKPAWQKRLEKQINEIRMDLGRLTQYTKNNTSTKLMKSIRKIFRKLKTHTHHENHNIHIKEYIDTLKQKLTAKSQRLKRYKTSLARKQDNTLFTNNEKTFYRNINTKDPRQAQNREIPTQQSLTSFWSALWAVPVIHNQRASWIAEEETRILNVPEMPYTAIATEELTNTIRRTHNWKAPGVDGIQNFWYKHFTCLHDLLAKHLTHLIHEPKDTPPFLTQGITFMKPKSTNTGNPSQYRPITCLPTLYKILTSCITNKIYTHIEENNILTEQQKGCRRSHMGCKEQLIIDTTILKQVHRQHRHLHAAYIDYKKAFDSVPHSWLIQTLQLYKINTTYITFLQNIIQHWRTTLHVTINNNHVATEPIHIRRGIFQGDSLSPLWFCLALNPLSNKLNTSNCGYNIRQNRTTHYTLSHLLYMDDIKLYASTQTQLQQLLQITHTFSKDICMEFGLDKCKTIHIEKGVLKKGDFTLENGDTIESMEEGEVYKYLGFQQARLTEQKKTKQTLSKQYTNRLNNILKTHLNGKNTVKAINTFAIPVLTYSFGVIQWTQTELESLQRKTRTALTKHQYHHPKSAIERTTLPRKEGGRGLIDIPHLHDRQIYSLREFFHKKQHTSQLHKAIVLADRNITPLNLQNNTSNPIDNIAHIQEKKTSWSRKELHGRHPHDLQKHFIDTKASNSWLVRGDLFTETEGFVIAIQDQVINTKNYRKYILKDSTLTNDTCRKCHIAPETIQHITSGCKLLAQTDYLHRHNQVANIIHQKLATKYKLINTLTPYYKYIPDTILENSTHKIYYDRTIITDKTIHHNRPDITLIDKQNKVTYIIDISIPNTHNIQDAFTQKISKYTELSQEIKRLWGMQKVLTVPIILSSTGVIPHTLHKSLGTLDLHPKTYITLQKASLLNTCNIVRKFLSIDTDS

SEQ ID NO: 20042 - protein, 1241 aa, Centruroides sculpturatus
MKLRVTTHPHSVEIIIMVVTRSKCDTGSDVARVNKVRVRGLGRGSRSKNRLQSPLVTGGESSAGPSMATAMPSTDVRNQPSLGVSVAMHPQTTKAGKPRQRMKWTTEMNEFIIRTYYTITRLETNMTAYRQQLHHRFTQQYPHLTVTEQRVVDQKRTIIHNNLIPQTTLELIKQQVADQIHQQTETFNINEDHVTCQDNPATSTDYSTHTTSTTNDTAGTSPSITDNIDIELVNTLSLIFQETLIKYTGTDPTQRPRIPKINTSKAVGKTLDYVNTHLLPNYIHSISTLTDIHTLVYAGAVTVVTHHGLKIHSQTDTHKTQFYHKPAWQRRIETQINDIRQQLGRLTQYTKNNITPKLKKQLKNIFKKIKTHTKHEHHNTHITEYIDTLKQKLAAKARRLKRYKTCTLRKQQNKLFTNNEKLFYRQISTKTNTDTQHSGTPTEEELTTYWSSLWSNAVTHNADAGWIEEENRNLHNIPTMPCAEINVHDIRYAVNRTHNWKTPGVDNIHNFWYKKFTSLHQELAKHLTHIIINPQDMPKFLTQGITYMKPKNNKTTDPTQYRPITCLPTLYKLLTSCITNKIYKHVEEHDILTEQQKGCRRNHRGCKEQLLIDSVILRQAHKQHRNIHMAYIDYRKAFDSVPHSWLLHILHMYKIHPSLIAFFENTMQHWRTTLHLRVSNTSIQTNEIFIRRGIFQGDSLSPLWFCLALNPLSNMLNNTQYGYNIRHEKTTQFTLSHLMYMDDIKLYASTQKQLHQLLQITHSYTKDIQMEFGLDKCKKLHIEKGILKKEDFALGNGDVIESMEEGEFYKYLGFQQAKLTEHTQIKQRLIKEYQSRLNAILRTQLNAKHTVKAINTYVIPVLTYSFGVIHWTHTDLEQLQRKTRTTLTKHKQHHPKSATERLTLPRKEGGRGLIDIVNLHYKQIQSLREFFYKKQETSQLHKAVTLADSNNTPLNLHSQHTDMTQHIKSIDNIKQSWAQKALHGRHPYDLAQDFVDKTASNSWLDRGCLFGETEGFMIAIQDQVINTKNYRKHILKDTTLTNDTCRKCHIMPETIQHITSGCKLLAQTDYLHRHNQVANIIHQELAKKHKLADIHEPYYKYIPQTVLENNTHKMYYDRAIITDKTIYHNRPDITLIDKHNKITYIIDIAIPNTHNVQNTCTEKISKYTELAQEIRHLWRMDRVLIVPVVLSCTGVIPHTLHKSLGTLELSRNTYITLQKATILNTCHIVRKFLNTDTDTLI

SEQ ID NO: 20043 - protein, 1229 aa, Mesobuthus martensii
MLADPTFVLFFQIVMKQSRKRKHTGLDVAWVNKVRVCELGRGSHSERLLQSPLATGGESSTNPSQATAIQILIVGNGSPHQSPTSQSVSLETQPETTKAGKPRQRMKWTIDMNEFIMRTYYTITKLETNITGYRRELYDKFTSRYPNITVTEQRIADQRRTIIHRNLIPHSTLQSIKTQVAQQISQHETDSHTQIEHDVEQTPEITYINDNTQPINNTDTDLINKLTDTLQETLTKFIGTDPMQRPRIPKLHNSQQLNNTLHCMNTHILPKLINAETTLMELHTLIYAAAVTVTTHLGHKTLPNKIDTNTKHHLKPAWQKRLEKQINEIRTELGRLTQYTKNNTSPKLMKSIRKIFRKLKTHTRHENHNTHIKEYMDTLKQKLAAKSQRLKRYKTSLARKLDNTLFTNNEKTFYRNINTKDPKQTQNCEIPTQQSLTSFWSALWAVPVTHNQRASWITEEETHTLVVPEMPYTTITTEELTNTIRYTHNWKAPGVDGIQNFWYKHFTCLHDLLAKHLTHLIHEPKDTPSFLTHGITFMKPKSTNTGNPSQYRPITCLPTLYKILTSCITNKIYAHVEENNILTEQQKGCRRSHMGCKEQLIIDTTILKQVHRQRRHLHAAYIDYKKAFDSIPHSWLIQTLQIYKINTKYITFLQNIMQHWRTTLHITINNNHVATEPIHIRRGIFQGDSLSPLWFCLALNPLSNKLNTLNCGYDIRQNQTTHYIHSHLFYMDDIKLYASTQTQLQQLLQITHTFSKDIHMEFGLHKCKTLHIEKGVLKKGGFTLEHGDTIKSMEEGELYKYLGFQQARLTEQKKTKQTLSKLYTNRLNNILKTHLNGKNTVKAINTFAIPILTYSFGVIQWTRTELESLQRKTRTTLTKYQYHHPKSAIERTTLPRKEGGRGLIDIPHLHDRQIYNLREFFHKKQHTSQLHKAIVLADRNMTPLNLQNNTPCQIDNTAHIHEKKTSWCKKELHGRHPHDLQKHFIDAKASNSWLVRGDLFTETEGFIIAIQDQVINTKNYRKYILKDSTLTNDTCRKCHIAPETIQHITSGCKLLAQTDYLHRHNQVANIIHQKLATKHKLMNKLTPYYNYIPDTILENTTHKKYYNRTILTDKTIHHNRPDITLIDKQNKVTYIIDVLIPDTHNIQDAFTQKISKYTELSQEIKRLWGMQKVVIVPIILSSTGVIPHTLHKSLKTLDLHPKTYITLQKASLLNTCNIVRKFLNTDTDS

SEQ ID NO: 20044 - protein, 762 aa, Centruroides sculpturatus
MPCAEINVHDIRYAVNRTHNWKTPGVDNIHNFWYKKFTSLHQELAKHLTHIIINPQDMPKFLTQGITYMKPKNNNTTDPTQYRPITCLPTLYKLLTSCITNKIYKHVEEHDILTEQQKGCRRNHRGCKEQLLIDSVILRQAHKQHRNIHMAYIDYRKAFDSVPHSWLLHILHMYKIHPSLIAFFENTMQHWRTTLHLRVSNTSIQTNEIFIRRGIFQGDSLSPLWFCLALNPLSNMLNNTQYGYNIRHEKTTQFTLSHLMYMDDIKLYASTQKQLHQLLQITHSYTKDIQMEFGLDKCKKLHIEKGILKKEDFALGNGDVIESMEEGEFYKYLGFQQAKLTEHTQIKQRLIKEYQSRLNAILRTQLNAKHTVKAINTYVIPVLTYSFGVIHWTHTDLEQLQRKTRTTLTKHKQHHPKSATERLTLPRKEGGRGLIDIVNLHYKQIQSLREFFYKKQETSQLHKAVTLADSNNTPLNLHSQHTDMTQHIKSIDNIKQSWAQKALHGRHPYDLAQDFVDKTASNSWLDRGCLFGETEGFMIAIQDQVINTKNYRKHILKDTTLTNDTCRKCHIMPETIQHITSGCKLLAQTDYLHRHNQVANIIHQELAKKHKLADIHEPYYKYIPQTVLENNTHKMYYDRAIITDKTIYHNRPDITLIDKHNKITYIIDIAIPNTHNVQNTCTEKISKYTELAQEIRHLWRMDRVLIVPVVLSCTGVIPHTLHKSLGTLQLSRNTYITLQKATILNTCHIVRKFLNTDTDTHI

SEQ ID NO: 20045 - protein, 1233 aa, Mesobuthus martensii
MLNQMLAGVPTLVVFCLYAMTQSRKRKHTGSDVSRVNKVRVCQLGRGSHLENLLQSPLATGGESSTNPSLATAIHIPRVGNGSPHQSPTSQRVSQVTQPETTKAGKPRQRMKWTTDMNEFIMRTYYTITKLETDSTGYRRELYDKFTSRYPNITVTEQRIADQRRTIIHRNLIPHSTLENIKTQVAEQISQHKTDSHTQIEHDVEQTPEITYIDDNMQPINNTDTDLINKLTDTLQETLTKFTGTDPTQRPRIPKLHNSQQLNNTLHCMNTHILPKFINAETTLIEIHTLIYAAAVTVTTHLGLKTLPNKLGTNTRHHLKPAWQKRLEKQINEIRMDLGRLTQYTKNNTSTKLMKSIRKIFRKLKTHTHHENHNIHIKEYIDTLKQKLTAKSQRLKRYKTSLARKQDNTLFTNNKKTFYRNINTKDPRQAQNREIPTQQSLTSFWSALWAVPVIHNQRASWIAEEETRILNVPEMPYTAIATEELTNTIRRTHNWKAPGVDGIQNFWYKHFTCLHDLLAKHLTHLIHEPKDTPPFLTQGITFMKPKSTNTGNPSQYRPITCLPTLYKILTSCITNKIYTHIEENNILTEQQKGCRRSHMGCKEQLIIDTTILKQVHRQHRHLHAAYIDYKKAFDSVPHSWLIQTLQLYKINTTYITFLQNIIQHWRTTLHVTINNNHVATEPIHIRRGIFQGDSLSPLWFCLALNPLSNKLNTLNCGYNIRQNRTTHYTLSHLLYMDDIKLYASTQTQLQQLLQITHTFSKDICMEFGLDKCKTIHIEKGVLKKGDFTLENGDTIESMEEGEMYKYLGFQQARLTEQKKTKQTLSKQYTNRLNNILKTHLNGKNTVKAINTFAIPVLTYSFGVIQWTQTELESLQRKTRTALTKHQYHHPKSAIERTTLPRKEGGRGLIEIPHLHDRQIYSLREFFHKKQHTSQLHKAIVLADRNITPLNLQNNTSNPIDNIAHIQEKKTSWSRKELHGRHPHDLQKHFIDTKASNSWLVRGDLFTETEGFVIAIQDQVINTKNYRKYILKDSTLTNDTCRKCHIAPETIQHITSGCKLLAQTDYLHRHNQVANIIHQKLATKYKLINTLTPYYKYIPDTILENSTHKIYYDRTIITDKTIHHNRPDITLIDKQNKVTYIIDISIPNTHNIQDAFTQKISKYTELSQEIKRLWGMQKVLTVPIILSSTGVIPHTLHKSLGTLDLHPKTYITLQKASLLNTCNIVRKFLSNTDS

SEQ ID NO: 20046 - protein, 1241 aa, Centruroides sculpturatus
MKLRVTTHPHSVEIIIMVVTRSKYDTGSDVARVNKVRVRGLGRGSRSKNRLQSPLVTGGESSAGPSMATAMPSTDVRNQPSLGVSVAMHPQTTKAGKPRQRMKWTTEMNEFIIRTYYTITRLETNMTAYRQQLHHIFTQQYPHLTVTEQRVVDQKRTIIHNNLIPQTTLELIKQQVADQIHQQTETFNINEDHVTCQDNPATSTDYSTHTTSTTNDTAGTSPSITDNVDIELVNTLSLIFQETLIKYTGTDPTQRPRIPKINTSKAVGKTLDYVNTHLLPNYIHSISTLTDIHTLVYAGAVTVVTHHGLKIHSQTDTHKTQFYHKPAWQRRIETQINDIRQQLGRLTQYTKNNITPKLKKQLKNIFKKIKTHTKHEHHNTHITEYIDTLKQKLAAKARRLKRYKTCTLRKQQNKLFTNNEKLFYRQISTKTNTDTQHSGTPTEEELTTYWSSLWSNAVTHNADAGWIEEENRNLHNIPTMPCAEINVHDIRYAVNRTHNWKTPGVDNIHNFWYKKFTSLHQELAKHLTHIIINPQDMPKFLTQGITYMKPKNNKTTDPTQYRPITCLPTLYKLLTSCITNKIYKHVEEHDILTEQQKGCRRNHRGCKEQLLIDSVILRQAHKQHRNIHMAYIDYRKAFDSVPHSWLLHILHMYKIHPSLIAFFENTMQHWRTTLHLRVSNTSIQTNEIFIRRGIFQGDSLSPLWFCLALNPLSNMLNNTQYGYNIRHEKTTQFTLSHLMYMDDIKLYASTQKQLHQLLQITHSYTKDIQMEFGLDKCKKLHIEKGILKKEDFALGNGDVIESMEEGEFYKYLGFQQAKLTEHTQIKQRLIKEYQSRLNAILRTQLNAKHTVKAINTYVIPVLTYSFGVIHWTHTDLEQLQRKTRTTLTKHKQHHPKSATERLTLPRKEGGRGLIDIVNLHYKQIQSLREFFYKKQETSQLHKAVTLADSNNTPLNLHSQHTDMTQHIKSIDNIKQSWAQKALHGRHPYDLAQDFVDKTASNSWLDRGCLFGETEGFMIAIQDQVINTKNYRKHILKDTTLTNDTCRKCHIMPETIQHITSGCKLLAQTDYLHRHNQVANIIHQELAKKHKLADIHEPYYKYIPQTVLENNTHKMYYDRAIITDKTIYHNRPDITLIDKHNKITYIIDIAIPNTHNVQNTCTEKISKYTELAQEIRHLWRMDRVLIVPVVLSCTGVIPHTLHKSLGTLQLSRNTYITLQKATILNTCHIVRKFLNTDTDTHI

SEQ ID NO: 20047 - protein, 1227 aa, Centruroides sculpturatus
MVVTRSKCDTGSEIARVNKVRVRGLGRDSRSKNRPQSPLVTGGESSAGPSMATAMPSTDVRNQPSLGVSVAMHPQTTKAGKPRQRMKWTTEMNEFIIRTYYTITRLETNMTAYRQQLHHRFTQQYPHLTVTEQRVVDQKRTIIHNNLIPQTTLELIKQQVADQIHQQTETFNINEDHVTCQDNPATSTDYSTHTTSTTNDTAGTSPSITDNVDIELVNTLSLIFQETLTKYTGTDPTQRPRIPKINTSKVVGKTLNYVNTHLLPNYIHSISTLSDIHTLVYAGAVTVVTHHGLKIHSQTDTHKTQFYHKPAWQRRIETQINDIRQQLGRLTQYTKNNITPKLKKQLKNIFKKIKTHTKHEHHNTHITEYIDTLKQKLAAKARRLKRYKTCTLRKQQNKLFTNNEKLFYRQISTKTNTDTQHSGTPTEEELTTYWSSLWSNAVTHNADAGWIEEENRNLHNIPTMPCAEINIHDIRYAVNRTHNWKTPGVDNIHNFWYKKFTSLHQELAKHLTHIIINPQDMPKFLTQGITYMKPKNNKTTDPTQYRPITCLPTLYKLLTSCITNKIYKHVEEHDILTEQQKGCRRNHRGCKEQLLIDSVILRQAHKQHRNIHMAYIDYRKAFDSVPHSWLLHILHMYKIHPSLIAFFENTMQHWRTTLHLRVSNTSIQTNEIFIRRGIFQGDSLSPLWFCLALNPLSNMLNNTQYGYNIRHEKTTQFTLSHLMYMDDIKLYASTQKQLHQLLQITHSYTKDIQMEFGLDKCKKLHIEKGILKKEDFALGNGDVIESMEEGEFYKYLGFQQAKLTEHTQIKQRLIKEYQSRLNAILRTQLNAKHTVKAINTYVIPVLTYSFGVIHWTHTDLEQLQRKTRTTLTKHKQHHPKSATERLTLPRKEGGRGLIDIVNLHYKQIQSLREFFYKKQETSQLHKAVTLADSNNTPLNLHSQHTDMTQHIKSIDNIKQSWAQKALHGRHPYDLAQDFVDKTASNSWLDRGCLFGETEGFMIAIQDQVINTKNYRKHILKDTTLTNDTCRKCHIMPETIQHITSGCKLLAQTDYLHRHNQVANIIHQELAKKHKLADIHEPYYKYIPQTVLENNTHKMYYDRAIITDKTIYHNRPDITLIDKHNKITYIIDIAIPNTHNVQNTCTEKISKYTELAQEIRHLWRMDRVLIVPVVLSCTDEIPHTLHKSLGTLQLSRNTYITLQKATILNTCHIVRKFLNTDTHTDTLI

SEQ ID NO: 20048 - protein, 1233 aa, Mesobuthus martensii
MLNQMLPGVPTLVVFCLYTMAQSRKQKHTGSNVSRVNKVRVCELGRGSDSESLLQSPLATGGESSTNPSQATAIQIPRVGNGSPHQSPTSQSVSLETQPETTKAGKPRQRMKWTIDMNEFIMRTYYTITKLETNITGYRRELYDKFTSRYPNITVTEQRIADQRRTIIHRNLIPHSTLQSIKTQVAQQISQHETDSHTQIEHDVEQTPEITYIDDNTQPINNTDTDLINKLTDTPQETLTKFTGTDPMQHPHIPKLHNSQQLNNTLHCMNTHILPKLINAETTLMELHTLIYAAAVTVTTHLGHKTLPNKIDTNTKHHLKPAWQKRLEKQINEIRTELGRLTQYTKNNTSPKLMKSIRKIFRKLKTHTRHENHNTHIKEYMDTLKQKLAAKSQRLKRYKTSLARKLDNTLFTNNEKTFYRNINTKDPKQTQNCEIPTQQSLTSFWSALWAVPVTHNQRASWITEEETRTLDMPEMPYTTITTEELTNTIRYTHNWKAPGVDGIQNFWYKHFTCFHDLLAKHLTNLIHEPKDTPSFLTHGITFMKPKSTNTGNPSQYRPITCLPTLYKILTSCITNKIYAHIEENNILTEQQKGCRRSHMGCKEQLIIDTTILKQVHRQRRHLHAAYIDYKKAFDSIPHSWLIQTLQIYKINTKYITFLQNIMQHWRTTLHITINNNHVATEPIHIRRGIFQGDSLSPLWFCLALNPLSNKLNRSNYGYDIRQNQTTHYIHSHLFYMDDIKLYTSTQTQLQQLLQITHTFSKDIHMEFGLDKCKTLHIEKGVLKKGGFTLEHGDTIKSMEEGELYKYLGFQQARLTEQKKTKQTLSKLYTIRLNNILKTHLNGKNTVKAINTFAIPILTYSFGVIQWTRTELESLQRKTRTTLTKYQYHHPKSAIERTTLPRKEGGRGLIDIPHLHDRQIYNLREFFHKKQHTSQLHKAIVLADRNMTPLNLQNNTPCQIDNTAHIHEKKTSWCKKELHGRHPHDLQKHFIDAKASNSWLVRGDLFTETEGFIIAIQDQVINTKNYRKYILKDSTLTNDTCRKCHIAPETIQHITLGCNLLAQTDYLHRHNQVANIIHQKLATKYKLINTLTPYYKYIPDTILENSTHKIYYDRTIITDKTIHHNRPDITLIDKQNKVTYIIDISIPNTHNIQDAFTQKISKYTELSQEIKRLWGMQKVLTVPIILSSTGVIPHTLHKSLGTLDLHPKTYITLQKASLLNTCNIVRKFLSNTDS

SEQ ID NO: 20049 - protein, 1110 aa, Centruroides sculpturatus
MVVTRSKCDTGSNVARVNKVHIRGLGKNSRSKNRPQSPLATGGESSAGPSMATAMPSTDVRNQPSLGVSVAMHPQTTKAGKPRQRMKWTTEMNEFIIRTYYTITRLETNMTAYRQQLHHRFTQQYPHLTVTEQRVVDQKRTIIHNNLIPQTTLELIKQQVADQIHQQTETFNINEDHVTCQDNPATSTDYSTHTTSTTNDTAGTSPSITDNIDIELVNTLSLIFQETLTKYTGTDPTQRPRIPKINTSKVVGKTLNYVNTHLLPNYIHSISTLSDIHTLVYAGAVTVVTHHGLKIHSQTDTHKTQFYHKPAWQRRIETQINDIRQQLGRLTQYTKNNITPKLKKQLKNIFKKIKTHTKHEHHNTHITEYIDTLKQKLAAKARRLKRYKTCTLRKQQNKLFTNNEKLFYRQISTKTNTDTQHSGTPTEEELTTYWSSLWSNAVTHNADAGWIEEENRNLHNIPTMPCAEINIHDIRYAVNRTHNWKTPGVDNIHNFWYKKFTSLHQELAKHLTHIIINPQDMPKFLTQGITYMKPKNNKTTDPTQYRPITCLPTLYKLLTSCITNKIYKHVEEHDILTEQQKGCRRNHRGCKEQLLIDSVILRQAHKQHRNIHMAYIDYRKAFDSVPHSWLLHILHMYKIHPSLIAFFENTMQHWRTTLHLRVSNTSIQTNEIFIRRGIFQGDSLSPLWFCLALNPLSNMLNNTHYGYNIRHEKTTQFTLSHLMYMDDIKLYASTQKQLHQLLQITHSYTKDIQMEFGLDKCKKLHIEKGILKKKDFALGNGDIIKSMEEGEFYKYLGFQQAKLTEHTQIKQRVTLADSNNTPLNLHSQHTDMTQHIKSIDTIKQSWARKTLHGRHPYDLAQDFVDKTASNSWLDRGCLFGETKGFKIAIYDQVINTKNYRKYIFKDTTLTNDTYRKCHIMPETIQHITSGCKLLAQTDYLHRHNQVANIIHQELANKHKLVDIHEPYYKYIPQTVLENNTHKMYYDRAIITDKTIYHNRPNIKLIDKHNKITYIIDISIPNTHNTENTFTEKIRKYTEFAQEIRHLWGMDRVLIVPVILSCTGVIPHTLHKSLGTLKLSRNTYIKLQKATILNTCHIVRKSLNADTDMLI

SEQ ID NO: 20050 - protein, 1229 aa, Mesobuthus martensii
MLAGIPTLVVFFQFVMKQSRKRKHTGSDVARVNKVRVCELGRGSHSESLLQSPLATGGESSTNPSQATAIQIPIVGNGSPHQSPTSQSVSLETQPETTKAGKPRQRMKWTIDMNEFIMRTYYTITKLETNITGYRRELYDKFTSRYPNITVTEQRIADQRRTIIHRNLIPHSTLQSIKTQVAQQISQHETDSHTQIEHDVEQTPEITYINDNTQPINNTDTDLINKLTDTLQETLTKFIGTDPMQRPRIPKLHNSQQLNNTLHCMNTHILPKLINAETTLMELHTLIYAAAVTVTTHLGHKTLPNKIDTNTKHHLKPAWQKRLEKQINEIRTELGRLTQYTKNNTSPKLMKSIRKIFRKLKTHTCHENHNTHIKEYMDTLKQKLAAKSQRLKRYKTSLARKLDNTLFTNNEKTFYRNINNKDPKQTQNSEIPTQQSLTSFWSALWAVPVTHNQRASWITEEETRTLDVPEMPYTTITTEELTNTIRYTHNWKAPGVDGIQNFWYKHFTCFHDLLAKHLTNLIHEPKDTPSFLTHGITFMKPKSTNTGNPSQYRPITCLPTLYKILTSCITNKIYAHVKENNILTEQQKGCRRSHMGCKEQLIIDTTILKQVHRQRRHSHAAYIDYKKAFDSIPHSWLIQTLQIYKINTKYITFLQNIMQHWRTTLHITINNNHVATEPIHIRRGIFQGDSLSPLWFCLALNPLSNKLNTSNCGYDIRQNQTTHYIHSHLFYMDDIKLYASTQTQLQQLLQITHTFSKDIHMEFGLDKCKTLHIEKGVLKKGGFTLENGDTIESMEEGEVYKYLGFQHARLTEQKKTKQTLSKLYTNRLNNILKTHLNGKNTVKAINTFAIPILTYSFGVIQWTRTELESLQRKTRTTLTKHQYNHPKSAIERTTLPCKEGGRGLIDIPHLHDRQIYNLREFFHKKQHTSQLHKAIVLADRNMTPLNLQNNTPCQIDNTAHIHEKKTSWCKKELHGRHPHDLQKHFIDAKASNSWLVRGDLFTETEGFIIAIQDQVINTKNYRKYILKDSTLTNDTCRKCHIAPETIQHITSGCKLLAQTDYLHRHNQVANIIHQKLATKYKLINTLTPYYKYIPDTILENSTHKIYYDRTIITDKTIHHNRPDITLIDKQNKVTYIIDISIPNTHNIQDAFTQKISKYTELSQEIKRLWGMQKVLGLPIILSSTGVIPHTLHKSLGTLDLHPKTYITLQKASLLNTCNIVRKFLSNTDS

SEQ ID NO: 20051 - protein, 1229 aa, Mesobuthus martensii
MLAGIPTLVVFFQFVMKQSRKRKHTGSDVARVNKVRVCELGRGSHSESLLQSPLATGGKSSTNPSQATAIQIPIVGNGSPHQSPTSQSVSLETQPETTKAGKPRQRMKWTIDMNEFIMRTYYTITKLETDITGYRRELYDKFTSRYPNITVTEQRIADQRRTIIHRNLIPHSTLQRIKTQVAQQISQHETDSHTQIEHDVEQTPEITYINDNTQPINNTDTDLINKLTDTLQETLTKFTGTDPMQRPRIPKLHNSQQLNNTLHCMNTHILPKLINAETTLMELHTLIYAAAVTVTTHLGHKTLPNKIDTNTKHHLKPAWQKRLEKQINEIRTELGRLTQYTKNNTSPKLMKSIRKIFRKLKTHTRHENHNTHIKEYMDTLKQKLAAKSQRLKRYKTSLARKLDNTLFTNNEKTFYRNINNKDPKQTQNSEIPTQQSLTSFWSALWAVPVTHNQRASWITEEETHTLDVPEMPYTTITTEELTNTIRYTHNWKAPGVDGIQNFWYKHFTCFHDLLAKHLTNLIHEPKDTPSFLTHGITFMKPKSTNTGNPSQYRPITCLPTLYKILTSCITNKIYAHVEENNILTEQQKGCRRSHMGCKEQLIIDTTILKQVHRQRRHLHAAYIDYKKAFDSIPHSWLIQTLQIYKINTKYITFLQNIMQHWRTTLHITINNNHVATEPIHIRRGIFQGDSLSPLWFCLALNPLSNKLNTSNCGYDIRQNRTTHYIHSHLFYMDDIKLYASTQTQLQQLLQITHTFSKDIHMEFGLDKCKTLHIEKGVLKKGGFTLEHGDTIKSMEEGELYKYLGFQQARLTEQKKTKQTLSKLYTNRLNNILKTHLNGKNTVKAINTFAIPILTYSFGVIQWTRTELESLQRKTRTTLTKYQYHHPKSAIERTTLPRKEGGCGLIDIPHLHDRQIYNLREFFHKKQHTSQLHKAIVLADRNMTPLNLQNNTPCQIDNTAHIHEKKTSWCKKELHGRHPHDLQKHFIDAKASNSWLVRGDLFTETEGFIIAIQDQVINTKNYRKYILKDSTLTNDTCRKCHIAPETIQHITSGCKLLAQTDYLHRHNQVANIIHQKLATKHKLMNTLTPYYNYIPDTILENSTHKMYYDRTILTDKTIHHNRPDITLIDKQNKVTYIIDISIPDTHNIQDAFTQKISKYTELSQEIKRLWGMQKVIVPIILSSTGVIPHTLHKSLKTLDLHPKTYVTLQKASLLNTCNIVRKFLSTDTDS

SEQ ID NO: 20052 - protein, 1230 aa, Mesobuthus martensii
MLAGIPTLVVFFQFVMKQSRKRKHTGSDVARVNKVRICELGRGSHSESLLQSPLATGGESSTNPSQATAIQIPIVGNGSPHQSPTSQSVSLETQPETTKAGKPRQRMKWTIDMNEFIMRTYYTITKLETNITGYRRELYDKFTSRYPNITVTEQCIADQRRTIIHRNLIPHSTLQSIKTQVAQQISQHETDSHTQIEHDVEQTPEITYINDNTQPINNTDTDLINKLTDTLQETLTKFIGTDPMQRPRIPKLHNSQQLNNTLHCMNTHILPKLINAETTLMELHTLIYAAAVTVTTHLGHKTLPNKIDTNTKHHLKPAWQKRLEKQINEIRTELGRLTQYTKNNTSPKLMKSIRKIFRKLKTHTRHENHNTHIKEYMDTLKQKLAAKSQRLKRYKTSLARKLDNTLFTNNEKTFYRNINTKDPKQTQNSEIPTQQSLTSFWSALLAVPVTHNQRASWITEEETRTLDVPEMPYTTITTEELTNTIRYTHNWKAPGVDGIQNFWYKHFTCFHDLLAKHLTNLIHEPKDTPSFLTHGITFMKPKSTNTGNPSQYRPITCLPTLYKILTSCITNKIYAHVEENNILTEQQKGCRRSHMGCKEQLIIDTTILKQVHRQRRHLHAAYIDYKKAFDSIPHSWLIQTLQIYKINTKYITFLQNIMQHWRTTLHITINNNHVATEPIHIRRGIFQGDSLSPLWFCLALNPLSNKLNTSNCGYDIRQNRTTHYIHSHLFYMDDIKLYASTQTQLQQLLQITHTFSKDICMEFGLDKCKTIHIEKGVLKKGDFTLENGDTIESMEEGEVYKYLGFQQARLTEQKKTKQTLSKLYTNRLNNILKTHLNGKNTVKAINTFAIPILTYSFGVIQWTRTELESLQRKTRTTLTKYQYHHPKSAIERTTLPRKEGGRGLIDIPHLHDRQIYNLREFFHKKQHTSQLHKAIVLADRNMTPLNLQNNTPCQIDNTAHIHEKKTSWCKKELHGRHPHDLQKHFIDAKASNSWLVRGDLFTETEGFIIAIQDQVINTKNYRKYILKDSTLTNDTCRKCHIAPETIQHITSGCKLLAQTDYLHRHNQVANIIHQKLATKHKLMNTLTPYYNYIPDTILENSTHKMYYDRTILTDKTIHHNRPDITLIDKQNKVTYIIDISIPDTHNIQDAFTQKISKYTELSQEIKRLWGMQKVVIVPIILSSTGVIPHTLHKSLKTLDLHPKTYITLQKASLLNTCNIVRKFLNTDTDS

SEQ ID NO: 20053 - protein, 1086 aa, Agrilus planipennis
MTLFRGSHRSANHTPSSWVPPGNRLVWLRVWWLMGGVGCQPPPPTVVGPNKTIKPRRTPGPSGPGNQQPIPPSNHACTECPASFSTKTGLGVHMRAKHPTQLDAQQLRADVKARWTEEEVMMLAHKEAEILLLGEVRFINQELIKYFPNRTLDAIKKARQKQPYKDAVASFLKAPTPAPATTAPSSRHPPSLELPGPSKISATAPQQDGQVPRPSTSKNELTLHHSNDEKFIDYITTNLHLKGDSFYPTTLLDIVQKAKSLGKDATFIRLASYLKDIMPRPRPARQHTRAVTQREPPTRRMQRRLDYAKTQTNWRKHQGRCIKSILDGPADSTLPPRRVMEPFWRKTFESCSQASLVKQDLSQDLQDLWSPITLDEVKKNGLDLASSPGPDGVPVKFLRTIPPAILTTILNLILWCGRLPEAHRGSRTIFLAKKMDAKEPGDFRPISVPSVLCRQLHVIMAKRITTLFAFDERQRAFRPTDGCADNTTIVDMLLKYNKDKYSSLYLAILDVGKAFDSVSHQAIFQVLSDYGFPKDFILYMTNYYRESTTILTTSEWTSQPVIPKRGVRQGDPLSPLIFNIIIDRLLRSLPAHIGSKIGSAKVNALAFADDLLLTASTPNGLQNLLNTTNTYLKSVGLSLNAAKCKTISTKGQPKQRTNVLEARSFSVGESTIPCLKRGEEWEYLGVQFTSDGRTKFRAYEEVQSTLQRLTKAPLKPQQRLHALRTVLLPRLYHKCSLGRVLLGCLNKADRIVRAAVRKWLNLPHDTPNAFIHADVADGGLGIPSLRWTAPCLRRNRLLGLRLPSLEDITTANIFIANEIDVAELRLKYNGKTLKTLPAISSMWREKLYRSIDGAGLREAYRCPEAHRWIREPTLLLSGRDFINSIRLRINALPTRSRTARGRTLRDRACRAGCDGQETLNHVLQRCHRTHGPRIDRHNAIVKYVNRKLTAKGYTTILEPTIATPAGNRKPDIIGIMGIRTLVIDCQVVTDSIPLRDAHNTKVEKYNTPAVTDQLKQRPGCQEVYVSAVTLNWRGVWCKQSLENMYHHDVLKRTDAALVSTQTLIGGTAAFRRFNTSTSMMPRTGVG

SEQ ID NO: 20054 - protein, 851 aa, Trichuris muris
MPERRISKKPETNRTRKQRRFKELRHLYNKNRHRLAEVLLDDAQPKRNEIPLPQCTEHFREIFESTSPCDDEPVRMKRGSHSTSSAGDITFKMELKEIEKALQGLPRNTSPGADNISAAMLRSVPVPALTILFNLWLFYLDVPAKFKESRTILLPKRNPVKGPMDYRPITISSVIYRLYSKILNQRLLQCTVLNKLQKAFRKGIDGCGENTFTLKTALALARSEHREICMASLDVAKAFDSVSHHSISRALIRQHASPETILLVSRLLSGSVTRIEHFEGVSEAIELRRGVKQGDPLSPLLFSLVIDELLDDLEDTKAGFTLGHDVLLCSLVFADDILLMSDSKAGLQSQLLSCSKFFKARSLHVNVSKCSTLRLYRVPKKRSVNVDLIPRFYLDPHEPDTLLPCFSASGFMKYLGVEFNPFGRRRDHIANVNCMVDKVCNAEMKPQHKVEIIRTYLLRRLLFTLTLGNPMANSARTIDKIIRQAIKGILHLPSSTLSDDIFYIPEGQGGLGLLNLSETTDFCLLKLIKKLETSDDVVSQSCACTLSVLKLKTKLMQRLRISTLSNEELRAAKKRLMDARMVRFLATYQGSGFQEFSERRSNEWMSGEMMTGRSFICSIKARTNLVPTRLQTLRGRADLADQRVRCRRCGNISGAPESLAHISQTCMFTHGLITRRHDAVVDKIASIAIDAGYDSLREPILRCDGQTWKPDLVPYKGENSFIVDVAIPYESKEPLARRHHEKCRKYERLKATVCTLTKTKNCATGAIIIGARGAWCPRNDESLKLANINIKYRQKALLCLTVLERTNKIISWFMQVSEELQPRRTIAAGNINASQQSHSRRHQQPHVRPDL

SEQ ID NO: 20055 - protein, 1131 aa, Fopius arisanus
MTDRISNSRPRREVRSNVLPAQYSAPLSSQQHPTGRGKHLRDSEVIRQHPPSRRTLTDNFANPIVEGEMGDISISPFSEQPQSSNHLNSAEPPVPMHSPERSNITTEVKCPFCDRTFKNLRGLGVHRSSKHPEKKNELIVTDKFKARWNPEHLHMLAAAEAKAPSSVRFMNEYLVEHAGTRRTLESIKKQRQKSTYRELVQKLRREHQQNPQELDEISTDEQHIHPSPAELERHEADESTSANEATAAADAQWNDSCDATLKETLRVELQYLNGHGRTLNGANDLRMAVHNVLHHGNYEPQLLSWFNKQFTDLKNDPPSSKRTRKPQTHIPPLSKRKQRRLDYQQTQNMWRKNMSKAASKILDGDADNAPHPVLRTQESFWRPIFEEHQILAPHRLSQRPENRALIDVFKPITPKEVADSRPDAKSAAGPDKLKSNRWLKPVPDRAKAIVFNIILLAGRVPAIWRDSRTILIPKETGTMDPAKFRPISISSVVLRHLHKVLSSRLLNMPLLYERQRAFIRADGLADNVFVLSTVLSDARVNLKELHLAAIDVKKAFDTVSHASVNHVLREKGLPQKFVNYIMTMYSTATTVLEVDDQTSSPIHPGQGVKRSDPLFSIIFNMIIDAILTRIPGVYGYQLRGVNVNALAFADDLVPLASSKGGLQESLDGVVKHMSLHGLAPMPPKCLALSLVPSGKDKKMKTITTRSFRVSGCYIPQIGIFDTWKHLSVTFSHKGPVAPKLELEELLERVAKAPLKPQQRMKLLKTFLILRFLHVLVFGRSNYGALRRLDTLVRKYVRRWLFLPHDVPIGFIHAPLRDGGLGVLSFESKIPELLRRRLLGLSNSDFSVARQIRTHDWIISRLKWCDLGKITSLHWTRKLHSSVDGWELREASQSTLSNAWIDDPYVMIPAREYVQNIRTRINALPSRMRTTRGQDRRMHQPVMCRAGCGEEERTAHIIQRCARTHGGRILRHDAVCNTVAYAFRRKGFDVHQEELYRTREGARKPDIIAVNPMGANIIDVQIVSASRSLQESHYNKCQKYASNNQLLVSVSERFNVLAASVRVSSVTVSWRGIWSRHSEEFLRYLGVSKSSLKGVTTRVLQGSHMNFNRFNSMTTVTRHGLWPWRPRRNWLK

SEQ ID NO: 20056 - protein, 1134 aa, Diachasma alloeum
MSDNTSNSHPRREVGIDVLPAPAGAPLALTQRRSSGRGQHLRDIQVTSLMASTGGPLTENSNNQTENGVVGGISIPSVGEHLSLNNDTFICVDPMDEAPVTPNEVSISEFPCPYCDRSFSSLRGLGVHRSSKHPVENNDRIVTERTKMRWNPEHIRMLAHAEVNAPPGVRFMNEYLLGIAGTGRTLESIKSQRKRGTYKDLVRSFREQIRVDSIAESSETHSLPAPSGSVPGSATSRPDVAVHERHNSALQSSPGNIAVSSSNELMRRHLEEERMFLLRGGRSLKGSAMLSEAIQSVLVGGDPETSLMRWFYIQFPKLANEASRHRLKPLAPNVQQSKRKQRRNDYGETQELWKKNMSKAASKILDGDTDKAPHPDLRTQERFWRPIFEERKERFFPAPADFTSDPAFAKIWDTITTKEVVECRPDGKSAAGPDRLKSSEWLKEVPERVKAIIFNIILMSGRVPTAWRNSRTVLIPKEPETMDPAKFRPISIASIVLRHLHRILSSRLLDEPLLDERQRAFIRADGLADNVFVLASVIDDSRNSLKEVHLAAIDVKKAFDTVSHAAIEHVLLDKKLPRMFVDYVMNIYRTSTTVLEVDDETSTDIHLGQGVRQGDPLSSIIFNLVIDVILKRIPPTYGYNLKGMNVNALAFADDLVLIAGSKEGLQDVLEGVVRDMAEHGLEPMPKKCLALSLVPSGKDKQIKTVTTPTFRIMGSYIPQIGVLDTWKHLGVQFSHKGPIAARIDIRTYLEKISRAPLKPQQRMKLVKTFLIPRFLHVLVFGRSNHGALRRLDRDVRSYIRRWLFLPADVPVGFYHAPVIEGGLGVMSFASKVPELLRRRLNGLCFSDFTAARHCRDLGWVISRLRWCAFAKVNCTDWARKLHASVDGWELRECNQSTLSNSWVDDPYASIPSREYIQNIRTRINALPSRMRTSRGQARRQAVPTLCRAGCGEDETTAHIVQRCVRTHGGRILRHDAICNKVAELLSKKQFTVEQERVYRTREGARKPDIVAANELGACILDVQIVSGSQRLDSVHMNKCNKYANNPDLIASVSEKFNVLAASVRVSAVTISWRGVWCRESDVFLRSLGISKGAMKGLTTRVIQGSHINFNRFNSMTSVACHGRWPWRPRRDQHQ

SEQ ID NO: 20057 - protein, 1156 aa, Diachasma alloeum
MSDRSSNSCPRRRVGSDVLPAPLSAPVSSLHQQLSGRGQQLRDSEVNCQTASPRGTLTGNQLNQNVVGSSGSITILPYGEQTSRNNSNNTSRGRADTADHPGTNVDSLVLCPYCDRSFKSKRALGVHRASQHPVENNDQVSVDRVKQRWNQEHLRMLAQAEARAPASVKHINEYLLNHAGTGRTLESLKKQRQKPTYRALVQQFRSEDRSGDRSTETRHAESRDTNPSNLNGTQPVESQMSQESQASIRERNPQPPFIHPSTGPSRPTPQAGHEVGPQRTAIHDQLLSDREFLASEVRNLKGATELIRVVDDLTQNKDPVLGLERWFYVQFPELNESSTSRSSRRPNQAPHTTLSKKKQRREDYKRIQELWKKNMSKAASKVLDGDADNAPHPNLREQEAFWRPIFEERSSPSAPTQMSTEPEVILEDIWKPISTREVVECRPDGTSAAGPDGLKASRWLKEVPERVKAIVFNACMLAEEVPAIWRNSRTILIPKEPGTMDPSKFRPISIASIVLRHFHRILSSRLLTKPILDERQRAFIRADGLADNVFVLSTIIADARTNLKQLHLAAIDVKKAFDTVTHAAIERVMKQKGLPCEFIRYVMSIYRTGTTVLEVDRETSEAIQPGQGVRQGDPLSSIIFNMIIDVILSRLPSAVGFVLQGVSVNGLAFADDMVLLASSKEGLQESLDGVVKDMSEHGLAPMPKKCLALSLVPSGKDKKMKTITDRSFRIAGCYIPQIGVLGTWRHLGVVFSTKGPIAPNVDVETPLERVTKAPLKPQQRMKILKTFLLPRFLHALTFGRSNHGSLRRLDNTVRRYVRRWLFLPYDVPVAFFHAPVADGGLGVMSFASKIPELLKKRLLNLTYSDFSVARHVRTLEWTIRRLHWCDMAKVSGSDWARKLHTSCDGWELRESKHSSLSTSWIEDPYVLIPSREYIQNIRTKINALPSKMRTSRGIGRRDMVSTMCRAGCGEEETTAHIIQRCMRTHGGRVLRHDAVCKKVAALLSSKGYVVEREHRYTTIEGIRKPDIVAVGGAGAYILDVQIVSGARPLADAYSQKRDKYSRNNDLMRSVSARFNVLVASISVSSITISWRGVWCSESDMFLRSMGLSKSALKGLTTRVIQGSHMNFNRFNSMTTVASHGRWPWRPRPVRRYRDRR

SEQ ID NO: 20058 - protein, 1153 aa, Diploscapter coronatus
MPVRRTNPNTSTCWLPVPLDPPHKCQPCLPVPRSYIDHGGLSRHLRQQHDVNVGFECRNCGLQDELKKVNLHIKKTPACAAAANAFTTARAQAAAAAAAPAAPAPRAIRIRNANNPSAGRPAQAAPPASPSSSSSSSSSSSPSSGSSSSSSSPSRYATPQPTPQRPRRHATRPIAQPIQSSDSSSDSSSNNTTAPLTPPLAAATPIPLPVSVPTPPPIPSLFARPVHSPQSRMSAAQEEWTGRFNDTTTAAELEAVTDELIAAVQESLSSEERRAAAARQRTQRPPAPAPARQHTQQTTTEERTRIQRLWRTNRKRAFREVTGDSSPGCTIDKADVESHFKQIHAAGSSLNPTPTPFPDPPPLPTNRTPLQPPFTSDEVWERLRRSSDTAPGPDALRYSHWRRFDPHSHILAAAFNAVHRLSHAPSNWKTSTTVLLHKKGDKADIGNWRPIALASTMGKLYSACLARRLLTWSSAHQRLSPAQKGFISVPGCTEHNFTLQTVIADARRHRRNIAVAWLDLANAFGSLPHAALFDALEWTGLDRTAIGRIRELYTDTTTSVRTATGTTAPIPVEAGVLQGSPLSPILFNLAIEPMLRAAQKSSAGYSLYGHSVSVLAYADDVALIASDATDLQNALNDVAATADRTGLRFKPAKCASLHFARGKPKLTTFHVQGGRMPALEKFDAYTHLGVPTGLHLHKSAEDAIARMTAQLQQVDQSGLAEWQKADAVRTFLIPQLVFHLTNATVPKKPLVAFDKELCRCAKRWLHLPQRASTEPLYIPTSHGGLGLVKLQHLADACEVAHVNTLLASQDPVVHSIASQSSREVAEKKVQRAVTDDEMRDYYNGSTEGVFDTNSTDVASVWTRARMATRRLRNLTNVSWACTNGQLSLRIDDQTAAPGTTQHLLRRALWTHELQSLLEKPDQGRVFDASMLHSASNHFMAHGDFTRFCDWRFIHRARLNVLPLNGCRRHGDADRRCRRCGYDTETAAHVLGRCNAHSRAVTLRHNAIVARLLKAAHPSPGSAVYSDQKVPGTPGLLRPDIAIIDDAAKSCVIVDVVVTFDNRKEALLAARTDKLTKYEVLRQHFEKLGYRTTLDAYVVGALGSMDPLNRRAVAALNIRPIYNRLLQKLVVSDVIRWARDIHTEHVSGVRQFHV

SEQ ID NO: 20059 - protein, 1072 aa, Diploscapter coronatus
MSLCPSSLASRFFRELSPVLMYSNCLQQLARLPHDFSASTHAPITTSPSMPVRRTNPSASTHWLPVPLDPPHVCQPCLPVPRSYIDHGGLSRHLRQQHDVNVGFQCRNCGLQDELKKVNLHIKKTPACAAAANAFTTARAQAAAAAAAPAAPAPRAIRIRNANNPSAGRPAQAAPPASPSSSSSSSSSSSPSSGSSSSSSSSSRYATPQPTPQRPRRHTTRPIAQPIQSSDSSSDSSNNTTAPLTPPLAASTPIPLPVPAPAPPPIPSLFARPVHSSQSRMSAAQEEWTGRFNDTTTAAELEAATDELIAAVQESLSSEERRAAAARQRTQRPPAPAPTRQHTQQRTTEERTRIQRLWRTNRKRAFREVTGDSSPGCTIDKADVESHFKQIHAAGSSLNPTPTPTPTPFPDPPPLPTNRNPLQPPFTSDEVWERLRRSSDTAPGPDALRYSHWRRFDPHSHILAAAFNAVHRLSHAPSNWKTSTTVLLHKKGDKADIGNWRPIALASTMGKLYSACLARRLLTWSSAHQRLSPAQKGFISVPGCTEHNFTLQTVIADARRHRRNIAVAWLDLANAFGSLPHAALFDALEWTGLDQTAISRIRELYTGTTTSVRTATGTTAPIPVEAGVLQGSPLSPILFNLAIEPMLRAAQKSSAGYSLHGHSVSVLAYADDVALIASDATDLQNALNDVAATADRTGLRFKPAKCASLHFARGKPKLTTFHVQGGRMPALEKFDAYTHLGVPTGLHLHKSAEDAIARMTAQLKQVDQSGLAEWQKADAVRTFLIPQLVFHLTNATVPKKPLVAFDKELCRCAKRWLHLPQRASTEPLYIPTSHGGLGLVKLQHLADACEVAHVNTLLASQDPVVHSIASQSSREVAEKKVQRAVTDDEMRDYYNGSTEGVFDTNSTDVASVWTRARMATRRLRNLTNASWACTNGQLSLRIDDQTAAPGTTQHLLRRALWIHELQSLLEKPDQGRVFDASMLHSASNHFMAHGDFTRFCDWRFIHRARLNVLPLNGCRRHGDADRRCRRCGYDSETAAHVLGRCNAHSRAVTLRHNAIVARLLKAAHPSPG

SEQ ID NO: 20060 - protein, 1152 aa, Diploscapter coronatus
MPVRRTNPTAPTCWLPVPLDPPHACQPCLPIPRSYTDHGGLSRHLRQQHGINVGFECRNCGLKDELKKVNLHIRKTAACASAAATFTATRAQAAAAAPPPAPPTRAIRIRNAPRPAAQQPPTASAPSSPSSSSSSSASSNSRLTSPSSSSSSSSHYATPQPTPQRPRRRAIRQPSDSSSASSSASPTNTRAATPPPLAASTPVPAPVPAPVPVPVPVPTPPPIPSLLARPAHSSQSRMSAAQEEWTDRFDNNTSTAAELEAATDELIAAVQELLSSEERRAAAARQRTQRPPARQHTQSSTTEERTRIQRLWRTNRKRAFREVTGDSSPGCTIDKADVESHFKQIHAAGSSPNSTPIPDPLPVPTNRNPLQPPFTPDEVWERLRRSSDTAPGPDALRYSHWRRFDPHSHILAAAFNAVHRLSHAPSNWKTSTTVLLHKKGDKADIDNWRPISLASTMGKLYSACLARRLLTWSSAHQRLSPAQKGFISVPGCTEHNFTLQTVIADARRHRRNIAVAWLDLANAFGSLPHSALFDALEWTGLDRTAIGRIRELYTGATTSVRTATGTTAPIPVEAGVLQGSPLSPILFNLAIEPMLRAAQKSSAGYSLHGHSVSVLAYADDVALVASDATDLQNALNDVAATADRAGLRFKPAKCASLHFARGKPKLTALHVQGGRMPALEKFDAYTHLGVPTGLHLHNSAEDAIARMTAQLKQVDQSGLAEWQKADAVRTFLVPQLVFHLTNATVPKKPLVAFDKELCRCAKRWLHLPQRASTEPLYIPTSHGGLGLVKLQHLADACEVAHVNTLLASQDPVVLSIASQSSREVAEKKAQRPLTDDEACDYYNGSTEGVFDTNSTDVASVWTRARMATRRLRSLTNVSWTCTNGQLALKVGDQTAAPGTAQHLLRRALWIHELQSLLEKPDQGRVFDASMLHSASNHFMARGNFTRFCDWRFIHRARLNVLPLNGCRRHGDGDRRCRRCGYDTETAAHVLGRCNAHSRAVTLRHNAIVARLLKAAHTSPGSAVYSDQKVPGTPGTLRPDIAIIDDAEKTCVIVDVVVTYENRKDAMVAARMDKQRKYEPLKLHFEKLGYRTTVDAYVVGTLGSMDPLNRRAVAALSINATYNRLMQRLIVSDVIKWARDIHTEHVSGVRQYV

SEQ ID NO: 20061 - protein, 675 aa, Parapoynx stratiotata
MLSGNVSKDILDILYGANLCALKKKDGGIRPIAVGTTYRRLVAKTCCRAMSSSLSEYFQPKQLGFGSKGGCEAAVHALRTFLDNQCGEVVLKVDVKNAFNSVDRGAMLLQIKTKAPLLYSYLWQCYSSPSKLVYKNNLIFSAVGCQQGDPLGPAIFSLAIHPIIEKLNSKFNVWYLDDGTLGGDVLSVLDDLKLLIQDLHSIGLDLNFSKCELYIPESTANRDSIIACFNSLAPKITIVDKKTLHLLGSPILDDSLPDFVNERIQRFLAYSDRLLEIKTHMAYYIIRYCLFVPKFIYVLRCSHLWNFPDLLFNLDNCVRLVLSTVLNINLSDRSWSQASLPIRSGGLGIRKISSVSLPTFLSSVYSANDLICKILNPQINSFQISYLAEAKNAWLLACPNTDLPKNLFSQRQWDEPLCSLVRNELLDTSTSTADRARLLAVGEWESGLWLNVLPSTTIGTFLDSNSFRMASCLRIGAVCNVPHRCHCGIAVDALGHHGLSCPRSAGRISRHSEINSVIRRAIASAGAPSVLEPNGLARDDGKRPDGMTLVPWKMGRALVWDATCVDTLAASHVPVTSVRSGSAATSAESLKRRKYSSLCEDYIFEPFGVETLGPWGPSAHKLYKEISKRLCDKSGDKKAGLYFAQIISIAIQRGNSASLFGTFPASDIHADDFFL

SEQ ID NO: 20062 - protein, 956 aa, Eilema sororculum
MSNSFTTLTCPHCPGSVRTFSTHGLKIHIGRKHKNLRGCRVPAALTEPVLNGSIPVHRAPVTGRSLVSMDRLAHLRDSVPVLRHIPRGARNQAAGRMCDLIDGCVDSNGVGDWASLLSFAYGAFRVPSRDLPGNMTAKVKANIMSAEDMRVDEGTDVLRPKPGSWSLRKTIESKVHDGDVRGAVRLLVSDDTFAQRGPETLAVLKTKHPSPSRPLAFPPAPDLSAVAVTVTDDAVSQALASFYNGSAAGLDGLRPSHLKELTSRSAGENGPRLLSRLTRLINFMLGGRINPEVCPYLYGASLCALAKKDGGVRPIAVGSVFRRLAGKLACRAVRESVAGYLRPHQLGFGTGLGCEAAIHATRAFAMADENAECVIVKLDICNAFNTLERDALLREVCDLAPSVYPFLHQIYRWPSNVFYDQELILSQAGAQQGDPLEPLVFSLAIHSVIKELVSPLNVWYLDDGTIGGKPEDVQRDLVALVSRFEGLGLRVNTNKCEFFPCSAPASRHYPTFNSILPGLRELSRYTFHLLGSPIFPDALPEVINKRKNLLQDAQGRLEGLSAHVALTLLRMCFALPKLTYLLRTTPTWMCAAEISSFDNTLRSLVESVLNVSFTEPQWDLASQPIRFGGLGIRRAQDVGIPAFLASSHGVAGLVAVILHSDSVGLNIPFASEAWESWSTLSNGARIPATPHIQKSWDEVGIKLAHERRLGGATGVDRARLLAVSQPESGAWLQALPSPHLGTLLDDDSLRVAVALRLGCRVCEPHKCTCGSVVEADGHHALSCRRAAGRFPRHHALNDLLRRALVSADVPCALEPPGLSRSDGKRPDGLTLVPWKRGRCLVWDATCVSTVAASHLGRTALSPAAAAEDAATKKRAKYMALEPQYIVVPVAFETMGSWGIEAKKLVADIGQRLREKTGDSRSGSYLVQRLAIAIQRGNAASVLGSFAPDTTRGGLFT

SEQ ID NO: 20063 - protein, 957 aa, Eilema sororculum
MSNSFTTLTCPHCPGSVRTFSTHGLKIHIGRKHKNLRGCQVPAAQTEPVLNGSIPVHRAPVTGRSLVSMDRLAHLRDSVPVLRHIPRGARSQAAGRMCDLIDGCVDSNGVGDWASLLSFAYGAFRVPSRDLPGNVTAKVKANIMSAEDMRVDEGTDVLRPKPGSWSLRKTIESKVHDGDVRGAVRLLVSDDTFAQRGPETLAVLKTKHPSPSRPLAFPPAPDLSAVAVTVTDDAVSQALASFYNGSAAGLDGLRPSHLKELTSRSAGENGPRLLSRLTRLLNFMLGGRINPEVCPYLYGASLCALAKKDGGVRPIAVGSVFRRLAGKLACRAVRESVAGYLRPHQLGFGTGLGCEAAIHATRAFAMADENAECVIVKLDICNAFNTLERDALLREVCDLAIPSVYPFLHQIYRWPSNVFYDQELILSQAGAQQGDPLGPLVFGLAIHSVIKELESPLNVWYLDDGTIGGKPEDVQRDLVALVSRFEGLGLRVNTSKCEFFPCSAPASRHYPTFNSILPGLRELSRYTFHLLGSPIFPDALPEVINKRKNLLQDAQGRLEGLSAHVALTLLRMCFALPKLTYLLRTTPTWMCAAEISSFDNTLRSLVESVLNVSFTEPQWDLASQPIRFGGLGIRRAQDVGIPAFLASSHGVAGLVTVILHSDSVGLNIPFASEAWESWSTLSNGARIPATPHIQKSWDEVGIKLAHERRLGGATGVDRARLLTVSQPESGAWLQALPSPHLGTLLDDDSLGVAVALRLGCRVCEPHKCTCGSVVEADGHHALSCRRAAGRFPRHHALNDLLRRALVSADVPCALEPPGLSRSDGKRPDGLTLVPWKRGRCLVWDATCVSTVAASHLGRTALSPAAAAEDAATKKRAKYMALEPQYIVVPVAFETMGSWGIEAKKLVADIGQRLREKTGDSRSGSYLVQRLAIAIQRGNAASVLGSFAPDTTRGGLFT

SEQ ID NO: 20064 - protein, 950 aa, Eilema sororculum
MSNSFTTLTCPHCPGSVRTFSTHGLKIHIGRKHKNLRGCQVPAAQTEPVLNGSIPVHRAPVTGRSLVSMDRLAHLRDSVPVLRHIPRGARNQAAGRMCDLIDGCVDSNGVGDWASLLSFAYGAFRVPSRDLPGNMTAKVKANIMSAEDMRVDEGTDVLRPKPGSWSLRKTIESKVHDGDVRGAVRLLVSDDTFAQRGPETLAVLKTKHPSPSRPLAFPPAPDLSAVAVTVTDDAVSQALASFYNGSAAGLDGLRPSHLKELTSRSAGENGPRLLSRLTRLINFMLGGRINPEVCPYLYGASLCALAKKDGGVRPIAVGRVFRRLAGKLACRAVRESVAGYLRPHQLGFGTGLGCEAAIHATRAFAMADENAECVIVKLDICNAFNTLERDALLREVCDLAPSVYPFLHQIYRWPSNVFYDQELILSQAGAQQGDPLGPLVFSLAIHSAIKELVSPLNVWYLDDGTIGGKPEDVQRDLVALVSRFEGLGLRVNTSKCEFFPCSAPASRHYPTFNSILPGLRELSRYTFHLLGSPIFPDALPEVINKRKNLLQDAQGRLEGLSAHVALTLLRMCFALPKLTYLLRTTPTWMCAAEISSFDNTLRSLVESVLNVSFTEPQWDLASQPIRFGGLGIRRAQDVGIPAFLASSHGVAGLVAVILHSDSVGLNIPFASEAWESWSTLSNGARIPATPHIQKSWDEVGIKLAHERRLGGATGVDRARLLAVSQPESGAWLQALPSPHLGTLLDDDSLRVAVALRLGCRVCEPHKCTCGSVVEADGHHALSCRRAAGRFPRHHALNDLLRRALVSADVPCALEPAGLSRSDGKRPDGLTLVPWKRGRCLVWDATCVSTVAASHLGRTALSPAATKKRAKYMALEPQYIVVPVAFETMGSWGIEAKKLVADIGQRLREKSGDSRSGSYLVQRLAIAIQRGNAASVLGSFAPDTTRGGLFT

SEQ ID NO: 20065 - protein, 1440 aa, Agriopis aurantiaria
MTMKPITNPQVPGGSMRNHDDGKWVPQGARGVKNLRARVFNHQTTQATQMDSEKANEEYPSLTHSRNTRYSLRSNTKNITTFSRTTSTTSTLSNEVLGEQTVAPTSPASSDSLFDSPPSSPNPLEKWSSIHSTPTTSLAGSEDVVQEAAAINTVPTSGCTRARKKWTTSMNEFIWRTYLTITHNETKTRSYLDQLHRNFIEKFPDMDVSRQRIGDQRRAILRNKLLPETTLQNIKREVEISLNQKTLANELNTITSQQLDNQHQPTTASSYTRLRWTDDVNEAIIKSYYKITLLEQNKTAYRKQLHSVIINQFPEISHVSEQRVADQRRAIVHNKLITDQRLCEIREEARCELLITDDLPTSITADSAYDNTENLRSDDITLTTHNITDRLTEQNVNHTQTIHENTDTPQYTDTQINTNINKTFQSTLEKFTHTNPTTRPFIPRQNTSKKLSYIVNYLNTDILPAYLTRESDFITTQTVLYAAAYTTAICNGTKIKEPPPTTQTQQHTTQTQQHTTQTQHYTNTQIRKPTVPAWQRRIQTKIDNYRRDISRLTHYIAGIRSRNLIEHVDYIKSKYKTHAKHEEPNLTNEQFLDSLKQKLNATSSRLRRYTNCTLRKQQNYQFNTNEKSFYRNINTQTQDTTSTVNTDLPTPDSMHMFWSNIWSNEVHHNQNAEWITTDLQSNNYSEMQYELIPVNIFKEVINKTHNWKSPGTDNIQNYWYKKFTCAHPLLHNHINQFIESPETMPSYITQGITYMLPKNQDRHNPANYRPITCLQTIYKIMTACLTQLINKHITNNNILAEEQKGCRKNSQGCKEQLIIDAVAMQQALKNKQDLMTMYIDYRKAFDSVPHSWLIQILHHYKIHPLLITFLENAMKHWTTRLTVKNGNESIVTDVINIRRGIFQGDAFSPLWFCLALNPLSSMLNKSGSGLDMRHNNNSHILSHLMYMDDIKLYSNNVQSLHHLADVTQTFSNDIKMQFGIDKCKTYSIQEHSVTSQPYTLNTGDQIDPIESNSFYKYLGFDQNHQIPQNKTKSDIKRIFRHRLNTILKSQLNGRNLVKAINTYAIPVLTYTFGIINWSQTDLMKLQRTINTSMTTHRKHHPRSCVQRLTLPREQGGRGIIDITNLHNKQITSLRKFFLEQADNSSLHNSIVLSDKRFTPLNLSNRNIQKNERITDPKEKMAAWERKSLHGRHYHDLQQPHVDKEASNAWLRSGELFPETEAFMMAIQDQVIDTRNYQKYIIRRPNTNDTCRRCSSSSETIQHITGACKAIVQTDYKHRHDQVAASIHQHLAYKYKLVTEKIAYYKYKPESVLENRNYKLYWDRTIITDKTIHYNRPDITVLDKIKKTAFLIDIAICNTHNLQTTYTEKIAKYTDLSIEIKTQWQVNSTRTIPIILSTTGVIPKSLITSLETLDIHTPAYKQLQKAAILNTCRIVRKFLTL

SEQ ID NO: 20066 - protein, 889 aa, Ectropis grisescens
MTQYIVGIRSRNLIEQVEIIKAKYSTHSRHEEPNLTNEQFLDSLKQKLSATSSRLRRYCNCTLRKKQNNQFHTNEKSFYRNITTQTNNTNSNSNIELPPADAMHEFWSNIWSKEVQHNKNADWIKADLQNTNYTDMHFEIIPVDVFKDIINKTHNWKTPGTDNIQNYWYKKFTSTHPILHKYINQFIETPSTMPFYITRGITYMLPKNQDTTNPANYRPITCLQTIYKIITSCISYLVNEHITKNNILAEEQKGCRKNSKGCKEQFIIDAIAMKQTLKNKQNLMTMYIDYRKAYDSVPHSWLIYILHHYKIHPLLVSFLENAMKHWTTRLTIKNENQSIVTDMITIRRGIFQGDAFSSLWFCLALNPLSKILNLSTSGLNIPYNNSSHTLSHLLYMDDIKLYSNTLTSLHNLANITQTFSQDIKMEFGVDKCKTYSIENQSVTTHSYTLNTGDKIDPLDVETFYKYLGFQQNHQIPHNKTKNDVKSKFKQRLNTILKSQLNGKNLVKAINTFVIPVLTYTFGIINWSQTDLVKLQRTINTSLTAHRKHHPRSCVQRLTLPREQGGRGIIDITNLHNTQISTLRNFFLKRSQQSSLHKAITECDIHVTLLNLSNPNIQKNEKIIDPKEKLAAWQLKSLHGRHFHDLQQPHVDKEASNAWLRSGEIFPETEAFMLAIQDQVIDTRNYQKYIIRRTGTNDTCRRCSSSSETIQHITGACRAIVQTDYKHRHDQVAAAIHQILAYKYKLIAEKTPYYKYKPEPVLENQHYKLYWDRTIITDKTIHYNRPDITILNKDNKTVFLIDIAICNTHNLQTTYTEKIAKYTDLSIEIKTQWRINSTKTIPIIISTTGVIPKHLIESLETLDIHTSSYKILQKAVILNTCRIVRKFLNL

SEQ ID NO: 20067 - protein, 1247 aa, Erannis defoliaria
MNEFIWRTYLIVTENETKTRGYLDPLYQQFSREFPEMDVSKQRIGDQRRAIIRSKLIPNSILDRIKQDVKNQLACQTIQKETIVQSENTQDTNQSTQQTRMKWTDDINEAIIREYYKITQLERNKSAYRKQLHTQIINIFPHIAHVSEQRIADQRRVIINNKLLTDDKLKNIRQDVEQGLITQNDGTDTQTNSTQTTVNTQYHIDTTQLTTHNTQDLTHNEHGTSNRISAPLDTDEILNLKIKDAFITSYKKYTNSGLTTRPYIPKQNTSKKLSYIVNYLNEEVLPSYLLPNTDFNTTQTIIYSAAYTTAICNGTKIKEPFDSPHHRTSSNQIQPWQKRLKIKLENIRKDIGRMTQYISGIRSRNLVSHIERIKEKYKTHSRYEEPNLTDEQFLDSLKQKLSAITSRFRRYNNCTLRKKQNSQFCSNEKRFYRHLNTEIHDTTNNTDAPLPTPESMHTFWSSIWGNQVQHNENAEWIKDDLHHNENYSEMQFEYIPVDIFKEVIKNTHNWKSPGTDNIHNYWYKKFTSAHPLLHTHINQFIEKPDTMPKYITQGITYMIPKDNDQLNPAKYRPITCLQTIYKIITSCITHLLNSHITQNYILAEEQKGCRKHSQGCKEQLIIDAVAMKQALSKKQDLNTMYIDYRKAYDSVPHSWLLYVLKHYKVHPLIITFLENTMKHWRTRLLVKNRTGSVQTEEIFIKRGIFQGDGLSPLWFCLALNPLSRMLNKLNGLHINISNNENYKLTHLMYMDDIKLYSNNTESLHRLADTTQIFSNDIHMQFGIDKCKTYSIQNQSVELEPYALDSGDVIEPIDQDSFYKYLGFQQNHQISHKDTKATVKKKFRHRLNLLLKSQLNGRNLVQSINTFAIPVLTYTFGIINWSQTDLTNLQRTINTTMTTHRKHHPRSCIQRLTTPRKEGGRGLIDITNLHNKQITSLRNYFFKQAERSLLHQAVSVNDKKYTPLNLSKSNTQRNRNEHITQNKDKFAAWERKSLHGRHYHDLQQPHVDKTASNAWVEQGELFPETEAFMLAIQDQVIDTHNYQKFIIKTPNISDTCRRCCSSSETIQHITGACKAIVQTDYKHRHDQVAAIIHQLLAYKYKLITEKIPYYKYKPESVLENNDYRLYWDRTIITDKTVHYNRPDITVLDKANKSAFLVDIAICNTHNLQSTHTEKIAKYIDLSIEIKTQWQLANTRTIPIVLSTTGVIPKTLATSLETLDIQPATFKTLQKAVILNTCRIVRKFLSLSN

SEQ ID NO: 20068 - protein, 1416 aa, Agriopis aurantiaria
MNMKPITHPQVPGGSRGDLNDGKQLPPGTRGVKNLRARIFNHQTTQASQTDYEYENETQSDRQMNKRYNLRSNIGSRQTSTKKNSPSSKSTISTQHTQDVEIEDQVRVLASPTSTESLFNSPESSVHSFATQCRAPSTSNSSMSEDVVQEACATNPVPITGNNRARKKWTNEMNEFIWRTYLIVTENETKIRGYLDPLYKFFTQKFPEMDVSKQRIGDQRRAIVRSNLLPSNIRDDIKKEITNQLACSRIANQNGPTINLSNTQDTTTATQQNRMRWTDDINEAIIREYYKVTQFERNKSAYRKQLHTRIINMFPDISHVSEQRIADQRRVITHNKLITDDKLQEIRLEVERELGTKDSAEDLNRDNTQHSDHTQEPMTLLTLATTQDLPHNEHDTGHNVTTLQNSDETLNDKIKNVFTTAYEKYTNSDPTMRPHIPKQNTSKKLAYIVNYLNTEILPNYLQPEINFKNTHTIIYSAAYTAAICNGTKIREVIDSRPQNQTNKIHPWQKRLQTKIENLRKNIGRMTQYIAGMRSRNLISHIDRIKEKYKTHSRYDEPNLTDKQFLDSLKQKLSATSSRFRRYNNCTLRKNQNAQFNTNEKRFYRNLNTQTQDTSTSTDTPLPTPESMHTFWSNIWGNQIEHNQSAEWIKDDLLHTENYTEMQFEYIPVDVFKEVIKNTHNWKSPGTDKIHNYWYKKFTSAHPLLHTHLNQFIESPDSMPEFITQGITYMIPKDNDQLNPAKYRPITCLQTIYKIITSCIAHLLNNHITQNNILAEEQKGCRKHSQGCKEQLIIDSVAMKQAVSKKQDLNTMYIDYRKAYDSVPHSWLVYVLKHYKVHPVVTQFLENTMKHWSTKLLVKNRTGSVLTEEILIKCGIFQGDALSPLWFCIALNPLSRILNSSNEGLYINTNNDDNYRLTHLMYMDDIKLYSNNIQSLHHLADITQTFSNDIQMQFGIDKCKTFSIQNQSVALEPYTLNSGEVVEPIDQDSFYKYLGFQQTHQISHKHTKNTIKKKFKHRINALLKSQLNGRNLVQAINTYAIPVLTYTFGIINWSQTDLTNLQRTINTTMTTHRKHHPRSCIQRLTLPRKEGGRGLIDITNLHNKQITTLRDFFFKRAQLSLLHQAIVMTDKRYTPLNLSKSNTQRNEHITQHKDKLAAWKQKSLHGRHYHDLQQPHVDKTASNAWLQRGELFPETEAFMLAIQDQVIDTRNYQKYIIKTPNISDTCRRCCSNSETIQHITGACKAIVQTDYKHRHDQVAATIHQLLAYKYGLINEMIPYYKYKPELVLENNNYRLYWDRTIITDKTVHYNRPDITVLDKSNKTVFLIDIAICNTHNLQNTYTEKIAKYTDLSIEIKTQWQVTSTRTIPIILSTTGVIPKTLATSLETLNIQESTFKLLQKAVILNTCRIVRKFLTLS

SEQ ID NO: 20069 - protein, 1415 aa, Biston betularia
MNKKPIIQPQVPGGSGGNHDDGKRLPHEPWGVKNLRAAAPLNHQTTQASQSDFDKANERQPNVEQNRRYNLRSHTKMGQTPIRRPSINFSNSTQDAQDIELESRTSGLASPTSSESLFDSPASSPYPFAAQFRTRSSSNSTMSEDVVQEAPAAKSEPASDNNRARKKWTSEMNEFIWRTYLIVTENETKTRGYLDPLYQQFSQQYPEMDVSKQRVGDQRRAIIRSKLLPDSIRYSIKQDVTDQLARKSDQNDSVIYPNNTQNNIQSSQQSRMKWTDDINEAIIREYYKITQLERNKSAYRKQLHTQIINIFPHIAHVSEQRIADQKRVILHNKLLTDDKLKQIRQDVEKELMTLNDGTHTSRNNTQTNEDSREHTTPLTTLNTQDITHNEHVTNNYAVSISQTTDETLNDKIKSTFITAYDTYKDSDPTARPYIPKQNTSKKLSYIVNHLNTEILPNYFLPDSDFIITQAIIYAAAYTAAICNGSKIKEITDTPQHQTNTNQMRPWQKRLTTKVEKIRKDIGRMTQYIAGIRSKNLITHIDRIKEKYKTHSRYEEPNLNNEQFLDSLKQKLSSTTSRLRRYNNCTLRKTQNSQFNSNEKRFYRNLNMQTQNTFSNTDTPLPTPESMHGFWSNIWSNQVLHNENAEWIKEDSLLSENYSEMQFECISVSIFKEVIKNTHNWKSPGTDNIHNYWYKKFTSAHPLLHTHINQFIEKPDTMPKYITQGITYMIPKDDDQLNPAKYRPITCLQTIYKITTSCITQLLNNHITQNNILAEEQKGCRKHSQGCKEQLIIDSVAMKQALSNKQDLNMMYIDYKKAYDSVPHSWLLYILKHYKIHPLIIAFLENTMKQWTTRLLVRNRTGSVKTEEISIRRGIFQGDGLSPVWFCLALNPLSKMLNKHKEGLHIKTSNNESCKLTHLMYMDDIKLYSNNTESLHRLADTTQTFSNDIHMQFGIDKCKTFSIQNQSVKLEPYILNSGEVIEPMDQDSFYKYLGFQQTHQISQKDTKISVKKKFRHRLNLLLKSQLNGRNLVQAINTYAIPVLTYTFGIINWSQTDLANLQRIINTSMTLHRKHHPRSCTQRLTLPRKEGGRGLIDIINLHNKQITNLRQFFFFEAQRSPLHLAIVTTDKKYTPLNLSKSNTQRNEHITQHEEKLAAWERKSLHGRHYHDLQQPYVDKEASNAWLQQGEVFPETEAFMLAIQDQVIDTRNYQKYIIKTPNISDTCRRCCSCSETIQHITGACKAIVQTDYKHRHDQVAAIIHQLLAYKYKLITEKTPYYKYKPEPVLENRNYRLYWDRTIITDKTVHYNRPDITVLDKVNKSTFLIDVAICNTHNLQSTHTEKIAKYTDLSIEIKTQWQVTTTRTIPIVLSTTGVIPETLGASLEALNIQKATFKALQKAVILNTCRIVRKFLSLS

SEQ ID NO: 20070 - protein, 1415 aa, Biston betularia
MNKKPIIQPQVPGGSGGNHDDGKRLPHEPWGVKNLRAAAPLNHQTTQASQSDFDKANERQPNVEQNRRYNLRSHTKMGQTPIRRPSINFSNSTQDAQDIELESRTSGLASPTSSESLFDSPASSPYPFAAQFRTRSSSNSTMSEDVVQEAPAAKSVPASDNNRARKKWTSEMNEFIWRTYLIVTENETKTRGYLDPLYQQFSQQYPEMDVSKQRVGDQRRAIIRSKLLPDSIRYSIKQDVTDQLARKSDQNDSVIYPNNTQNNIQSSQQSRMKWTDDINEAIIREYYKITQLERNKSAYRKQLHTQIINIFPHIAHVSEQRIADQKRVILHNKLLTDDKLKQIRQDVEKELMTLNDGTHTSRNNTQTNEDSREHTTPLTTLNTQDITHNEHVTNNYSVSISQSTDETLNDKIKSTFITAYDTYKDSDPTARPYIPKQNTSKKLSYIVNHLNTEILPNYFLPDSDFIITQAIIYAAAYTAAICNGSKIKEITDTPQHQTNTNQMRPWQKRLTTKVEKIRKDIGRMTQYIAGIRSKNLITHIDRIKEKYKTHSRYEEPNLNNEQFLDSLKQKLSSTTSRLRRYNNCTLRKTQNSQFNSNEKRFYRNLNMQTQNTFSNTDTPLPTPESMHGFWSNIWSNQVLHNKNAEWIKEDSLLSENYSEMQFECISVSIFKEVIKNTHNWKSPGTDNIHNYWYKKFTSAHPLLHTHINQFIEKPDTMPKYITQGITYMIPKDDDQLNPAKYRPITCLQTIYKITTSCITQLLNNHITQNNILAEEQKGCRKHSQGCKEQLIIDSVAMKQALSNKQDLNMMYIDYKKAYDSVPHSWLLYILKHYKIHPLIIAFLENTMKQWTTRLLVRNRTGSVKTEEISIRRGIFQGDGLSPVWFCLALNPLSKMLNKHKEGLHIKTSNNESCKLTHLMYMDDIKLYSNNTESLHRLADTTQTFSNDIHMQFGIDKCKTFSIQNQSVKLEPYILDSGEVIEPMDQDSFYKYLGFQQTHQISQKDTKISVKKKFRHRLNLLLKSQLNGRNLVQAINTYAIPVLTYTFGIINWSQTDLANLQRIINTSMTLHRKHHPRSCTQRLTLPRKEGGRGLIDIINLHNKQITNLRQFFFFEAQRSPLHLAIVTTDKKYTPLNLSKSNTQRNEHITQHEEKLAAWERKSLHGRHYHDLQQPYVDKEASNAWLQQGEVFPETEAFMLAIQDQVIDTRNYQKYIIKTPNISDTCRRCCSCSETIQHITGACKAIVQTDYKHRHDQVAAIIHQLLAYKYKLITEKTPYYKYKPEPVLENRNYRLYWDRTIITDKTVHYNRPDITVLDKVNKSTFLIDVAICNTHNLQSTHTEKIAKYTDLSIEIKTQWQVTTTRTIPIVLSTTGVIPETLGASLEALNIQKATFKALQKAVILNTCRIVRKFLSLS

SEQ ID NO: 20071 - protein, 1064 aa, Biston betularia
MTLNDGTHTSRNNTQTNEDSREHTTPLTTLNTQDITHNEHVTNNYSVSISQSTDETLNDKIKSTFITAYDTYKDSDPTARPYIPKQNTSKKLSYIVNHLNTEILPNYFLPDSDFIITQAVIYAAAYTAAICNGSKIKEITDTLQHQTNTNQMRPWQKRLTTKVEKIRKDIGRMTQYIAGIRSKNLITHIDRIKEKYKTHSRYEEPNLNNEQFLDSLKQKLSSTTSRLRRYNNCTLRKTQNSQFNSNEKRFYRNLNMQTQNTFSNTDTPLPTPESMHGFWSNIWSNQVLHNENAEWIKEDSLLSENYSEMQFECISVSTFKEVIKNTHNWKSPGTDNIHNYWYKKFTSAHPLLHTHINQFIEKPDTMPKYITQGITYMIPKDDDQLNPAKYRPITCLQTIYKITTSCITQLLNNHITQNNILAEEQKGCRKHSQGCKEQLIIDIVAMKQALSNKQDLNMMYIDYKKAYDSVPHSWLLYILKHYKIHPLIIAFLENTMKQWTTRLLVRNRTGSVKTDEISIRRGIFQGDGLSPVWFCLALNPLSKMLNKHKEGLHIKTSNNESCKLTHLMYMDDIKLYSNNTESLHRLADTTQTFSNDIHMQFGIDKCKTFSIQNQSVKLEPYILDSGEVIEPMDQDSFYKYLGFQQTHQISQKDTKISVKKKFRHRLNLLLKSQLNGRNLVQAINTYAIPVLTYTFGIINWSQTDLANLQRIINTSMTLHRKHHPRSCTQRLTLPRKEGGRGLIDIINLHNKQITNLRQFFFFQAQRSPLHLAIVTTDKKYTPLNLSKSNTQRNEHITQHEEKLAAWERKSLHGRHYHDLQQPYVDKEASNAWLQQGEVFPETEAFMLAIQDQVIDTRNYQKYIIKTPNISDTCRRCCSSSETIQHITGACKAIVQTDYKHRHDQVAAIIHQLLAYKYKLITEKTPYYKYKPEPVLENRNYRLYWDRTIITDKTVHYNRPDITVLDKVNKSTFLIDVAICNTHNLQSTHTEKIAKYTDLSIEIKTQWQVTTTRTIPIVLSTTGVIPETLGASLEALNIQKATFKALQKAVILNTCRIVRKFLSLS

SEQ ID NO: 20072 - protein, 1417 aa, Erannis defoliaria
MNMKPIAHPQVPGGSGRNHDDGKWRLNEPWGVKNLRAAAPLNHQTTQASQSDYDSVNDRQPNMKQNKRYNLRSNVNIGQTSIRRASTSSKTTTSAQNTMDMEPECRTSERASPASSESLFDSPESSPYPFTARARTFSSSSSILSEDVVQEASAITSVPTSVNNRARKKWTSEMNEFIWRIYLIVTENETKTRGYLDPLYQQFSREFPEMDVSKQRIGDQRRAIIRSKLIPNSILDRIKQDVKNQLACQTIQKETIVQSENTQDTNQSTQQTRMKWTDDINEAIIREYYKITKLERNKSAYRKQLHTQIINIFPHIAHVSEQRIADQRRVIINNKLLTDDKLKNIRQDVEQGLITQNDGTDTQTNSTQTTVNTQYHIDTTQLTTHNTQDLTHNEHGTRYRISAPLDTDEILNLKIKDAFITSYKKYTNSDPTTRPYIPKQNTSKKLSYIVNYLNEEVLPSYLLPNTDFNTTQTIIYSAAYTTAICNGTKIKEPFESPHHRTSSNQIQPWQKRLKIKLENIRKDIGRMTQYISGIRSRNLVSHIERIKEKYKTHSRYEEPNLTDEQFLDSLKQKLSAITSRFRRYNNCTLRKKQNSQFCSNEKRFYRHLNTEIHDTTNSTDAPLPTPESMHTFWSSIWGNQVQHNENAEWIKDDLHHNENYSEMQFEYIPVDIFKEVIKNTHNWKSPGTDNIHNYWYKKFTSAHPLLHTHINQFIEKPDTMPKYITQGITYMIPKDNDQLNPAKYRPITCLQTIYKIITSCITHLLNSHITQNDILAEEQKGCRKHSQGCKEQLIIDAVAMKHALSKKQDLNTMYIDYRKAYDSVPHSWLLYVLKHYKVNPLIITFLENTMKHWRTRLLVKNRTGSVQTEEIFIKRGIFQGDGLSPLWFCLALNPLSRMLNKLNGLHINISNNENYKLTHLMYMDDIKLYSNNTESLHRLADTTQIFSNDIHMQFGIDKCKTYSIQNQSVELEPYALDSGDVIEPIDQDSFYKYLGFQQNHQISHKDTKATVKKKFRHRLNLLLKSQLNGRNLVQSINTFAIPVLTYTFGIINWSQTDLTNLQRTINTTMTTHRKHHPRSCIQRLTTPRKEGGRGLIDITNLHNKQITSLRNYFFKQAERSLLHQAVSVNDKKYTPLNLSKSNTQRNEHITQNKDKFAAWERKSLHGRHYHDLQQPHVDKTASNAWLEQGELFPETEAFMLAIQDQVIDTHNYQKFIIKTLNISDTCRRCCSSSETIQHITGACKAIVQTDYKHRHDQVAAIIHQLLAYKYKLITEKIPYYKYKPESVLENNDYRLYWDRTIITDKTVHYNRPDITVLDKANKSAFLVDIAICNTHNLQSTHTEKIAKYIDLSIEIKTQWQLANTRTIPIVLSTTGVIPKTLATSLETLDIQPATFKTLQKAVILNTCRIVRKFLSLS

SEQ ID NO: 20073 - protein, 1417 aa, Erannis defoliaria
MNMKPIAHPQVPGGSGRNHDDGKWRLNEPWGVKNLRAAAPLNHQTTQASQSDYDSVNDRQPNMKQNKRYNLRSNVNIGQTSIRRASTSSKTTTSAQNTMDMEPECRTSERASPASSESLFDSPESSPYPFTARARTFSSSSSILSEDVVQEASAITSVPTSVNNRARKKWTSEMNEFIWRIYLIVTENETKTRGYLDPLYQQFSREFPEMDVSKQRIGDQRRAIIRSKLIPNSILDRIKQDVKNQLACQTIQKETIVQSENTQDTNQSTQQTRMKWTDDINEAIIREYYKITQLERNKSAYRKQLHTQIINIFPHIAHVSEQRIADQRRVIINNKLLTDDKLKNIRQDVEQGLITQNDGTDTQTNSTQTTVNTQYHIDTTQLTTHNTQDLTHNEHGTRYRISAPLDTDEILNLKIKDAFITSYKKYTNSDPTTRPYIPKQNTSKKLSYIVNYLNEEVLPSYLLPNTDFNTTQTIIYSAAYTTAICNGTKIKEPFESPHHRTSSNQIQPWQKRLKIKLENIRKDIGRMTQYISGIRSRNLVSHIERIKEKYKTHSRYEEPNLTDEQFLDSLKQKLSAITSRFRRYNNCTLRKKQNSQFCSNEKRFYRHLNTEIHDTTNSTDAPLPTPESMHTFWSSIWGNQVQHNENAEWIKDDLHHNENYSEMQFEYIPVDIFKEVIKNTHNWKSPGTDNIHNYWYKKFTSAHPLLHTHINQFIEKPDTMPKYITQGITYMIPKDNDQLNPAKYRPITCLQTIYKIITSCITHLLNSHITQNDILAEEQKGCRKHSQGCKEQLIIDAVAMKHALSKKQDLNTMYIDYRKAYDSVPHSWLLYVLKHYKVNPLIITFLENTMKHWRTRLLVKNRTGSVQTEEIFIKRGIFQGDGLSPLWFCLALNPLSRMLNKLNGLHINISNNENYKLTHLMYMDDIKLYSNNTESLHRLADTTQIFSNDIHMQFGIDKCKTYSIQNQSVELEPYALDSGDVIEPIDQDSFYKYLGFQQNHQISHKDTKATVKKKFRHRLNLLLKSQLNGRNLVQSINTFAIPVLTYTFGIINWSQTDLTNLQRTINTTMTTHRKHHPRSCIQRLTTPRKEGGRGLIDITNLHNKQITSLRNYFFKQAERSLLHQAVSVNDKKYTPLNLSKSNTQRNEHITQNKDKFAAWERKSLHGRHYHDLQQPHVDKTASNAWLEQGELFPETEAFMLAIQDQVIDTHNYQKFIIKTLNISDTCRRCCSSSETIQHITGACKAIVQTDYKHRHDQVAAIIHQLLAYKYKLITEKIPYYKYKPESVLENNDYRLYWDRTIITDKTVHYNRPDITVLDKANKSAFLVDIAICNTHNLQSTHTEKIAKYIDLSIEIKTQWQLANTRTIPIVLSTTGVIPKTLATSLETLDIQPATFKTLQKAVILNTCRIVRKFLSLS

SEQ ID NO: 20074 - protein, 1417 aa, Erannis defoliaria
MNMKPIAHPQVPGGSGRNHDDGKWRLNEPWGVKNLRAAAPLNHQTTQASQSDYDSVNDRQPNMKQNKRYNLRSNVNIGQTSIRRASTSSKTTTSAQNTMDMEPECRTSERASPASSESLFDSPESSPYPFTARARTFSSSSSILSEDVVQEASAITSVPTSVNNRARKKWTSEMNEFIWRTYLIVTENETKTRGYLDPLYQQFSREFPEMDVSKQRIGDQRRAIIRSKLIPNSILDRIKQDVKNQLACQTIQKETIVQSENTQDTNQSTQQTRMKWTDDINEAIIREYYKITQLERNKSAYRKQLHTQIINIFPHIAHVSEQRIADQRRVIINNKLLTDDKLKNIRQDVEQGLITQNDGTDTQTNSTQTTVNTQYHIDTTQLTTHNTQDLTHNEHGTSNRISAPLDTDEILNLKIKDAFITSYKKYTNSDPTTRPYIPKQNTSKKLSYIVNYLNEEVLPSYLLPNTDFNTTQTIIYSAAYTTAICNGTKIKEPFDSPHHRTSSNEIQPWQKRLKIKLENIRKDIGRMTQYISGIRSRNLVSHIERIKEKYKTHSRYEEPNLTDEQFLDSLKQKLSAITSRFRRYNNCTLRKKQNSQFCSNEKRFYRHLNTEIHDTTNNTDAPLPTPESMHTFWSSIWGNQVQHNENAEWIKDDLHHNENYSEMQFEYIPVDIFKEVIKNTHNWKSPGTDNIHNYWYKKFTSAHPLLHTHINQFIEKPDTMPKYITQGITYMIPKDNDQLNPAKYRPITCLQTIYKIITSCITHLLNSHITQNDILAEEQKGCRKHSQGCKEQLIIDAVAMKQALSKKQDLNTMYIDYRKAYDSVPHSWLLYVLKHYKVHPLIITFLENTMKHWRTRLLVKNRTGSVQTEEIFIKRGIFQGDGLSPLWFCLALNPLSRMLNKLNGLHINISNNENYKLTHLMYMDDIKLYSNNTESLHRLADTTQIFSNDIHMQFGIDKCKTYSIQNQSVELEPYALDSGDVIEPIDQDSFYKYLGFQQNHQISHKDTKATVKKKFRHRLNLLLKSQLNGRNLVQSINTFAIPVLTYTFGIINWSQTDLTNLQRTINTTMTTHRKHHPRSCIQRLTTPRKEGGRGLIDITNLHNKQITSLRNYFFKQAERSLLHQAVSVNDKKYTPLNLSKSNTQRNEHITQNKDKFAAWERKSLHGRHYHDLQQPHVDKTASNAWLEQGELFPETEAFMLAIQDQVIDTHNYQKFIIKTPNISDTCRRCCSSSETIQHITGACKAIVQTDYKHRHDQVAAIIHQLLAYKYKLITEKIPYYKYKPESVLENNDYRLYWDRTIITDKTVHYNRPDITVLDKANKSAFLVDIAICNTHNLQSTHTEKIAKYIDLSIEIKTQWQLANTRTIPIVLSTTGVIPKTLATSLETLDIQPATFKTLQKAVILNTCRIVRKFLSLS

SEQ ID NO: 20075 - protein, 1407 aa, Biston betularia
MSNKKFMKMKPINNPQVPGGSTRNGDDGKQEPCGARGEKNLRVRVYHQTTNAMQMEFDKTAELMNDENVNPTFNTVNRSRRYNLRSVARNNQSTSSQLQVEPLSPSSTQSLFNSPTSSPQHFETEQYSCRSSSVADSLGSEDVVQEAFAINSAPTDDNKRTRKKWTTEMNEFIIRTYLIITVNDTRTRGYLDILHQKFIQQFPQMDVSKQRVGDQRRAIVRNKLIPGNMLNKIKQDVAKTLTQNEDTTYQYENIQNQTQNTTASQSRMKWTDEINEEIMKAYYRITEVEQNRTAYRKQLYTSVINKLPHLAHVTEQRIADQRRVIVHNKLLTMQRLQEIREEIQQEIQMTQGQHILTERHVHNQQNNGSENENLVNGIVIETPNYTTPNISQQRAGPEIDLQLDRKIVEVFNATYDEYKHTNPTERPYIPKQNTSKKLAYIVNYIDKDILPTHLDTNNDFATNQTIIYCAAYTAAVCNGCKVRVTASKEQEHRKTIPAWQNRLHKKIEQVRKDIGRMTQYMAGIRSRRLVQHIDQIKNKYKTHSRYEESNLTNSQFLDSLKQRLNAASSRLRRYTKCTLRKQQNIQFNTNEKLFYRHLNTKTHDTPRTSTNQTSPTVESMHAFWSKIWGNETRHNENAEWSCAEAQQVDCDQMHYEYIPADLFIDVIKSTHNWKAPGTDNIHNYWYKKFTSAHPILHTHINKFVESPDTMPQYITQGITHMIPKDNDLTNPAKYRPITCLQTIYKIITACISRLINKHLTHNNILAEEQKGCRKFSQGCKEQLIIDTVAMKQALKHKTDLYTMYIDYRKAYDSVPHSWLKHVLHHYNIHPSIITFLENSMNHWKTKLSIKNSKETVQTEEIAIKCGIFQGDALSPLWFCLALNPLSRLLNDSDSGLNVNNNGNTHKLTHLMYMDDIKLYSNDTQSLHQLADITQTFSNDINMQFGIDKCKTLSVQNQSVIMQPYTLNTGEVIEPLEENSFYKYLGLQQTHQISQNNTKTEVTHKFRQRLNSILKSQLHGRNIVKAINTYAIPVLTYTFGVINWSQTDLIKLQRIINTTMTTHRKHHPRSCIQRLTLPRCEGGRGIIDITNLHNKQITTLRKFFHERALNSKLHEAITRNDKRVTPLNLSNNNTQRNEHINDGKGKMTTWKQKSLHGRHYQDLQQPHGDKAASNAWLQYGDLFPETEAFMMAIQDQVIDTRNYQKHIMRIPNISDTCRRCCSSSETIQHITGACKAIAQTDYKHRHDQVAAIIHQYLAHKYKLIDEKLPYYKYSPQSVLENNSYRLYWDRTIITDKTVHFNRPDITVLDKNNRTAYLIDIAICNTHNLQTTHTEKIAKYTDLSIEIKTQWQINNTRTIPIVLSSTGVIPKTLHAGLETLNIPPTAYKLLQKATILNTCRIVRKFLSLE

SEQ ID NO: 20076 - protein, 1208 aa, Erannis defoliaria
MDVSKQRVGDQRRAIVRNKLISNERLNEIKQDVAKELTQHQDSTHQNQNSSNQINTQAQTKHTTTQQGRMKWTDEINEEIMKAYYRITEGEKNKTAYRKQLHSKVINKFPHLAHISEQRIADQRRVIVHNKLISMQRLQEIRQETQHEMHMTQTQHLTERHTENQYEDVNINEDLLSGIITDTPNNNNTINTNQRLDLPESDSQLNKNINEVFQTTYEKYKHTNPTERPYIPRQNTSRKLAYIVKYIGSEILPTHLDTSNEFITNQTIIYCAAYTAAVCNGSKIRDTVMSKQEHRKTNPAWQKRLHKKVENLRKDIGRMTQYMAGVRSIKLIQNIDNIKNKYKTHSRYEESNLTNNQFLDSLKQRLSAASSRLRRYTKCTLRKQQNAQFNTNEKLFYRHITTNTQETPRTDQTPPTAAIMHSFWSQIWENEARHNDSAEWIHEDSQQVDCDQMHYEYIPVDLFVEVIKNTHNWKAPGTDHIHNYWYKKFTTAYPILHTHINKFIESPDIMPDYITQGITHMIPKDNDLTNPAKYRPITCLQTFYKIMTACISRLISKHLTQNNILAEEQKGCRKYSQGCKEQLIIDAVAMKQALKSKSDLHTMYVDYRKAYDSVPHSWLRHILHHYKIHPVLVKFLENIMHNWKTKLSIRNGSETIQTEEISIKCGIFQGDAFSPLWFCLALNPLSQLLNNSDAGLHINNNGNTQHLTHLMYMDDIKLYSNDTQSLHQLADITQTFSNDINMQFGIDKCKTFSVQDQAIVMQPYTISTGEIIEPLDENSYYKYLGFQQAQQITHSHTKNDVIRKFRHRLNSILKSQLNGRNIVKAINTYAIPVLTYTFGIINWSQTDLIKLQRTINTTMTTHRKHHPRSCVQRLTLPRSEGGRGIIDIRNLHNKQITTLRRFFHERAENSDLHQKIVRNDKRVTPLNLSNSNSQRNESITDIKDKSATWRQKSLHGRHYQDLQQPHVDKTASNAWLQYGDLFPETEAFMLAIQDQVIDTRNYQKFIIRTPNTSDTCRRCCSSSETIQHITGACKAWTIQTDYKHRHDQVAAIIHQYLAYKYKLIDEKVPYYKYTPQSVLENNNYRLYWDRTIITDKTVHFNRPDVTVLDKNNKTAYLIDIAICNTHNLQTTHTEKIAKYTDLSIEIKTQWQINSTRTIPIVLSTTGVIPKTLHNSLEMLKIPPTAYRLLQKATILNTCRIVRKFLSLE

SEQ ID NO: 20077 - protein, 1412 aa, Agriopis aurantiaria
MIMKPKNNPQVPGGSTRNGNDGKQVPCGARGEKNLRVRVYHQTTNAMKMDLDKTNELDTDVQANPTPNTASQSRRYNLRSVTRNNQTGTLSEPVHTEPLSPSSTQSLFNSPPSSPQLFQTELYHYRSRSVTDSIGSDNVVQEAFALDPAPIADSKRARKKWTNEINEFIIRIYLIITENDTKPRGYLDQLHQQFTQQFPQMDVSKQRVGDQRRAILRNRLIPDDRLNKIKQDVLEVLAQNRDTTRQTNTQLQTQNTTIQQTRMKWTDEINEEIMKAYYRITQVEQNKTAYRKQLHTRFVNKFPHLSHVSEQRVADQRRVIIHNKLITVQRLQEIRQEIHHELHMTQTEYINERNTNDNFNDNIGQTEDVIASGSPINLQNYDSTDIATNLQHIHTTNIQQTLPQSDSLLDQKIKEVFNTTYEKYKHTDATARPYIPRQNTSKKLAYIVKYLDTEILPTHLHTHNNFTTNQTAIYCAAYTAAICNGCKIRDAATPVQERQRFTPAWQKRLQNKIENIRKDIGRMTQYMAGVRNWRLTQNIDYIKNKYKTHSRYEEPNLTDSQFLDSLKQRLNAASNRLRRYTKCTLRKQQNIQFHKNEKQFYRHIATQTQDTSRTTNQSTPTPENMHSFWAEIWGNEVHHNENAEWIHADSQQVDCDQMHYEYIPVDLFIDVIKSTHNWKAPGTDNIHNYWYKKFTTAHPILHTHINQFIESPDTMPHYITQGITHMIPKDSDLSNPAKYRPITCLQTIYKIITSCISRLVNKHLTHNSLLAEEQKGCRKFSQGCKEQLIIDSVAMKQALKNKNDLCTMYIDYRKAYDSVPHSWLIHTLYLYKIHPSIIKFLENAMQHWHTKLSMKNINETTETDEISIKRGIFQGDAFSPLWFCLALNPLSRLLNNSDAGLHINNGRNTQILTHLMYMDDIKLYSNDTQTLHQLADITQTFSNDINMQFGIDKCKTLSIQDQSIVLQPYTLNTGEVVEPMEENSFYKYLGLQQAHQISHNDTKNEVTRKFRHRLNSILKSQLNGRNIVKAINTYAIPVLTYTFGIINWSQTDLLKLQRTINTTMTTHRKHHPRSCIQRLTLSRPDGGRGIIDITNLHNKQIYTLRKFFHDRAETSTLHKAIAQNDKKYTPLNLSNNNPQRNETITDIKDKMTTWKQKSLHGRHYQDLQQPHVDKTASNAWLQRGELFPETEAFMLAIQDQVIDTRNYQKHIIRNPNITDTCRRCCSSSETIQHITGACKAIVQTDYKHRHDQVAAIIHQYLAHKYNLIDEKVPYYKYTPQSVLENNNYRLYWDRTIITDKTIHFNRPDVTVLDKTNKTAYLIDIAICNTHNLQTTHTEKIAKYTDLSIEIKTQWQINSIRTIPIVLSTTGVIPKTLHTSLETLNIPDTTYKLLQKATILNTCRIVRKFLSLE

SEQ ID NO: 20078 - protein, 1415 aa, Erannis defoliaria
MSNKTYMTMKPINNPQVPGGSTRDGDDGKQVPCGVRGEKNLRVRVDHQTTNATQTDFENTLEVDIDAFVNPTLKIANRSRRYNLRSANRHNQTGTLSGHVQEEISSPSPTQSLFNSPSSSPHHFQIEQYSCRSSSVADSLGSENVVQEAYAFNPAPTPDNKRARKKWTNEMNEFIICTYLIITANETKPRGYLDQLHQQFNQQFPQMDVSKQRVGDQRRAILRNKLIPEYRLGKIKQDALEALTQNRNTPHNDENIPNPMNAQAQTQHSTATQRMKWTDEINEEIMKLYYRITQVEQNKTAYRKQLHTNFVNQFPHLSHISEQRIADQRRVIVHNKLITTQRLQDIRQEIQLELLMAQSQVTNTRNTDDVQNNSISQIEHVISSNDVTNTENNNTTNTDLPQASLSSDSQLGTKINEVFDTTYEKYKHTDPTVRPYIPRQNTSRKLASIVKYLDTEILPTHLNMHNDFITNQTIIYCAAYTAATCNGCKIKDVTTTTAQEQRKFIPVWQRRLQNKIENFRKDIGRMTQYMTGIRNRRLNQNIDYIKNKYKTHSRYEEPNLTDSEFLDSLKQRLNAASSRLRRYTKCTLRKQQNTQFHNNEKQFYRNIAKQTQDISRTANQSAPTPENMHSFWSQIWGNEAGHNENAEWINADSQQVECDQMKYEYIPVDLFIDVIKSTHNWKAPGTDNIHNYWYKKFTTAHPILHTHINEFIESPDKMPDYITQGITHMLPKDSDISNPAKYRPITCLQTIYKIMTSCISRLVNKHLTHNSILAEEQKGCRKFSQGCKEQLLIDSVAMKQALKNKTDLHTMYIDYRKAYDSVPHSWLIQILDAYKIHPTIVLFLESAMRKWKTKLSIKNTNETIETDQISIKRGIFQGDAFSPLWFCLALNPLSRLLNNSGAGLRINTDGNTQTLTHLMYMDDIKLYSTDTQTLHQLADITQTFSDDINMQFGIDKCKTFSIQDQSVVLQPYTLNTGEVIEPMDENTFYKYLGFQQAHQIAHSDTKNEVTRKFRYRLNSILKSQLNGRNIVKAINTYAIPVLTYTFGIINWSQTDLTKLQRSINTTMTTHRKHHPRSCIQRLTVPRCEGGRGIIDIVNLHNKQISTLRKFFHDRAETSTLHQAIARNDKRYTPLNLSSNNPQRNEAITDAKDKMAAWKQKSLHGRHYQDLQQPHVDKTASNAWLQRGDLFPETEAFMLAIQDQIIDTRNYQKYIIRTPNITDTCRRCCSSSETIQHITGACRAIVQTDYKHRHDQVAAIIHQYLAHRYKLIDEKVPYYKYAPQPLLENAEYRLYWDRTIITDKTVHFNRPDITVLDKTNKTTYLIDIAICNTHNLQTTHTEKIAKYTDLAIEIKTQWQINRTRTVPIVVSTTEVIPKTLHASLEMLNIPPTAYRLLQKAVILNTCRIVRKFLALE

SEQ ID NO: 20079 - protein, 1412 aa, Agriopis aurantiaria
MIMKPKNNPQVPGGSTRNGNDGKQVPCGARGEKNLRVRVYHQTTNAMKMDLDKTNELDTDVQANPTPNTASQSRRYNLRSVTRNNQTGTLSEPVHTEPLSPSSTQSLFNSPPSSPQLFQTELYHYRSRSVTDSIGSDNVVQEAFALDPAPIADSKRARKKWTNEINEFIIRIYLIITENDTKPRGYLDQLHQQFTQQFPQMDVSKQRVGDQRRAILRNRLIPDDRLNKIKQDVLEVLAQNRDTTRQTNTQLQTQNTTIQQTRMKWTDEINEEIMKAYYRITQVEQNKTAYRKQLHTRFVNKFPHLSHVSEQRVADQRRVIIHNKLITVQRLQEIRQEIHHELHMTQTEYINERNTNDNFNDNIGQTEDVIASGSPINLQNYDSTDIATNLQHIHTTNIQQTLPQSDSLLDQKIKEVFNTTYEKYKHTDATARPYIPRQNTSKKLAYIVKYLDTEILPTHLHTHNNFTTNQTAIYCAAYTAAICNGCKIRDAATPVQERQRFTPAWQKRLQNKIENIRKDIGRMTQYMAGVRNWRLTQNIDYIKNKYKTHSRYEESNLTDSQFLDSLKQRLNAASNRLRRYTKCTLRKQQNIQFHKNEKQFYSHIATQTQDTSRTTNQSTPTPENMHSFWAEIWGNEVHHNENAEWIHADSQQVDCDQMHYEYIPVDLFIDVIKSTHNWKAPGTDNIHNYWYKKFTTAHPILHTHINQFIESPDTMPHYITQGITHMIPKDSDLSNPAKYRPITCLQTIYKIITSCISRLVNKHLTHNSLLAEEQKGCRKFSQGCKEQLIIDSVAMKQALKNKNDLCTMYIDYRKAYDSVPHSWLIHTLYLYKIHPSIIKFLENAMQHWHTKLSMKNINETTETDEISIKRGIFQGDAFSPLWFCLALNPLSRLLNNSDAGLHINNGRNTQILTHLMYMDDIKLYSNDTQTLHQLADITQTFSNDINMQFGIDKCKTLSIQDQSIVLQPYTLNTGEVVEPMEENSFYKYLGLQQAHQISHNDTKNEVTRKFRHRLNSILKSQLNGRNIVKAINTYAIPVLTYTFGIINWSQTDLLKLQRTINTTMTTHRKHHPRSCIQRLTLSRPDGGRGIIDITNLHNKQIYTLRKFFHDRAETSTLHKAIAQNDKKYTPLNLSNNNPQRNETITDIKDKMTTWKQKSLHGRHYQDLQQPHVDKTASNAWLQRGELFPETEAFMLAIQDQVIDTRNYQKHIIRNPNITDTCRRCCSSSETIQHITGACKAIVQTDYKHRHDQVAAIIHQYLAHKYNLIDEKVPFYKYTPQSVLENNNYRLYWDRTIITDKTVHFNRPDVTVLNKTNKTAYLIDIAICNTHNLQTTHTEKIAKYTDLSIEIKTQWQINSTRTIPIVLSTTGVIPKTLHTSLETLNIPDTTYKLLQKATILNTCRIVRKFLSLE

SEQ ID NO: 20080 - protein, 1139 aa, Agriopis aurantiaria
MKAYYRITQVEQNKTAYRKQLHTRFVNKFPHLSHVSEQRVADQRRVIIHNKLITVQRLQEIRQEIHHELHMTQTEYINERNTNDNFNDNIGQTEDVIASGSPINLQNYDSTDIATNLQHIHTTNIQQTLPQSDSLLDQKIKEVFNTTYEKYKHTDATARPYIPRQNTSKKLAYIVKYLDTEILPTHLHTHNNFTTNQTAIYCAAYTAAICNGCKIRDAATPVQERQRFTPAWQKRLQNKIENIRKDIGRMTQYMAGVRNWRLTQNIDYIKNKYKTHSRYEEPNLTDSQFLDSLKQRLNAASNRLRRYTKCTLRKQQNIQFHKNEKQFYRHIATQTQDTSRTTNQSTPTPENMHSFWAEIWGNEVHHNENAEWIHADSQQVDCDQMHYEYIPVDLFIDVIKSTHNWKAPGTDNIHNYWYKKFTTAHPILHTHINQFIESPDTMPHYITQGITHMIPKDSDLSNPAKYRPITCLQTIYKIITSCISRLVNKHLTHNSLLAEEQKGCRKFSQGCKEQLIIDSVAMKQALKNKNDLCTMYIDYRKAYDSVPHSWLIHTLYLYKIHPSIIKFLENAMQHWHTKLSMKNINETTETDEISIKRGIFQGDAFSPLWFCLALNPLSRLLNNSDAGLHINNGRNTQILTHLMYMDDIKLYSNDTQTLHQLADITQTFSNDINMQFGIDKCKTLSIQDQSIVLQPYTLNTGEVVEPMEENSFYKYLGLQQAHQISHNDTKNEVTRKFRHRLNSILKSQLNGRNIVKAINTYAIPVLTYTFGIINWSQTDLLKLQRTINTTMTTHRKHHPRSCIQRLTLSRPDGGRGIIDITNLHNKQIYTLRKFFHDRAETSTLHKAIAQNDKKYTPLNLSNNNPQRNETITDIKDKMTTWKQKSLHGRHYQDLQQPHVDKTASNAWLQRGELFPETEAFMLAIQDQVIDTRNYQKHIIRNPNITDTCRRCCSSSETIQHITGACKAIVQTDYKHRHDQVAAIIHQYLAHKYNLIDEKVPYYKYTPQSVLENNNYRLYWDRTIITDKTVHFNRPDVTVLDKTNKTAYLIDIAICNTHNLQTTHTEKIAKYTDLSIEIKTQWQINSTRTIPIVLSTTGVIPKTLHTSLETLNIPDTTYKLLQKATILNTCRIVRKFLSLE

SEQ ID NO: 20081 - protein, 1410 aa, Agriopis aurantiaria
MTMKPTNNPQVPGGSTRNGNDGKQVPCGARGEKNLRVRVFHQTTNAMQMDLENATELDNLDVSSTPNILVPNRSRRYNLRSVTRNNQTDTLSKHMQEQSLSPSSTQSLFTSPSSSPQPFQIEPYSYRSSSVADSIGSEGVVQEAFALDPAPITDTKRARKKWTNEMNESIMRTYLIITVNDTKRRGYLDQLHEQFSQQFPQMDVSKQRVGDQRRAIVRNKLIPDDRLNEIKQDVIKELQNKNTTNQVDNVLSQINSQGQTQQTSTLQIRMKWTNEINEEIMKSYYRITQVEQNKTAYRKQLHTSIINKFPHLIHVSEQRIADQRRVIIHNKLIATQRLHEIRQEIQLELHITQTQLLTDEINIDTQTSTENQSGEVIISDSIANLQYDNNENINQEQTSQNSDAQLDIKINDVFDKTYEKYKHTNPTARPYIPRQKTSKKLAYIVKYLNNEILPAHLDINNEFITNQTIIYCAAYTAAVCNGCKIRDVAIPVQERRKNIPAWQKRLLNKIDNLRKDIGRITQYIAGVRNRRLTQYIEYIKHKYKTHSRYEEPNLTNSQFLDSLKQRLSATSSRLRRYTKCTLRIQQNAQFDRNEKQFYRHITAQTQGSPRTDANQSVPTPENMHSFWSQIWGNETRHNENSEWIHAESQQVHCDQMQYECIPVDLFIDVIKNTHNWKAPGTDNIHNYWYKKFTTAYPILHTHINQFIESPNTMPHYITQGITHMVPKDNDLTNPAKYRPITCLQTIYKIITSCISRLINKHLTNNNILAEEQKGCRKFSQGCKEQLIIDSVAMKQALKNKTDLHTMYVDYRKAYDSVPHSWLIYILHHYKIHPSIVKFLENSMQHWRTKLSIRNMTETVETDEISIRCGIFQGDAFSPLWFCLALNPLSRLLNDSDAGLHINHDNNTHTITHLMYMDDIKLYSNNTQSLHQLADITQTFSNDINMQFGIDKCKTFSMQNQSVILQPYILSTGEIVEPMDENSFYKYLGLQQAHQISHNHTKNEVTRKFRHRLNSILKSQLNGRNIVKAINTYAIPVLTYTFGVINWSQTDLVKLQRTINTTMTTHRKHHPRSCIQRLTLPRSEGGRSIIDITNLHNKQISTLRKFFHDRAETSTLHQAITRNDKRFTPLNLSNNNPQRNETITNAKDKTDTWRQKSLHGRHYQDLQQPHVDKTASNAWLQRGDLFPETEAIMLAIQDQVIDTRNYQKHIIRTPNITDTCRRCCSSAETIQHITGACKAIVQTDYKHRHDQVAAIIHQYLAHKYKLIDEKVPYYKYTPQPVLENIYYRLYWDRTIITDKTVHFNRPDITVLDKNNKTAYLIDIAVCNTHNLQTTHTEKIAKYTDLSIEIKTQWQINSTRTIPIVLSTTGVIPTSLHTSLETLNIPDTVYKLLQKAVILNTCRIVRKFLALE

SEQ ID NO: 20082 - protein, 1141 aa, Agriopis aurantiaria
MKWTNEINEEIMKSYYRITQVEQNKTAYRKQLHTSIINKFPHLIHVSEQRIADQRRVIIHNKLIATQRLHEIRQEIQLELHITQTQLLTDEINIDTQTSTENQSGEVIISDSIANLQYDNNVNINQEQTSQNSDAQLDIKINDVFDKTYEKYKHTNPTARPYIPRQKTSKKLAYIVKYLNNEILPAHLDINNEFITNQTIIYCAAYTAAVCNGCKIRDVAIPVQERRKNIPAWQKRLLNKIDNLRKDIGRITQYIAGVRNRRLTQYIEYIKHKYKTHSRYEEPNLTNSQFLDSLKQRLSATSSRLRRYTKCTLRIQQNAQFDRNEKQFYRHITAQTQGSPRTDANQSVPTPENMHSFWSQIWGNETRHNENSEWIHAESQQVHCDQMQYECIPVDLFIDVIKNTHNWKAPGTDNIHNYWYKKFTTAYPILHTHINQFIESPNTMPHYITQGITHMVPKDNDLTNPAKYRPITCLQTIYKIITSCISRLINKHLTNNNILAEEQKGCRKFSQGCKEQLIIDSVAMKQALKNKTDLHTMYVDYRKAYDSVPHSWLIYILHHYKIHPSIVKFLENSMQHWRTKLSIRNMTETVETDEISIRCGIFQGDAFSPLWFCLALNPLSRLLNDSDAGLHINHDNNTHTITHLMYMDDIKLYSNNTQSLHQLADITQKFSNDINMQFGIDKCKTFSMQNQSVILQPYILSTGEIVEPMDENSFYKYLGLQQAHQISHNHTKNEVTRKFRHRLNSILKSQLNGRNIVKAINTYAIPVLTYTFGVINWSQTDLVKLQRTINTTMTTHRKHHPRSCIQRLTLPRSEGGRSIIDITNLHNKQISTLRKFFHDRAETSTLHQAITRNDKRFTPLNLSNNNPQRNETITNAKDKTDTWRQKSLHGRHYQDLQQPHVDKTASNAWLQRGDLFPETEAFMLAIQDQVIDTRNYQKHIIRTPNITDTCRRCCSSAETIQHITGACKAIVQTDYKHRHDQVAAIVHQYLAHKYKLIDEKVPYYKYTPQSVLENIYYRLYWDRTIITDKTVHFNRPDITVLDKNNKTAYLIDIAVCNTHNLQTTHTEKIAKYTDLSIEIKTQWQINSTRTIPIVLSTTGVIPTSLHTSLETLNIPDTVYKLLQKAVILNTCRIVRKFLALE

SEQ ID NO: 20083 - protein, 1410 aa, Agriopis aurantiaria
MTMKPTNNPQVPGGSTRNGNDGKQVPCGARGEKNLRVRVFHQTTNAMQMDLENATELDNLDVSSTPNILVPNRSRRYNLRSVTRNNQTDTLSKHMQEQYLSPSSTQSLFTSPSSSPQPFQIEPYSYRSSSVADSIGSEGVVQEAFALDPAPITDTKRARKKWTNEMNESIMRTYLIITVNDTKRRGYLDQLHEQFSQQFPQMDVSKQRVGDQRRAIVRNKLIPDDRLNEIKQDVIKELQNKNTTNQVENVLSQINSQGQTQQTSTLQIRMKWTNEINEEIMKSYYRITQVEQNKTAYRKQLHTSIINKFPHLIHVSEQRIADQRRVIIHNKLIATQRLHEIRQEIQLELHITQTQLLTDEINIDTQTSTENQSGEVIISDSIANLQYDNNVNINQEQTSQNSDAQLDIKINDVFDKTYEKYKHTNPTARPYIPRQKTSKKLAYIVKYLNNEILPAHLDINNEFITNQTIIYCAAYTAAVCNGCKIRDVAIPVQERRKNIPAWQKRLLNKIDNLRKDIGRITQYIAGVRNRRLTQYIEYIKHKYKTHSRYEEPNLTNSQFLDSLKQRLSATSSRLRRYTRCTLRIQQNAQFDRNEKQFYRHITAQTQGSPRTDANQSVPTPENMHSFWSQIWGNETRHNENSEWIHAESQQVHCDQMQYECIPVDLFIDVIKNTHNWKAPGTDNIHNYWYKKFTTAYPILHTHINQFIESPNTMPHYITQGITHMVPKDNDLTNPAKYRPITCLQTIYKIITSCISRLINKHLTNNNILAEEQKGCRKFSQGCKEQLIIDSVAMKQALKNKTDLHTMYVDYRKAYDSVPHSWLIYILHHYKIHPSIIKFLENSMQHWRTKLSIRNMTETVETDEISIRCGIFQGDAFSPLWFCLALNPLSRLLNDSDAGLHINHDNNTHTITHLMYMDDIKLYSNNTQSLHQLADITQTFSNDINMQFGIDKCKTFSMQNQSVILQPYILSTGEIVEPMDENSFYKYLGLQQAHQISHNHTKNEVTRKFRHRLNSILKSQLNGRNIVKAINTYAIPVLTYTFGVINWSQTDLVKLQRIINTTMTTHRKHHPRSCIQRLTLPRSEGGRSIIDITNLHNKQISTLRKFFHDCAETSTLHQAITRNDKRFTPLNLSNNNPQRNETITNAKDKTDTWRQKSLHGRHYQDLQQPHVDKTASNAWLQRGDLFPETEAFMLAIQDQVIDTRNYQKHIIRTPNITDTCRRCCSSAETIQHITGACKAIVQTDYKHRHDQVAAIVHQYLAHKYKLIDEKVPYYKYTPQSVLENIYYRLYWDRTIITDKTVHFNRPDITVLDKNNKTAYLIDIAVCNTHNLQTTHTEKIAKYTDLSIEIKTQWQINSTRTIPIVLSTTGVIPTSLHTSLDTLNIPDTVYKLLQKAVILNTCRIVRKFLALE

SEQ ID NO: 20084 - protein, 1410 aa, Agriopis aurantiaria
MTMKPTNNPQVPGGSTRNGNDGKQVPCGARGEKNLRVRVFHQTTNAMQMDLENATELDNLDVSSTPNILVPNRSRRYNLRSVTRNNQTDTLSKHMQEQSLSPSSTQSLFTSPSSSPQPFQIEPYSYRSSSVADSIGSEGVVQEAFALDPAPITDTKRARKKWTNEMNESIMRTYLIITVNDTKRRGYLDQLHEQFSQQFPQMDVSKQRVGDQRRAIVRNKLIPDDRLNEIKQDVIKELQNKNTTNQVENVLSQINSQGQTQQTSTLQTRMKWTNEINEEIMKSYYRITQVEQNKTAYRKQLHTSIINKFPHLIHVSEQRIADQRRVIIHNKLIATQRLHEIRQEIQLELHITQTQLLTDEINIDTQTSTENQSGEVIISDSIANLQYDNNVNINQEQTSQNSDAQLDIKINDVFDKTYEKYKHTNPTARPYIPRQKTSKKLAYIVKYLNNEILPAHLDINNEFITNQTIIYCAAYTAAVCNGCKIRDVAIPVQERRKNIPAWQKRLLNKIDNLRKDIGRITQYIAGVRNRRLTQYIEYIKHKYKTHSRYEEPNLTNSQFLDSLKQRLSATSSRLRRYTKCTLRIQQNAQFDRNEKQFYRHITAQTQGSPRTDANQSVPTPENMHSFWSQIWGNETRHNENSEWIHAESQQVHCDQMQYECIPVDLFIDVIKNTHNWKAPGTDNIHNYWYKKFTTAYPILHTHINQFIESPNTMPHYITQGITHMVPKDNDLTNPAKYRPITCLQTIYKIITSCISRLINKHLTNNNILAEEQKGCRKFSQGCKEQLIIDSVAMKQALKNKTDLHTMYVDYRKAYDSVPHSWLIYILHHYKIHPSIVKFLENSMQHWRTKLSIRNMTETVETDEISIRCGIFQGDAFSPLWFCLALNPLSRLLNDSDAGLHINHDNNTHTITHLMYMDDIKLYSNNTQSLHQLADITQKFSNDINMQFGIDKCKTFSMQNQSVILQPYILSTGEIVEPMDENSFYKYLGLQQAHQISHNHTKNEVTRKFRHRLNSILKSQLNGRNIVKAINTYAIPVLTYTFGVINWSQTDLVKLQRTINTTMTTHRKHHPRSCIQRLTLPRSEGGRSIIDITNLHNKQISTLRKFFHDRAETSTLHQAITRNDKRFTPLNLSNNNPQRNETITNAKDKTDTWRQKSLHGRHYQDLQQPHVDKTASNAWLQRGDLFPETEAFMLAIQDQVIDTRNYQKHIIRTPNITDTCRRCCSSAETIQHITGACKAIVQTDYKHRHDQVAAIVHQYLAHKYKLIDEKVPYYKYTPQSVLENIYYRLYWDRTIITDKTVHFNRPDITVLDKNNKTAYLIDIAVCNTHNLQTTHTEKIAKYTDLSIEIKTQWQINSTRTIPIVLSTTGVIPTSLHTSLETLNIPDTVYKLLQKAVILNTCRIVRKFLALE

SEQ ID NO: 20085 - protein, 1411 aa, Biston betularia
MTMKPRNSPQVPGGLTRDGDDGKQVPCGTRGANNLRVRVDHQTTKAMKMDSEKTSEMDNVVFVNPTPDVPKQNRRYNLRSTQKHNHTNILSGYVQEEPVSPSSTQSLFNSPSSSPLYFQVDQYSSRSSSVTDLVGSENVVQEASARDPASNPDNKRARKKWTNEMNEFIIRTYLIITTNDTKSRGYLDQLHQQFTHQFPQMNVSKQRIGDQRRAILRNKLIPDDRLDEIKQDALKELTPNSDIHSDEIVPNQINTQTQHPIASQTRMRWSDEMNEEIMKLYYRITEVEQNKTAYRKQLHTGFVHQFPHLSHISEQRVADQRRVIVHNKLITIQRLQDIRREIQNEIQLTQPQQTNERDVGECNTGILRQTITQTNNQAAVLIDNSIVTQNNSGIGTNFQHGSITLDVQLGSKIKEVFETTYEKYKQTDPTIRPYIPRQNTSRKLASIVEYLNDTILPNHLHMHNDFITNQTFIYCAAYTAAVCNGAKIRDITTSVQTQQKPIPAWQKRLKKKIDNIRKDIGRMTQFITGIRNRKLNQAIDYIKNKYKTHSRYEEPNLTDNQFLDSLKQRLNATSSRLRRYTKCTLRKQQNIQFDYNEKQFYRNITTQTQNNSRTANPATPTPENMHSFWAEIWANGVRHNENAEWIHADALQLNCDQMQYEYIPVDLFIDVIKSTHNWKAPGTDKIHNYWYKKFTNAYPIIHSHINQFIESPDTMPHYITQGITHMLPKDDDLSNPAKYRPITCLQTIYKIITSCIARLVNKHLTHNSILAEEQKGCRKFSQGCKEQLVIDSVAMTQALKNKTDLHTMYIDYRKAYDSVPHSWLIHVLGLYKIHPTLVNFLEKAMHNWNTRLSMKNINETDTELISIKRGIFQGDAFSPLWFCMALNPLSRLLNGSGAGLPIVNSNETQTLTHLMYMDDIKLYSTDTQTLHQLADITQTFSNDINMSFGIDKCKTFSIEDQSVVPQPYTLRTGETIESMDEHTFYKYLGFQQAHQISHKHTKSEVTRKFRYRLNLILKSQLNSRNIVKAINTFAIPVLTYTFGVIHWSQTDLAKLQRTINTTMTTYRKHHPRSCIQRLTLPRSEGGRAIIDIVNLHNKQITTLRNFFHDRAETSTLHQAIAWNDRKYTPLNLASSNPQRNETITDTKEKVSTWKQKSLHGRHYQDLQQPHVDKTASNAWLQRGDLFPETEAFMLAIQDQVIDTRNYRKYIIRAPNITDTCRRCCSSPETIQHITGACGAIAQTDYKHRHDQVAAIIHQYLAYKYKLIDEKMPYYKYTPQAVLENNNYRLYWDRTIITDKTVHFNRPDITVLDKYNKTAYLIDIAICNTHNLQTTHIEKIAKYTDLAIEIKTQWQVNSTRTIPIVLSSTGVIPKTLHAGLETLNIPPTAYKLLQKATILNTCRIVRKFLSLE

SEQ ID NO: 20086 - protein, 1379 aa, Ennomos quercinarius
MESTQRRYNLRSLPGGDRRGASGAGAGCHSMRTIGSGESSRRASVSSVSRARDTRVDATADQQTQQTNPSLSPSSTQSLFDSPVTSPLSFKLQYRTRFLSTSTNMSEDVVQEASATDPAPAADKTRARKKWNNDMNEFIWRTYLIITVNETKTRGYLDQLHQRFIQQFPQMDVSKQRIGDQRRAILRNKLISDNRLEDIKRDVAKELTQHIDTTHQFETANSLTNNTPHQTAATQSRIRWTNDINEEIMKSYYRITHVEQNKTAYRRQLHTNIVEEFPHLAHVSEQRIADQRRVIVNNKLITVQRLQEIRQEIQQELMIQTEIANEIGISDTQCDIETQHEQTANGTAETITQRTHVTNVNRNEHSPPSDTDSQLDKKIDETFHSTYNKYTNTNPTTRPYIPRQNTSKKLAYIVKYLNTKILPCHLDSNNDFITNQTVIYSAAYTAAVCNGCKIMELETSNVIRTKSVPAWQKRLRIKIEKLRKDIGRMTQYMAGIRNRRLIGNIDCIKNKYKTHSRYEEPNLTDNQFLDSLKQKLNATSSRLRRYTNCTLRKQQNTQFGKNEKQFYRNINLQTQGIANTTDQQIPTPESMHTFWKQIWGSEVRHNENAEWVETDTQHVQYNQMKYEYIPVDLFIDVIKNTHNWKAPGTDHIHNYWYKKFTTAYPILHTHINQFIQEPKTTPHYLTQGITHMLPKDNDRTNPAKYRPITCLQTIYKIMTSCISRLINIHLSQNNILAEEQKGCRKFSQGCKEQLIIDSVAMKHALTQKSDLHTMYIDYQKAYDSVPHSWLIYILQHYKIHPKLTAFLENTMKHWRTKLTIRNSNGSIVTDEITIKRGIFQGDALSPLWFCLALNPLSRILNSSGAGLHITNNIDNTQTLTHLMYMDDIKLYSNDTQSLHQLADITQQFSNDIKMQFGIDKCKTFSIQDQSVTLQPYNLNTGETIKPMDRNSFYKYLGFQQAHQISHTHTKTDITKTFRHRLNTILKSQLNGRNIVKALNTYAIPVLTYTFGVIKWSQTDLLKLQRTINTTMTTHRKHHPRSCIQRLTLPRSEGGRGIIDIINLHNKQISTLRNFFYERAEISPLHQAITMNDKRLTPLNLSDQSLQRNEKVTDTKDKIAVWEQKVLHGRHRHDLQQPHVDKAASNAWLQQGELFPETEAFMLAIQDQVIDTRNYQKHIIRTPNINDTCRRCCSNSETIQHITGACKAIVQTDYKHRHDQVASIIHQYLAYKYKLIKEKVPYYKYTSHSVLENCEYRLYWDRTIITDKTVHYNRPDITVLNKINKSAFLIDIAICNTHNLLTTHTEKIAKYTDLSIEIKTQWQISTIRTIPIVVSTTGVIPKTLLTSLETLDIPINTYKQLQKATILNTCRIVRKFLSLS

SEQ ID NO: 20087 - protein, 1379 aa, Ennomos quercinarius
MESTQRRYNLRSLPGGDRRGASGAGAGCHSMRTIGSGESSRRASVSSVSRARDTRVDATADQQTQQTNPSLSPSSTQSLFDSPVTSPLSFELQYRTRFLSTSTNMSEDVVQEASATDPAPAVDKTRARKKWNNDMNEFIWRTYLIITVNETKTRGYLDQLHQRFIQQFPQMDVSKQRIGDQRRAILRNKLISDNRLEDIKRDVAKELTQHIDTTHQFETANSLTNNTPHQTAATQSRMRWTNDINEEIMKSYYRITHVEQNKTAYRRQLHTNIVEEFPHLAHVSEQRIADQRRVIVNNKLITVQRLQEIRQEIQQELMIQTEIANEIGISDTQCDIETQHEQTANGTAETITQRTHVTNVNRNEHSPPSDTDSQLDKKIDETFHSTYNKYTNTNPTTRPYIPRQNTSKKLAYIVKYLNTKILPCHLDSNNDFITNQAVIYSAAYTAAVCNGCKIMELETSNVIRTKSVPAWQKRLRIKIEKLRKDIGRMTQYMAGIRNRRLIGNIDCIKNKYKTHSRYEEPNLTDNQFLDSLKQKLNATSSRLRRYTNCTLRKQQNTQFGKNEKQFYRNINLQTQGIANTTDQQIPTPESMHTFWKQIWGSEVRHNENAEWIETDTQHVQYNQMKYAYIPVDLFIDVIKNTHNWKAPGTDHIHNYWYKKFTTAYPILHTHINQFIQEPKTTPHYLTQGITHMLPKDNDRTNPAKYRPITCLQTIYKIMTSCISRLINIHLSQNNILAEEQKGCRKFSQGCKEQLIIDSVAMKHALTQKSDLHTMYIDYQKAYDSVPHSWLIYILQHYKIHPKLTAFLENTMKHWRTKLTIRNSNGSIVTDEITIKRGIFQGDALSPLWFCLALNPLSRLLNSSGAGLHITNNIDNTQTLTHLMYMDDIKLYSNDTQSLHQLADITQQFSNDIKMQFGIDKCKTFSIQDQSVTLQPYNLNTGETIKPMDRNSFYKYLGFQQAHQISHTHTKTDITKTFRHRLNTILKSQLNGRNIVKALNTYAIPVLTYTFGVIKWSQTDLLKLQRTINTTMTTHRKHHPRSCIQRLTLPRSEGGRGIIDIINLHNKQISTLRNFFYERAEISPLHQAITMNDKRLTPLNLSDESLQRNEKVTDTKDKIAVWEQKVLHGRHRHDLQQPHVDKAASNAWLQQGELFPETEAFMLAIQDQVIDTRNYQKHIIRTPNINDTCRRCCSNSETIQHITGACKAIVQTDYKHRHDQVSSIIHQYLAYKYKLIKEKVPYYKYTPHSVLENCEYRLYWDRTIITDKTVHYNRPDITVLNNINKSAFLIDIAICNTHNLLTTHTEKIAKYTDLSIEIKTQWQISTIRTIPIVLSTTGVIPKTLLTSLETLDIPINTYKQLQKATILNTCRIVRKFLSLS

SEQ ID NO: 20088 - protein, 1407 aa, Clostera curtula
MKNRRPYMRVIRLYQEVLYLWDFHLPLFLGHPVYRHVYNETSSISSLFPSIPSTNQSYCLSPTTSHTNSIQLEDVAQETNSVVEPAPTEGRVKTRKKWTQDMNEFILRTYLYLTNMGTDISNYLPPLHTKFMEKYPIMQVSRQRVGDQRRAIVQKKLLPQHIMDRINNEVKAELDNIYNKPSTHYPPITSQTNTQITSQNVPNQMPHKTGNRMRWSTKLNEDLMKCYYEVTELETDLSAYRTKLYSKFIELYPDYSNISAQRLSDQRRSIINNRLILPEKLQDIKNEIRENLPHIAGNRACDNTRSQRDLIDTIPTILTNNSHNPIANSPPTTITLENTLLNAETLPTNSTISIAGTQNTHESELLNYIQIQQLPPDISDLIENTFQKALEIFDEVDSTERPYIPKQKTSKKLAMIVNYINTTLLPNCVTESTDFKSLQNIIYCTAWTTATCNGSKIADVGRNQSHRNRTQRKPKWQIRLERKVQNLRVKIGRMTQYIKGNRSKSLVFQVNKIMNEYKTHSIHENPNTDPSHFLDTLKQKLSLTASRLNQYRACSLRKTQNTQFSNNEKRFYRDLQSCTLNTTDSSRNNIEVPTKDELRQFWADIWETPVTHNDKANWIDREKQNGARILPMELGTISASNFDNVIKNLHNWKTPGSDNIHNFWYKKLTYLHPHLHRHINNFIQQPHTIPEYIMTGITYMIPKDNLDTKNPAKYRPITCLQSIYKIISSCITEVIYNHIDTNNILVEQQKGCKRYSQGCKEQLTIDSVILQQVKKNKNELHTMYIDYRKAYDSVPHSWLLKVLEIYKIHPQLIKFLQTIALKWSTKLRLTSNGTMLETDYINIKRGIFQGDSFSPLWFCLALNPLSNILNNTVDGYSLLHINNETNETRSIQINHLMYMDDIKLYAPTQEQLFGLANITEEFSNDICMLFGIDKCKINSVKGGENLNLNYVLQTGQQIVSLEQNQIYKYLGYNQSNLIQHKETKAQLIQKFKQRLNSILRSQLYSRNIIQAINSYVVPVLTYSFGIIRWTKTELKNIQRVINTTMTKHRKHHPRACVQRQTLPRREGGRGLIDISNLHNKQITTLRNYFHQKSLTSLLHKSVEYNDQNLTPLNLHSKTQQKNETQTDYNTKIEDWGKKSLHGRHRQDLCQLHVDKLASNAWLTRGELFPETEGFMIAIQDQTIETRNYQKFIMKIPNLSTDLCRKCNSSSETIQHITGACKSIVQTDYKHRHDQVANIIHQTIAISHNLIPGPSRPYYKYTPEPVLENTDFRLYFDRAILTDKTTHFNRPDITIYDKKNRRAFIIDVAIPNSHNIQNTISEKLSKYTDLKDEIKRMWRLDNVTIVPIVLSTTGIIPKQLHSSLKTLNLPPYIYINLQKAVILNTCRIVRKFLQVDSARNASIYLNQF

SEQ ID NO: 20089 - protein, 993 aa, Clostera curtula
MIVNYINTTLLPNCITESTDFKSLQNIIYCTAWTTATCNGSKIDDVGSNQSHRNRTQRKPKWQIRLERKVQNLRVKIGRMTQYIKGNRSKSLVFQVNKIMNEYKTHSIHENPNTDPSHFLDTLKQKLSLTASRLNRYRACSLRKTQNTQFYNNEKRFYRDLQSCTLNTTDSSRNNIEVPTKDELRQFWADIWETPVTHNDKANWIDREKQNGARILPMELGTISASNFDNVIKNLHNWKTPGSDNIHNFWYKKLTYIHPHLHRHINNFIQQPHTIPEYIMTGITYMIPKDNLDTKNPAKYRPITCLQSIYKIISSCITEVIYNHIDTNNILVEQQKGCKRYSQGCKEQLTIDSVILQQVKKNKNELHTMYIDYRKAYDSVPHSWLLKVLEIYKIHPQLIKFLQTIALKWSTKLRLTSNGTMLETDYINIKRGIFQGDSFSPLWFCLALNPLSNILNNTVDGYSLLHINNETNETRSIQINHLMYMDDIKLYAPTQEQLFGLANITEEFSNDICMLFGIDKCKINSVKDGENLNLNYVLQTGQQIVSLEQNQIYKYLGYNQSNLIQHKETKAQLIQKFKQRLNSILRSQLYSRNIIQAINSYVVPVLTYSFGIIRWTKTELKNIQRVINTTMTKHRKHHPRACVQRQTLPRREGGRGLIDISNLHNKQITTLRNYFHQKSLTSLLHKSVEYNDQNLTPLNLHSKIQQKNETQTDYNTKIEDWGKKSLHGRHRQDLCQLHVDKLASNAWLTRGELFPETEGFMIAIQDQTIETRNYQKFIMKIPNLSTDLCRKCNSSSETIQHITGACKSIVQTDYKHRHDQVANIIHQTIAISHNLIPGPSQPYYKYTPEPVLENTDFRLYFDCAILTDKTTHFNRPDITIYDKKNRRAFIIDVAIPNSHNIQNTISEKLSKYTDLKDEIKRMWRLDNVTIVPIVLSTTGIIPKQLHSSLKTLNLPPYIYINLQKAVILNTCRIVRKFLQVDSARNASTYLNQF

SEQ ID NO: 20090 - protein, 793 aa, Clostera curtula
MTQYMRGNRSEALVKRVDRLKNQFKIHSVHEDPNTQPSHFLDTLKQKLTLLSARLNRYLTCTQRKTQNGLFRTNEKRFYRNLKLSSSNNTGNRTDNQTLPSRDVLFKFWSEIWGEPVEHNHQATWINSEANCSEHVTPMEFTFISIDVFRNVLTRLHNWKAPGSDNIQNFWYKKFHYLHPYLLQHINNFIQNPDSVPSYILAGTTFMIPKDPLDSQNPSKYRPITCLQAIYKIISSCITEIMYTHINSNNILAEQQKGCRRFSQGCKEQLITDSVILEQVKRLKAELHTMYIDYRKAYDSVPHSWLLKILEIYKIHPLLIKFLQTTMVKWLTRLRVKIDKITIETEPINIRRGIFQGDSLSPLWFCLALNPLSNLLNNSYAGYSLKYKDNNESSLDTLKLNHLVYMDDIKLYATSQNELFDLAKITETFSSDINMIFGIDKCKINSVKAGQNLQQSYELDTGQLITSLDLNEVYKYLGYNQSQLIQSKETKSKLLLQFKHRLNSLFRSQLYSRNLIKGINTYAIPILTYSFGIIKWTKTELKNMQRIINTTMTKHRKHHPRACVQRQTLPREEGGRGIIDITNLHNKQIMILRKYFHHKAIESVLHKAIVFSDRKLTPLNLYDKEHQNNESQINNSTKIDEWSRKSLHGRHRLDLCQPNVDKTASNAWLSRGELFPETEGFIIAIQDQTIETRKYKKYIMKTPNLQTDKCRKCNSCTETIQHITGACKAIVQTDYKHRHDQVANIIHQKIALSHKLLNDPSVPYYKYCPEAVLENCDFRLYFDRAILSDNSLQ

SEQ ID NO: 20091 - protein, 1412 aa, Clostera curtula
MENENRRYNLRSLPGGRRGTSGADAGCGSMRTIGDGGLNRRAPLDKSTTAERFDCESTLSLLSSIPSSTSWCCVSPTPSSASSMQLMDVAQETSSVNDPVPTTSKPKTRIKWSKEMNEFILRTYLYSTDMDTKTNGYLPVLHTQFLEKFPIMQVSRQRVGDQRRAIIQKKLLPQDSIDNIYEEIKNKLQTNQVNPAELINTPEVVIQNKGSRMRWSDPLNESLIRCYYEVTELETNMAVYRKRVHSKFIDIHQEYSNLSPQRLSDQIRSIINNRLISPNRLEEIKRDVQVKCNIPARDTQSSHRPRSTICQTTIHSDTNTFPQDTQNLSSSNSPISPSESETLLSVLTPQTQNNVPPNSINLDTSSQEINQNIEETFQEALDQFSVTDPTTRPHIPKQKSSKKLVNLLNYLNTIILPKHINVDTSFETLQNIIYSAAWTASKCNGAKIFLNLNDKNQNSKPTKPKWQRRLEKKIQDLRAGIGRMTQYMRGNRSEALVKRVDRLKNQFKIHSVHEDPNTQPSHFLDTLKQKLTLLSARLNRYLTCTQRKTQNGLFRTNEKRFYRNLKLSSSNNTGNRTDNQTLPSRDVLFKFWSEIWGEPVEHNHQATWINSEANRSEHVTPMEFTFISIDVFRNVLTRLHNWKAPGSDNIQNFWYKKFHYLHPYLLQHINSFIQNPDSVPSYIMAGTTFMIPKDPLDSQNPSKYRPITCLQAIYKIISSCITEIMYTHINSNNILAEQQKGCRRFSQGCKEQLITDSVILEQVKRLKAELHTMYIDYRKAYDSVPHSWLLKILEIYKIHPLLIKFLQTTMVKWLTRLRVKINKITIETEPINIRRGIFQGDSLSPLWFCLALNPLSNLLNNSYAGYSLKYKDNNESSLDTLKLNHLMYMDDIKLYATSQNELFDLAKITETFSSDINMIFGIDKCKINSVKAGQNLQQSYELDTGQLITSLDLNEVYKYLGYNQSQLIQSKETKSKLLLQFKHRLNSLFRSQLYSRNLIKGINTYAIPILTYSFGIIKWTKTELKNMQRIINTTMTKHRKHHPRACVQRQTLPREEGGRGIIDITNLHNKQIMILRKYFHHKAIESVLHKAIVFSDRKLTPLNLYDKEHQNNESQINNSTKIDEWSRKSLHGRHRLDLCQPNVDKTASNAWLSRGELFPETEGFIIAIQDQTIETRNYKKYIMKTPNLQTDKCRKCNSCTETIQHITGACKAIVQTDYKHRHDQVANILHQKIALTHKLLKDPSVPYYKYCPEAVLENCDFRLYFDRAILSDKTIHYNRPDITLHDKKNHTAFIIDIAIPNTHNLQNTIAEKLSKYTDLKDEIKRLWRLKPVIIIPIVLSSTGIIPKQLHQSLKSLNLPPYIYTTLQKAVILNTCRIVRKFLQSDGEMITHLLPDLHPASLTVSEPNTDVLP

SEQ ID NO: 20092 - protein, 1412 aa, Clostera curtula
MENENRRYNLRSLPGGRRGTSGADAGCGSMRTIGDGGLNRRAPLDKSTTAESFDCESTLSLLSSIPSSTSSCCVSPTPSSASSMQLMDVAQETSSVNDPVPTTSKPKTRIKWSKEMNEFILRTYLYLTDMDTKTNGYLPILHTQFLEKFPIMQVSRQRVGDQRRAIIQKKLLPQDSIDNIYEEIKNKLQTNQENPAELINTPEVVIQNKGSRMRWSDPLNESLIRCYYEVTELETNMAVYRKRVHSKFIDIHHEYSNLSPQRLSDQIRSIINNRLISPNRLEEIKRDVQVKCNIPARDTQSSHRPRSTICQTTIHSDTNTFPQHTQNLSSSNSPISPSESETLLSVLTPQTQSNVPPNSINLDTSSQEINQNIEQTFQEALDQFSVTDPTTRPHIPKQKSSKKLANLLNYLNTIILPKHINVDTSFETLQNIIYSAAWTASKCNGAKIFLNLNDKNQNSKPTKPKWQRRLEKKIQDLRAGIGRMTQYMRGNRSEALVKRVDRLKNQFKIHSVHEDPNTQPSHFLDTLKQKLTLLSARLNRYLTCTQRKTQNGLFRTNEKRFYRNLKLSSSNNTGNRTDNQTLPSRDVLFKFWSEIWGEPVEHNHQATWINSEANCSEHVTPMEFTFISIDVFRNVLTRLHNWKAPGSDNIQNFWYKKFHYLHPYLLQHINNFIQNPDSVPSYIMAGTTFMIPKDPLDSQNPSKYRPITCLQAIYKIISSCITEIMYTHINSNNILAEQQKGCRRFSQGCKEQLITDSVILEQVKRLKAELHTMYIDYRKAYDSVPHSWLLKILEIYKIHPLLIKFLQTTMVKWLTRLRVKIDKITIETEPINIRRGIFQGDSLSPLWFCLALNPLSNLLNNSYAGYSLKYKDNNESSLDTLKLNHLMYMDDIKLYATSQNELFDLAKITETFSSDINMIFGIDKCKINSVKAGQNLQQSYELDTGQLITSLDLNEVYKYLGYNQSQLIQSKETKSKLLLQFKHRLNSLFRSQLYSRNLIKGINTYAIPILTYSFGIIKWTKTELKNMQRIINTTMTKHRKHHPRACVQRQTLPREEGGRGIIDITNLHNKQIMILRKYFHHKAIESVLHKAIVFSDRKLTPLNLYDKEHQNNESQINNSTKIDEWSRKSLHGRHRLDLCQPNVDKTASNAWLSRGELFPETEGFIIAIQDQTIETRNYKKYIMKTPNLQTDKCRKCKSCTETIQHITGACKAIVQTDYKHRHDQVANIIHQKIALSHKLLNDPPVPYYKYCPEAVLENCDFRLYFDRAILSDKTIHYNRPDITLHDKKNHTAFIIDIAIPNTHNLQNTIAEKLSKYTDLKDEIKRLWRLKTVIIIPIVLSSTGIIPKQLHQSLKSLNLPPYIYTTLQKAVILNTCRIVRKFLQSDGEMITHLLPDLHPASLTVSEPNTDVLP

SEQ ID NO: 20093 - protein, 1418 aa, Pararge aegeria
MELRSKRVLSILPLPGGDRRGTPGADAGCSSMRSVGDEALSRRALVDKFTTADITLARDSSSPISSTQSLFPSPNSSPNPYESAILTSPSSHESSEFSMDVAQETTSVSKSVPTILKAKKLRMKWTDVYNEAIIRSYYRITKLESIKVTYRKPLHQQILMIFPELSHVSEQRVADQKRRIICNKLICQKRLEQIKKTVADELQLTSTHTQQKSIHTGQDTSSRMRWTDDLNESLMRCYYIVTESETNMTSYRTKLHKKFIDIHPDLSNISPQRLSDQRRSIVNNRLLDIKKLEKIKTDVLNMNITHINTPTQNAQLAHLNYQKTPNNVTLTTNDTSDINLLPHYNLLATYPYPRNTTDEETSETDVIKSNNNSLVHINHDIDNTFKETFSKYTDTDPTTRPFIWKQKSSKKFSIIIHYIDNNILPKYLNSDTDFKTLQTIIYCAAWTAAKCNGAKMDITAEQSNRMGPKKPNWERRLEKKREDLRVKIGRLIQYRNGNTSPMLTAQVRKIMDQYKVHSIHEGPNSCITQFIDTLKQKLTVIASRINRYRACTLRKTQNNQFQNNEKNFYRNLKLSTSNNTSSNHPSTPNTPEPDLVRKFWADIWEKPKDHNDKADWIRDEYDRNRHVQPMPFEFISIETFQNVIKKLHNWKAPGTDKIHNFWYKKFAYTHPFLHNHINNLIQDPASIPYYVMAGTTYMISKDPSDPTNPAKYRPIISINYSLQTIYKIISSCITSLIYDHIENNRILAEPQKGCRKYSQGCKEQLIIDSVILRLVQKQKKELHSMYVDYKKAYDSVPHSWLLKVLDIYKIHPTLTNLLQTVMHKWTTRLKISHTESEPIHIKRGIFQGDSLSPLWFCLALNPLSNVLIAANVGYPLKYTKDNNMNEQITTQINHLMYMDDIKLYATTQKDLYQLANLTEQYSQDICMEFGIDKCKINAIKDGQSLQHTYHMEAGQQINSLEETEVYKYLGYNQGKLIEYKNTKTKLIQQFKHRLNSLVKSQLNSRNIIKAINSFSIPILTYSFGIINWSKTELKNIQRIINTTLTKHRKHHPRACFQRQTLPRHEGGRGIIDIQNLHNKQITTLRSYFYKKSTTSGLHQATVQSDAKLTPLNLKDKTFQKNETQTTEQTKINEWARKSLHGRHRHDLCQPNVDKAASNAWLSRGELFPETEGFMIAIQDQIIETRNYQRHIMRILNLPTDLCRKCNSNSETIQHITGACKLIAQTEYKHRHDQAANIIHQKLAYKYNLISNLKPIPYYKYVPESVLENNEYRLYFDRAILTDRTIHYNRPDITLQDKKNRTAIIIDIVIPNTHNLQNTISEKLSKYTDLKDEIKRMWRLNEVSIVPIVLSTTGVIPKQLHQSLSLLNLPEFTYISLQKAVILNTCRIVRKFLQGSEEPTHRTGEPTHNHNNAQPQPST

SEQ ID NO: 20094 - protein, 1414 aa, Pararge aegeria
MELRSKRVLSILPLPGGDRRGTPGADAGCSSMRSVGDEALSRRALVDKFTTADITLARDSSSPISSTQSLFPSPNSSPNPYESAILTSPSSHVSSEFSMDVAQETTSVSKSVPTILKAKKLRMKWTDVYNEAIIRSYYRITKLESIKVMYRKPLHQQILMIFPELSHVSEQRVADQKRRIICNKLICQKRLEQIKKTVADELQLTSTHTQQKSILTGQDTSSRMRWTDDLNESLMRCYYIVTESETNMTSYRTKLHKKFIDIHPDLSNISPQRLSDQRRSIVNNRLLDIKKLEKIKTDVLNMNITHINTPTQNAQLAHLNYQETPNNVTLTTNDTSDINLLPHYNLLATYPYPRNTTDEETSETDVIKSNNNSLVHINHDIDNTFKETFSKYTDTDPTTRPFIWKQKSSKKFSIIIHYIDNNILPKYLNSDTDFKTLQTIIYCAAWTAAKCNGAKMDITAEQSNRMGPKKPNWERRLEKKREDLRVKIGRLIQYRNGNTSPMLTAQVRKIMDQYKVHSIHEGPNSCITQFIDTLKQKLTVIASRINRYRACTLRKTQNNQFQNNEKNFYRNLKLFTSNNTSSNHPSTPNTPEPDLVRKFWADIWEKPKDHNDKADWIRDEYDRNRHVQPMPFEFISIETFQNVIKKLHNWKAPGTDKIHNFWYKKFAYTHPFLHNHINNLIQDPASIPYYVMAGTTYMISKDPSDPTNPAKYRPITCLQTIYKIISSCITSLIYDHIENNRILAEPQKGCRKYSQGCKEQLIIDSVILRLVQKQKKELHSMYVDYKKAYDSVPHSWLLKVLDIYKIHPTLTNLLQTVMHKWTTRLKISHTESEPIHIKRGIFQGDSLSPLWFCLALNPLSNVMIAANVGYPLKYTKDNNMNEQITTQINHLMYMDDIKLYATTQKDLYQLANLTEQYSQDICMEFGIDKCKINAIKDGQSLQHTYHMEAGQQINSLEETEVYKYLGYNQGKLIEYKNTKTKLIQQFKHRLNSLVKSQLNSRNIIKAINSFSIPILTYSFGIINWSKTELKNIQRIINTTLTKHRKHHPRACFQRQTLPRHEGGRGIIDIQNLHNKQITTLRSYFYKKSTTSGLHQATVQSDAKLTPLNLKDKTFQKNETQTTEQTKINEWARKSLHGRHRHDLCQPNVDKVASNAWLSRGELFPETEGFMIAIQDQIIETRNYQRHIMRILNLPTDLCRKCNSNSETIQHITGACKLIAQTEYKHRHDQAANIIHQKLAYKYNLISNLKPIPYYKYVPESVLENNEYRLYFDRAILTDYRLHYNRPDITLQDKKNRTAIIIDIAIPNTHNLQNTISEKLSKYTDLKDEIKRMWRLNEVSIVPIVLSTTGVIPKQLHQSLSLLNLPEFTYISLQKAVILNTCRIVRKFLQGSEEPTHRTGEPTHNHNNVQPQPST

SEQ ID NO: 20095 - protein, 1266 aa, Pararge aegeria
MYRKPLHQQILMIFPELSHVSEQRVADQKRRIICNKLICQKRLEQIKKTVADELQLTSTHTQQKSIHTGQDTSSRMRWTDDLNESLMRCYYIVTESETNMTSYRTKLHKKFIDIHPDLSNISPQRLSDQRRSIVNNRLLDIKKLEKIKTDVLNMNITHINTPTQNAQLAHLNYQETPNNVTLTTNDTSDINLLPHYNLLATYPYPRNTTDEETSETDVIKSNNNSLVHINHDIDNTFKETFSKYTDTDPTTRPFIWKQKSSKKFSIIIHYIDNNILPKYLNSDTDFKTLQTIIYCAAWTAAKCNGAKMDITAEQSNRMGPKKPNWERRLEKKREDLRVKIGRLIQYRNGNTSPMLTAQVRKIMDQYKVHSIHEGPNSCITQFIDTLKQKLTVIASRINRYRACTLRKTQNNQFQNNEKNFYRNLKLSTSNNTSSNHPSTPNTPEPDLVRKFWADIWEKPKDHNDKADWIRDEYDRNRHVQPMPFEFISIETFQNVIKKLHNWKAPGTDKIHNFWYKKFAYTHPFLHNHINNLIQDPASIPYYVMAGTTYMISKDPSDPTNPAKYRPITCLQTIYKIISSCITSLIYDHIENNRILAEPQKGCRKYSQGCKEQLIIDSVILRLVQKQKKELHSMYVDYKKAYDSVPHSWLLKVLDIYKIHPTLTNLLQTVMHKWTTRLKISHTESEPIHIKRGIFQGDSLSPLWFCLALNPLSNVMIAANVGYPLKYTKDNNMNEQITTQINHLMYMDDIKLYATTQKDLYQLANLTEQYSQDICMEFGIDKCKINAIKDGQSLQHTYHMEAGQQINSLEETEVYKYLGYNQGKLIEYKNTKTKLIQQFKHRLNSLVKSQLNSRNIIKAINSFSIPILTYSFGIINWSKTELKNIPRIINTTLTKHRKHHPRACFQRQTLPRHEGGRGIIDIQNLHNKQITTLRSYFYKKSTTSGLHQATVQSDAKLTPLNLKDKTFQKNETQTTEQTKINKWARKSLHGRHRHDLCQPNVDKVASNAWLSRGELFPETEGFMIAIQDQIIETRNYQRHIMRILNLPTDLCRKCNSNSETIQHITGACKLIAQTEYKHRHDQAANIIHQKLAYKYNLISNLKPIPYYKYVPESVLENNEYRLYFDRAILTDRTIHYNRPDITLQDKKNRTAIIIDIAIPNTHNLQNTISEKLSKYTDLKDEIKRMWRLNEVSIVPIVLSTTGVIPKQLHQSLSLLNLPEFTYISLQKAVILNTCRIVRKFLQGSEEPTHRTGEPTHNHNNVQPQPST

SEQ ID NO: 20096 - protein, 1414 aa, Pararge aegeria
MELRSKRVLSILPLPGGDRRGTPGADAGCSSMRSVGDEALSRRALVDKFTTADITLARDSSSPISSTQSLFPSPNSSPNPYESAILTSPSSHESSEFSMDVAQETTSVSKSVPTILKAKKLRMKWTDVYNEAIIRSYYRITKLESIKVTYRKPLHQQILMIFPELSHVSEQRVADQKRRIICNKLICQKRLEQIKKTVADELQLTSTHTQQKSIHTGQDTSSRMRWTDDLNESLMRCYYIVTESETNMTSYRTKLHKKFIDIHPDLSNISPQRLSDQRRSIVNNRLLDIKKLEKIKTDVLNMNITHINTPTQNAQLAHLNYQKTPNNVTLTTNDTSDINLLPHYNLLATYPYPRNTTDEETSETDVIKSNNNSLVHINHDIDNTFKETFSKYTDTDPTTRPFIWKQKSSKKFSIIIHYIDNNILPKYLNSDTDFKTLQTIIYCAAWTAAKCNGAKMDITAEQSNRMGPKKPNWERRLEKKREDLRVKIGRLIQYRNGNTSPMLTAQVRKIMDQYKVHSIHEGPNSCITQFIDTLKQKLTVIASRINRYRACTLRKTQNNQFQNNEKNFYRNLKLSTSNNTSSNHPSTPNTPEPDLVRKFWADIWEKPKDHNDKADWIRDEYDRNRHVQPMPFEFISIETFQNVIKKLHNWKAPGTDKIHNFWYKKFAYTHPFLHNHINNLIQDPASIPYYVMAGTTYMISKDPSDPTNPAKYRPITCLQTIYKIISSCITSLIYDHIENNRILAEPQKGCRKYSQGCKEQLIIDSVILRLVQKQKKELHSLYVDYKKAYDSVPHSWLLKVLDIYKIHPTLTNLLQTVMHKWTTRLKISHTESEPIHIKRGIFQGDSLSPLWFCLALNPLSNVLIAANVGYPLKYTKDNNMNEQITTQINHLMYMDDIKLYATTQKDLYQLANLTEQYSQDICMEFGIDKCKINAIKDGQSLQHTYHMEAGQQINSLEETEVYKYLGYNQGKLIEYKNTKTKLIQQFKHRLNSLVKSQLNSRNIIKAINSFSIPILTYSFGIINWSKTELKNIQRIINTTLTKHRKHHPRACFQRQTLPRHEGGRGIIDIQNLHNKQITTLRSYFYKKSTTSGLHQATVQSDAKLTPLNLKDKTFQKNETQTTEQTKINEWARKSLHGRHRHDLCQPNVDKAASNAWLSRGELFPETEGFMIAIQDQIIETRNYQRHIMRILNLPTDLCRKCNSNSETIQHITGACKLIAQTEYKHRHDQAANIIHQKLAYKYNLISNLKPIPYYKYVPESVLENNEYRLYFDRAILTDRTIHYNRPDITLQDKKNRTAIIIDIAIPNTHNLQNTISEKLSKYTDLKDEIKRMWRLNEVSIVPIVLSTTGVIPKQLHQSLSLLNLPEFTYISLQKAVILNTCRIVRKFLQGSEEPTHRTGEPTHNHNNAQPQPST

SEQ ID NO: 20097 - protein, 1414 aa, Pararge aegeria
MELRSKRVLSILPLPGGDRRGTPGADAGCSSMRSVGDEALSRRALVDKFTTADITLARDSSSPISSTQSLFPSPNSSPNPYESAILTSPSSHVSSEFSMDVAQETTSVSKSVPTILKAKKLRMKWTDVYNEAIIRSYYRITKLESIKVTYRKPLHQQILMIFPELSHVSEQRVADQKRRIICNKLICQKRLEQIKKTVADELQLTSTHTQQKSIHTGQDTSSRMRWTDDLNESLMRCYYIVTESETNMTSYRTKLHKKFIDIHPDLSNISPQRLSDQRRSIVNNRLLDIKKLEKIKTDVLNMNITHINRPTQNAQLAHLNYQKTPNNVTLTTNDTSDINLLPHYNLLATYPYPRNTTDEETSETDVIKSNNNSLVHINHDIDNTFKETFSKYTDTDPTTRPFIWKQKSSKKFSIIIHYIDNNILPKYLNSDTDFKTLQTIIYCAAWTAAKCNGAKMDITAEQSNRMGPKKPNWERRLEKKREDLRVKIGRLIQYRNGNTSPMLTAQVRKIMDQYKVHSIHEGPNSCITQFIDTLKQKLTVIASRINRYRACTLRKTQNNQFQNNEKNFYRNLKLSTSNNTSSNHPSTPNTPEPDLVRKFWADIWEKPKDHNDKADWIRDEYDRNRHVQPMPFEFISIETFQNVIKKLHNWKAPGTDKIHNFWYKKFAYTHPFLHNHINNLIQDPASIPYYVMAGTTYMISKDPSDPTNPAKYRPITCLQTIYKIISSCITSLIYDHIENNRILAEPQKGCRKYSQGCKEQLIIDSVILRLVQKQKKELHSMYVDYKKAYDSVPHSWLLKVLDIYKIHPTLTNLLQTVMHKWTTRLKISHTESEPIHIKRGIFQGDSLSPLWFCLALNPLSNVLIAANVGYPLKYTKDNNMNEQITTQINHLMYMDDIKLYATTQKDLYQLANLTEQYSQDICMEFGIDKCKINAIKDGQSLQHTYHMEAGQQINSLEETEVYKYLGYNQGKLIEYKNTKTKLIQQFKHRLNSLVKSQLNSRNIIKAINSFSIPILTYSFGIINWSKTELKNIQRIINTTLTKHRKHHPRACFQRQTLPRHEGGRGIIDIQNLHNKQITTLRSYFYKKSTTSGLHQATVQSDAKLTPLNLKDKTFQKNETQTTEQTKINEWARKSLHGRHRHDLCQPNVDKAASNAWLSRGELFPETEGFMIAIQDQIIETRNYQRHIMRILNLPTDLCRKCNSNSETIQHITGACKLIAQTEYKHRHDQAANIIHQKLAYKYNLISNLKPIPYYKYVPESVLENNEYRLYFDRAILTDRTIHYNRPDITLQDKKNRTAIIIDIAIPNTHNLQNTISEKLSKYTDLKDEIKRMWRLNEVSIVPIVLSTTGVIPKQLHQSLSLLNLPEFTYISLQKAVILNTCKIVRKFLQGSEEPTHRTGEPTHNHNNVQPQPST

SEQ ID NO: 20098 - protein, 1478 aa, Pheosia gnoma
MEKVRNKYNLRPLPGGRRGTSGADAGCHSMRTIGDEGLSRRAPLDKCTTAEIHPDHNPSSPISSTHSLFKSPSSSPHNFEKPSSPTSSTDSEFSMGVVQETNSVEEPAPTTSTVKRTRMKWDNKLNESIIKSYYRITRLESIKTMYRKQLHQQFIHTFPHLADVSEQRVADQRRSIICNKLISKERLQEIKNEIAIELQSVNNLTDTDITTIATQSTTQPDRPTFTPQSFLQPTLSMTSRMRWSDELNESLMRCYFEVTELETNMTVYRQKLQMKFIEIHPEHSDISAQRLSDQRRSIVNNKLIDSNKLQDIKREIQQKNRRLQTESHCSSEHRHTLNVSQIDNHPTSLNLIPDIPIDTQITSTPIRNDTQPHIETNINLMSTHTQDTPDSSFLNNIHVEENALEINQEIEDNFLEALEYFTDVNPTNRPHIPKQKTSRKLGTIVNYINTKTLPKYVDTETEFNRLQTVIYCAAWTAAKCNGAKLSLLGNREHQIRSQRKPKWQIRLERKIEELRVKIGRMTQYVNGNRNATLTNQVIQIMNQYRMHSVHEDPNTQPSHFLDTLKQKLTLTTARLNRYRACTLRKIQNTQFTNNEKRFYRDLKNSTSNRTHNTSATLNTPTDEELRRFWAGIWEFPADHNEEAEWINDEENRNINIPPMQFENIPSNNFMTVIKRLHNWKAPGSDNIHNYWYKKFTYIHPYLHRHINNFIEHPHTIPDYIMAGTTYMIPKDTSDSKNPAKYRPITCLQAIYKIITSCITEVFHSHISNNNILAEQQKGCKRFSQGCKEQLTIDSVVLQKVKHAKSELHTMYIDYRKAYDSVPHSWLLKVLEIYKIHPLLINFLQTTMQKWTTRLRLTANIETTETTPISIKRGIFQGDSLSPLWFCLALNPLSNILNDTNDGYPLKYKDSETNRLITYRLNHLMYMDDIKLYAPSQNKLNQLTKLTEDFSEDIRMKFGIDKCRINSVRAGQNQDLSYTLENGDLITSLEHNEVYKYLGYNQSNQIQYKETKENLLLQFKHRLNTLLRSQLYSRNLIKSINTYAIPILTYSFGIVKWSKTQLKNIQRTMNTTMTKHRKHHPRACIQRQLLPRNEGGRGLIDITNLHNNQVHILRAYFHQKATTSLLHRAIEWNDKKLTPLNLQDRAQQNNEKLTSIQTKIDDWSRKSLHGRHRHDLCQPNVDKVASNAWLSRGELFPETEGFMIAIQDQIIETRNYQKYIIKIPNLPTDLCRKCNSCSETIQHITGACKSLAQTDYKHRHDQVANIIHQKIAHALKLTTNPPVPYYKYTPEVILENADYRLYFDRAILTDRTTHFNRPDITIHDKKNSTASIIDIAIPNTHNLQNTIAEKLSKYTDLKDEIQRMWRLNNVTIVPIVLSSTGVIPTQLHRSLKTLNLPPYIYTTLQKAVILNTCRIVRKFLQTDKDTYTSIHHSTTTSPSIQPQTHPLTPHQAQLFNQAPPQSLTQHQSQYPNQTHNLPG

SEQ ID NO: 20099 - protein, 1453 aa, Phalera bucephala
MDSYNRRYNLRPLPGGRRGTPGAGAGCLSMRTIGDEGLSRRVPVDKCTTAEVQQDHNLSSPISSTYSLFQSPSSSPHLFEIPSSPISSTNSEYSIGVAQAAKSVKVSVPTTSETKRARMKWNNELNEAIIRSYFRITRLDTLKTTYRKPLHQEFIHTFPHLAHISEQRVADQRRLIINNQLISRQRLQEIRDEISTELETAPNHTHNQIHSTTSQTITHHQYNEEPNNKTQTISHHTPGQLMITSKSRMRWPGQLNESLMRCYFEVTELETNMTIYRKRLYSRFQALHPEYAHISAQRLSDQRRSIVNNKLIDSVKLEEIRREVQDKCRHLQRHLQNNTNSRQVPNSPTRRGSPTLTYSDTQTEDNATIDNPTQNIQTMETLAPMQEILESSFLTSIHIDENDIQTNQEIEDTFQEALNQFTNCSPTDRPYIPRQKTSRKLSLIVYYINTIILPRYIDKSTEFNTLQTVIYAGAWTAAKCNGTKFQQLGDGNRRRRSKQKPKWQIRLENKVEQLRAHIGRMTQYVNGNRSETVVRQVAQIMDQNRTHSVHENPNTQPTHFLDTLKQKLILTSSRLKRYLACTLRKTQNIQFINNEKQFYRDLKNSTSNYTNSTHPGPNSPSQDELRSFWAGIWENPASHNDEAEWIKNEEDRNTNITPMEFESISEENLKNVIKKLHNWKAPGSDNIHNFWYKKFTHIHNYLCYHINNFIQNPHAIPDYITAGTTYMLQKDTSDFRNPAKYRPITCLQAIYKIISACITEVIHSHTNRNNILAEQQKGCKRYSQGCKEQLVIDSVVTLQVKKAKSELHTMYIDYRKAYDYVPHSWLLKVLKIYKIHPLLINFLQFTIQKWTTRLRLTWKGETIETDQIKIKRGIFQGDSLSPLWFCLALNPLSNILNDTQQGYPLKYKNNDSDRQSTYLLNHLMYMDDIKLYAPTQDVLFSLTKHIEDFSKDINMTFGIDKCKINSVKAGQNQELSYQLETGELITSLDQNDAYKYLGYNQSQHIQHKDTKTIIIQQFKHRLNTILRSQLYSRNLIKAINTFAIPILTYSFGIIKWSKTELKNIQRIINTTMTKHRKHHPRACIQRQLLPREEGGRGLIDVINLHNKQIINLRTYFHQKATVTPLHKTIEQNDIRLTPLNLHDKSHQSNECQTSLQAKIDEWTRKSLHGRHRHDLCQPNVDKSASNAWLSRGELLSETEGFMIAIQDQIIETRNYQKYIMKIPNLSTDLCRKCNSSSETIQHITGACKSIVQTDYKHRHDQVANIIHQKIAHILKLTTNQPVPYYKYTAESVLENCDYLLYYDRAILTDRTTHYNRPDVTIHNKKDHTAFIIDIAIPNTHNLQKTIAEKLSKYTDLKDEIKRMWRLNNVTIVPIVLSTTGVIPKQLHQSLRALNLPPSLYITLQKAVILNTCRIVRKFLQTDKDHFNPSSPSNILVQIQTDNQTSTYSLPNQS

SEQ ID NO: 20100 - protein, 1214 aa, Pheosia tremula
MRCYFEVTELETNMTVYRQKLQMKFIEIHPEHSDISAQRLSDQRRSIVNNNLIDSNKLLDIKREIQQKNRRLQTEPHCSSEHRHTLNVSQIDNHPTSPNLIPDIPIDTQITSTPIRNDTQTHIETNINLMSTHTQDTPDSSFLNNIHVEENGLEINQEIEDNFLEALEYFTDVNPTNRPHIPKQKTSRKLGTIVNYINTKTLPKYVDTETEFNRLQTVIYCAAWTAAKCNGAKLSLLGNREHQIRSRRKPKWQIRLERKIEELRVKIGRMTQYVNGNRNATLTNQVIQIMNQYRMHSVHEDPNTQPSHFLDTLKQKLTLTTARLNRYRACTLRKTQNTQFTNNEKRFYRDLKNSTSNRTHNTSATSNTPTDEELRRFWAGIWESPADHNEEAEWINDEENRNINIPRMQFENIPSNNFMTVIKRLHNWKAPGSDNIHNYWYKKFTYIHPYLHRHINNFIEHPHTIPDYIMEGTTYMIPKDTSDPKNPAKYRPITCLQAIYKIITSCITEVFHSHISNNNILAEQQKGCKRFSQGCKEQLTIDSVVLQKVKHAKSELHTMYIDYRKAYDSVPHSWLLKVLEIYKIHPLLINFLQTTMQKWTTRLRLTANIETTETNPVSIKRGIFQGDSLSPLWFCLALNPLSNILNETNDGYPLKYKDSETNRLTTYRLNHLMYMDDIKLYAPSQNKLNHLTKLTEDFSKDIRMKFGIEKCRINSVRAGQNQDLSYTLENGDLITSLEHNEVYKYLGYNQLNQIQYKETKENLLLQFKHRLNTLLRSQLYSRNLIKSINTYAIPILTYSFGIVKWSKTQLKNIQRTINTTMTKHRKHHPRACIQRQLLPRNEGGRGLIDITNLHNNQVHILRAYFHQKATTSLLHRAIEWNDKKLTPLNLQDRSQQNNEKLTSIQTKIDDWSRKSLHGRHRHDLCQPNVDKVASNAWLSRGELFPETEGFMIAIQDQIIETRNYQKYIIKIPNLPTDLCRKCNSCSETIQHITGACKSLAQTDYKHRHDQVANIIHQKIAHALKLTTNPPVPYYKYTPEVILENADYRLYFDRAILTDRTTHFNRPDITIHDKKNSTASIIDIAIPNTHNLQNTIAEKLSKYTDLKDEIQRMWRLNNVTIVPIVLSSTGVIPTQLHRSLKTLNLPPYIYTTLQKAVILNTCRIVRKFLQTDKDTYTSIHHSTTTSPSIQSQTHPLTPHQAQLFNQAPPQSLTQH

SEQ ID NO: 20101 - protein, 1524 aa, Phalera bucephala
MWKYLPRVLRESSKINNNNNNPPGGYDLDAVGGLTGSMGLYCLTLTSRLPSLTNYPQSILSILIFLFSICFMDSYNRRYNLRPLPGGRRGTPGAGAGCLSMRTIGDEGLSRRVPVDKCTTAEVQQDHNLSSPISSTYSLFQSPSSSPHPFEIPSSPISSTNSEYSIGVAQAAKSVKVSVPTTSETKRARMKWNNELNEAIIRSYFRITRLDTLKTTYRKPLHQEFIHTFPHLAHISEQRVAYQRRLIINNQLISRQRLQEIRDEISTELETAPNHTHNQIHSTTSQTITHHQYNEEPNNKTQTISHHTPGQLMITSKSRMRWPGQLNESLMRCYFEVTELETNMTIYRKRLYSRFQALHPEYAHISAQRLSDQRRSIVNNKLIDSVKLEEIRREVQDKCRHLQRHLQNNTNSRQIPNSPTHRGSPTLTYSDTQTEDNATIDNPTQNIQTMETLAPMQEILESSFLTSIHIDENDIQTNQEIEDTFQEALNQFTNCSPTDRPYIPRQKTSRKLSLIVYYINTIILPRYIDKSTEFNTLQTVIYAGAWTAAKCNGTKFQQLGDGNRRRRSKQKPKWQIRLENKVEQLRAHIGRMTQYVNGNRSETVVRQVAQIMDQNRTHSVHENPNTQPTHFLDTLKQKLILTSSRLKRYLACTLRKTQNIQFINNEKQFYRDLKNSTSNYTNSTHPGPNSPSQDELRSFWAGIWENPASHNDEAEWIKNEEDRNTNITPMEFESISEENLKNVIKKLHNWKAPGSDNIHNFWYKKFTHIHNYLCYHINNFIQNPHAIPDYITAGTTYMLQKDTSDFRNPAKYRPITCLQAIYKIISACITEVIHSHTNRNNILAEQQKGCKRYSQGCKEQLVIDSVVTLQVKKAKSELHTMYIDYRKAYDSVPHSWLLKVLKIYKIHPLLINFLQFTIQKWTTRLRLTWKGETIETDQIKIKRGIFQGDSLSPLWFCLALNPLSNILNDTQQGYPLKYKNNDSDRQSTYLLNHLMYMDDIKLYAPTQDVLFSLTKHIEDFSKDINMTFGIDKCKINSVKAGQNQELSYQLETGELITSLDQNDAYKYLGYNQSQHIQHKDTKTILIQQFKHRLNTILRSQLYSRNLIKAINTFAIPILTYSFGIIKWSKTELKNIQRIINTTMTKHRKHHPRACIQRQLLPRDEGGRGLIDVINLHNKQIINLRTYFHQKATVTPLHKTIEQNDIRLTPLNLHDKSHQSNECQTSLQAKIDEWTRKSLHGRHRHDLCQPNVDKSASNAWLSRGELFPETEGFMIAIQDQIIETRNYQKYIMKIPNLSTDLCRKCNSSSETIQHITGACKSIVQTDYKHRHDQVANIIHQKIAHILKLTTNQPVPYYKYTAESVLENCDYRLYYDRAILTDRTTHYNRPDVTIHNKKDHTAFIIDIAIPNTHNLQKTIAEKLSKYTDLKDEIKRMWRLNNVTIVPIVLSTTGVIPKQLHQSLRALNLPPSLYITLQKAVILNTCRIVRKFLQTDKDHFNPSSPSNILVQIQTDNQTSTYSLPNQS

SEQ ID NO: 20102 - protein, 1487 aa, Phalera bucephala
MGLYCLTLTSRLPSLTNYPQSILSILIFPFSICFMDSYNRRYNLRPLPGGRRGTPGAGAGCLSMRTIGDEGLSRRVPVDKCTTAEVQQDHNLSSPISSTYSLFQSPSSSPHPFEIPSSPISSTNSEYSIGVAQAAKSVKVSVPTTSETKRARMKWNNELNEAIIRSYFRITRLDTLKTTYRKPLHQEFIYTFPHLAHISEQRVADQRRLIINNQLISRQRLQEIRDEISTELETAPNHTHNQIHSTTSQTITHHQYNEEPNNKTQTISHHTPGQLMITSKRRMRWPGQLNESLMRCYFEVTELETNMTIYRKRLYSRFQALHPEYAHISAQRLSDQRRSIVNNKLIDSVKLEEIRREVQDKCRHLQRHLQNNTNSRQVPNSPTRRGSPTLTYSDTQTEDNATIDNPTQNIQTMETLAPMQEILESSFLTSIHIDENDIQTNQEIEDTFQEALNQFTNCSPTDRPYIPRQKTSRKLSLIVYYINTIILPRYIDKSTEFNTLQTVIYAGAWTAAKCNGTKFQQLGDGNRRRRSKQKPKWQIRLENKVEQLRAHIGRMTQYVNGNRSETVVRQVAQIMDQNRTHSVHENPNTQPTHFLDTLKQKLILTSSRLKRYLACTLRKTQNIQFTNNEKQFYRDLKNSTSNYTNSTHPGPNSPSQDELRSFWAGIWENPASHNDEAEWIKNEEDRNTNITPIEFESISEENLKNVIKKLHNWKAPGSDNIHNFWYKKFTHIHNYLCYHINNFIQNPHAIPDYITAGTTYMLQKDTSDFRNPAKYRPITCLQAIYKIISACITEVIHSHTNSNNILAEQQKGCKRYSQGCKEQLVIDSVVTLQVKKAKSELHTMYIDYRKAYDSVPHSWLLKVLKIYKIHPLLINFLQFTIQKWTTRLRLTWKGETIETDQIKIKRGIFQGDSLSPLWFCLALNPLSNILNDTQQGYPLKYKNNDSDRQSTYLLNHLMYMDDIKLYAPTQNVLFSLTKHIEDFSKDINMTFGIDKCKINSVKAGQNQELSYQLETGELITSLDQNDAYKYLGYNQSQHIQHKDTKTILIQQFKHRLNTILRSQLYSRNLIKAINTFAIPILTYSFGIIKWSKTELKNIQRIINTTMTKHRKHHPRACIQRQLLPREEGGRGLIDVINLHNKQIINLRTYFHQKATVTPLHKTIEQNDIRLTPLNLHDKSHQSNECQTSLQAKIDEWTRKSLHGRHRHDLCQPNVDKSASNAWLSRGELFPETEGFMIAIQDQIIETRNYQKYIMKIPNLSTDLCRKCNSSSETIQHITGACKSIVQTDYKHRHDQVANIIHQKIAHILKLTTNKPVPYYKYTAESVLENCDYRLYYDRAILTDRTTHYNRPDVTIHNKKDHTAFIIDIAIPNTHNLQKTIAEKLSKYTDLKDEIKRMWRLNNVTIVPIVLSTTGVIPKQLHQSLRALNLPPSLYITLQKAVILNTCRIVRKFLQTDKDHFNPSSPSNILVQIQTDNQTSTYSLPNQS

SEQ ID NO: 20103 - protein, 921 aa, Furcula furcula
MNEYRSHSVHENSNTQPLHFLDTLKQKLTLTTARLKRYRACTLRKTQNTQFNNNEKRFYRELKASASNTHTTADTSTSLSEHDLQRFWTRIWEDSTNHNDEAEWIGQEEKRNANITLMEFEILPRESFDIVLKKLHNWKAPGSDNIHNFWYKKFTHLHPYLLNHINDFIQNPHIIPDYIMTGITYMIPKDPSDPGNPAKYRPITCLQTIYKIINACITEVIYSHISKNKILAEQQNGCRRANQGCKELLTIDSVILNHVKRTKGELHTMYIDYRKAYDSVPHSWLLKVLEIYKIHPLLIRFLQTIMQKWTTRLRLTCNLDTLETDPIKIKCGIFQGDSLSPLWFCLALNPLSNILNETNNGYLLKYQDIESDRLTTYRLNHLMYMDDIKLYAPSQNILFKLAKFTEDFSRDIRMQFGIDKCKINSVKAGQTQELGYTLESGELISSLDHSEVYKYLGYNQNHQIKHKEIKHKLLQQFKHRLNTLLRSQLYSRNLTKAINTYAIPILTYSFGIIKWTKTELKNIQRNINTSMTKHRKHHPRACTQRQTLPREEGGRGLIDILNLHNKQISALRTYFHQKAKDNPLHKTIEYNDKKLTPLNLQDRSQQKNESQTSIQSKLNEWSSKSLHGRHPHDLSQPNVDKLSSNAWLRSGELFPETEGFMIAIQDQTIETRNYQKYIIKTPNLPTDICRKCSSYPETIQHITGACKSIVQTDYKHRHDQVANIIHQKLALKLKLITNKPVPYYKYTPEAVLENAQYRLYFDRAILTDRTTHFNRPDITIHDKKNRIAFIIDIAVPNTHNLQTTISEKLSKYTDLKSEIKSMWQLNSVTIVPVVLSTTGVIPVQLHQSLKTLNLSPYTYMTLQKAVILNTCRIVRKFLTNDKETQFDTQHVIPSLTTQPQTDLIQQQPQTTTIYSHTNAPN

SEQ ID NO: 20104 - protein, 944 aa, Furcula furcula
MTQYINGNRSERLVRKVNQIMNQYRTHSVHENPNTQPSHYLDTLKQKLTVTASRLNRYRVCTLRKSQNTQFNNNEKHFYRDLKSSSSNTQNTNTISDLPSKDELQRFWAGIWEDPVNHNDKAEWIAQEEIKHTNTSPMAFEAVPTEVFENVIRNLHNWKAPGTDNIHNFWYKKFSYIHPHLHNHINRFIQDPHLIPDYVMSGITYMIPKDTSDSTNPAKYRPITCLQTIYKIISSCITELILLHISNNKVLAEQQKGCRRFSQGCKEQLIIDSILLQLVKKSKDELYTMYIDYKKAYDSVPHSWLLKVLDIYKIHPVLITFLQTIIKKWMTRLRMKSNLETIETDPIHIKRGIFQGDSLSPLWFCLALNPLSNILNHTNNGYPLKCNTDESDRIITYQLNHLMYMDDIKLFAHSQSNLYKLAKLTEDFSRDINMQFGIDKCKINSVKAGQIQKLSYTLDTGQLITSLEQNEVYKYLGYNQSHHIQYKKIKSELLQQFRHRLNILLRSQLYSGNLTKAINTYVIPILTYSFGIIKWSKTELKNVQRIINTSMTKHRKHHPRACVQRQTLSRKEGGRGLIDITNLHNKQVSTLRTYFYHRSIESSLHKAVVYNDNKLTPLNLQDRSQQSNEIQTPIENKITEWSRKSLHGRHRHHLCQPNVDKVASNAWLSHGELFPETEGFMIAIQDQIIETRNYQKYIIKVPNIRTDLCRKCNSCPETIQHITGACKSIVQTDYKHRHDQVANIIHQKIAFNLNLNNNKLIPYYKYTPESVLENSQYRLYFDRAILTDRTTHYNRPDITIHDKNNHTAIIIDIAIPNTHNIQSTIAEKLAKYTDLKDEIKRMWRLNHVTIVPIVLSTTGVIPIQLHHSLKSLNLPPYTYITLQKAVILNTCRIVRKFLQTDKDVHINTENFALSITRSSFAQPSITQPLNSQLAPGYPYDHISD

SEQ ID NO: 20105 - protein, 1462 aa, Phalera bucephala
MDSYNRRYNLRPLPGGRRGTPGADAGCLSMRTIGDEGLSRRVPVDKCTTAEVHHDHNLSSPISSTHSLFQSPSSSPHPFEMPSSPVSSANSEASRSVAHETNSVGDHVPTMTNTKRTRMKWDNQLNEAIMKSYYRITRLETIKTIYRKPLYQQFLHAFPHLAHLSEQRVADQKRSIIYNKLISKERLQEIRNEIASEIQTIENLPQNNINTSQSDIHFQNTQQPNRNTPITQLQEHGQLTNNNKSRMRWSDALNESLMRCYFEVTENETNMTIYRKRLHIRFQQLHPEYFDISEQRLADQRRSIVNNKLIRPERLKEIKKDIQDKYRYSQSQSHTNTHYRHTPNVSRTVTPTTTHLDLHTDMEIVNISAHDTTGLLSSTQTQSLPACLPESSFLNSIHLEENTINYNPEIEDTFQHALHQFTNHNPQDRPYIPKQKSSRKLSVIVNYINTVILPKYVDITTNFNSLQNIIYCGAWTAAKCNGCKLLQIRNNNSNTTSRRKPKWQIRLEKKVDHLRASIGRMTQYINGNRTETLTRQIAQIMKQYRTHSIHENVNTQPSHFLDTLKQKLTLTSSRLNRYRTCTLRKTQNTHFTNNERRFYHELKTSTTNGADNTTPDRPSRDDLRNFWAGIWEHPVNHNAEAEWIKKEEDRSANIVPMDFEAISNEHFQNVIRKLQNWKAPGTDNVHNYWYKKFTKVHHCLLNHINNFIQNPRIIPNYIMTGTTYMIPKDTSDSKNPAKYRPITCLQAIYKIITSCITEVIHSHTNSNNILAEQQKGCKRLSRGCKEQLIIDAVILHQVKKTKNELHTMYIDYKKAYDSVPHSWLLKVLKIYKIHPLLIHFLQITIQKWTTKLRLTSNNETIETDPIQIKRGIFQGDSLSPLWFCLALNPLSNLLNDTKDGYPLNCKDNDSDALTTYQVNHLMYMDDIKLYAPTQNKLYSLAKTTEDFSEDIHMLFGIDKCKINSVKAGQNQELSYPLKTGQLITSLEPNQVYKYLGYNQAHHIQYKETKMKLIQQFKHRLNTLLRSQLYARNLTKAINTYAIPILTYSFGVIKWSKAELKNIQRTINTTMTKHRKHHPRACIQRQTLPREEGGRGIIDVTNLHNRQILNLRAYFHKKATESHLHKTIVYNDNKLTSLNLTDKLPQKNEKLVTIETKLVEWSRKSLHGRHRHDLSQPNVDKIASNAWLSRGELFPETEGFMIAIQDQTIETRNYQKYIIKIPRLPTDQCRKCNSCTETIQHITGACKSLVQTDYKHRHDQVANIIHQKIAHNLKLMANQPIPYYKYTPEAVLENSDYRLYFDRAILTDRTTHYNRPDITIHDKKNHTAFIIDIAVPNTHNLQATIAEKLSKYTDLKDEIRRMWRLNTVTIVPIVLSTTGVIPKQLHQSIKTLNLPPFIYITLQKAVILNTCRIVRKFLQTDKDTHIAITQPSSSFSIQTQRPTPIEHQSYTHSPQSQIQNLSG

SEQ ID NO: 20106 - protein, 1212 aa, Phalera bucephala
MITSKSRMRWPGQLNESLMRCYFEVTELETNMTIYRKRLYSRFQALHPEYAHISAQRLSDQRRSIVNNKLIDSVKLEEIRREVQDKCRHLQRHLQNNTNSRQVPNSPTRRGSPTLTYSDTQTEDNATIDNPTQNIQTMETLAPMQEILESSFLTSIHIDENDIQTNQEIEDTFQEALNQFTNCSPTDRPYIPRQKTSRKLSLIVYYINTIILPRYIDKSTEFNTLQTVIYAGAWTAAKCNGTKFQQLGDGNRRRRSKQKPKWQIRLENKVEQLRAHIGRMTQYVNGNRSETVVRQVAQIMDQNRTHSVHENPNTQPTHFLDTLKQKLILTSSRLKRYLACTLRKTQNIQFINNEKQFYRDLKNSTSNYTNSTHPSPNSPSQDELRSFWAGIWENPASHNDEAEWIKNEEDRNTNITPMEFESISEENLKNVIKKLHNRKAPGSDNIHNFWYKKFTHIHNYLCYHINNFIQNPHAIPDYITAGTTYMLQKDTSDFRNPAKYRPITCLQAIYKIISACITEVIHSHTNRNNILAEQQKGCKRYSQGCKEQLVIDSVVTLQVKKAKSELHTMYIDYRKAYDSVPHSWLLKVLKIYKIHPLLINFLQFTIQKWTTRLRLTWKGETIETDQIKIKRGIFQGDSLSPLWFCLALNPLSNILNDTQQGYPLKYKNNDSDRQSTYLLNHLMYMDDIKLYAPTQDVLFSLTKHIEDFSKDINMTFGIDKCKINSVKAGQNQELSYQLETGELITSLDQNDAYKYLGYNQSQHIQHKDTKTILIQQFKHRLNTILRSQLYSRNLIKAINTFAIPILTYSFGIIKWSKTELKNIQRIINTTMTKHRKHHPRACIQRQLLPREEGGRGLIDVINLHNKQIINLRTYFHQKATVTPLHKTIEQNDIRLTPLNLHDKSHQSNECQTSLQAKIDEWTRKSLHGRHRHDLCQPNVDKSASNAWLSRGELFPETEGFMIAIQDQIIETRNYQKYIMKIPNLSTDLCRKCNSSSETIQHITGACKSIVQTDYKHRHDQVANIIHQKIAHILKLTTNQPVPYYKYTAESVLENCDYRLYYDRAILTDRTTHYNRPDVTIHNKKDHTAFIIDIAIPNTHNLQKTIAEKLSKYTDLKDEIKRMWRLNNVTIVPIVLSTTGVIPKQLHQSLRALNLPPSLYITLQKAVILNTCRIVRKFLQTDKDHFNPSSPSNILVQIQTDNQTSTYSLPNQS

SEQ ID NO: 20107 - protein, 1453 aa, Phalera bucephala
MDSYNRRYNLRPLPGGRRGTPGASAGCLSMRTIGDEGLSRRVPVDKCTTAEVQQDQNLSSPISSTYSLFQSPSSSPHPFEIPSSPISSTNSEYSIGVAQAAKSVKVSVPTTSETKRARMKWNNELNEAIIRSYFRITRLDTLKTTYRKPLHQEFIHTFPHLAHISEQRVADQRRLIINNQLISRQRLQEIRDEISTELETAPNHTHNQIHSTTSQTITHHQYNEEPNNKTQTISHHTPGQLMITSKSRMRWPGQLNESLMRCYFEVTELETNMTIYRKRLYSRFQALHPEYAHISAQRLSDQRRSIVNNKLIDSVKLEEIRREVQDKCRHLQRHLQNNTNSRQVPNSPTRRGSPTLTYSDTQTEDNATIDNPTQNIQTMETLTPMQEILESSFLTSIHIDENDIQTNQEIEDTFQEALNQFTNCSPTDRPYIPRQKTSRKLSLIVYYINTIILPRYIDKSTEFNTLQTVIYAGAWTAAKCNGTKFQQLGDGNRRRRSKQKPKWQIRLENKVEQLRAHIGRMTQYVNGNRSETVVRQVAQIMDQNRTHSVNENPNTQPTHFLDTLKQKLILTSSRLKRYLACTLRKTQNIQFINNEKQFYRDLKNSTSNYTNSTHPGPNSPSQDELRSFWAGIWENPASHNDEAEWIKNEEDRNTNIIPMEFESISEENLKNVIKKLHNWKAPGSDNIHNFWYKKFTHIHNYLCYHINNFIQNPHAIPEYITAGTTYMLQKDTSDFRNPAKYRPITCLQAIYKIISACITEVIHSHTNRNNILAEQQKGCKRYSQGCKEQLVIDSVVTLQVKKAKSELHTMYIDYRKAYDSVPHSWLLKVLKIYKIHPLLINFLQFTIQKWTTRLRLTWKGETIETDQIKIKRGIFQGDSLSPLWFCLALNPLSNILNDTQQGYPLKYKNNDSDRQSTYLLNHLMYMDDIKLYAPTQNVLFSLTKHIEDFSKDINMTFGIDKCKINSVKAGQNQELSYQLETGELITSLDQNDAYKYLGYNQSQHIQHKDTKTILIQQFKHRLNTILRSQLYSRNLIKAINTFASPILTYSFGIIKWSKTELKNIQRIINTTMTKHRKHHPRACIQRQLLPREEGGRGLIDVINLHNKQIINLRTYFHQKATVTPLHKTIEQNDIRLTPLNLHDKSHQSNECQTSLQAKIDEWTRKSLHGRHRHDLCQPNVDKSASNAWLSRGELFPETEGFMIAIQDQIIETRNYQKYIMKIPNLSTDLCRKCNSSSETIQHITGACKSIVQTDYKHRHDQVANIIHQKIAHILKLTTNQPVPYYKYTAESVLENCDYRLYYDRAILTDRTTHYNRPDVTIHNKKDHTAFIIDIAIPNTHNLQKTIAEKLSKYTDLKDEIKRMWRLNNVTIVPIVLSTTGVIPKQLHQSLRALNLPPSLYITLQKAVILNTCRIVRKFLQTDKDHFNPSSPSNILVQIQTDNQTSTYSLPNQS

SEQ ID NO: 20108 - protein, 1478 aa, Pheosia tremula
MEKVRNKYNLRPLPGGRRGTSGADAGCHSMRTIGDEGLSRRAPLDKCTTAENHPDHNPSSPISSTHSLFKSPSSSPHNFEKPSSPTSSTDSEFSMGVVQETNSVEEPAPTTSTVKRTRMKWDNKLNESIIKSYYRITRLESIKTMYRKQLHQQFIHTFPHLADVSEQRVADQRRSIICNKLISKERLQEIKNEIAIELQSVNNLTDTDITTIATQSTTQPDRPTFTPQSFLQPTLSMTSRMRWSDELNESLMRCYFEVTELETNMTVYRQKLQMKFIEIHPEHSDISAQRLSDQRRSIVNNKLIDSNKLQDIKREIQQKNRRLQTEPHCSSEHRHTLNVSQIDNHPTSPNLIPDIPIDTQITSTPIRNDTQPHIETNINLMSTHTQDTPDSSFLNNIHVEENALEINQEIEDNFLEALEYFTDVNPTNRPHIPKQKTSRKLGTIVNYINTKTLPKYVDTETEFNRLQTVIYCAAWTAAKCNGAKLSLLGNREHQIRSQRKPKWQIRLERKIEELRVKIGRMTQYVNGNRNATLTNQVIQIMNQYRMHSVHEDPNTQPSHFLDTLKQKLTLTTARLNRYRACTLRKTQNTQFTNNEKRFYRDLKNSTSNRTHNTSATLNTPTGEELRRFWAGIWEFPADHNEEAEWINDEENRNINIPPMQFENIPSNNFMTVIKRLHNWKAPGSDNIHNYWYKKFTYIHPYLHRHINNFIEHPHTIPDYIMAGTTYMIPKDTSDPKNPAKYRPITCLQAIYKIITSCITEVFHSHISNNNILAEQQKGCKRFSQGCKEQLTIDSVVLQKVKHAKSELHTMYIDYRKAYDSVPHSWLLKVLEIYKIHPLLINFLQTTMQKWTTRLRLTANIETTETTPISIKRGIFQGDSLSPLWFCLALNPLSNILNDTNDGYPLKYKDSETTRLTTYRLNHLMYMDDIKLYAPSQNKLNQLTKLTEDFSEDIRMKFGIDKCRINSVRAGQNQDLSYTLENGDLITSLEHNEVYKYLGYNQSNQIQYKETKENLLLQFKHRLNTLLRSQLYSRNLIKSINTYAIPILTYSFGIVKWSKTQLKNIQRTMNTTMTKHRKHHPRACIQRQLLPRNEGGRGLIDITNLHNNQVHILRAYFHQKATTSLLHRAIEWNDKKLTPLNLQDRAQQNNEKLTSIQTKIDDWSRKSLHGRHRHDLCQPNVDKVASNAWLSRGELFPETEGFMIAIQDQIIETRNYQKYIIKIPNLPTDLCRKCNSCSETIQHITGACKSLAQTDYKHRHDQVANIIHQKIAHALKLTTNPPVPYYKYTPEVILENADYRLYFDRAILTDRTTHFNRPDITIHDKKNSTASIIDIAIPNTHNLQNTIAEKLSKYTDLKDEIQRMWRLNNVTIVPIVLSSTGVIPTQLHRSLKTLNLPPYIYTTLQKAVILNTCRIVRKFLQTDKDTYTSIHHSTTTSPSIQPATHPLTPHQAQLFNQAPPQSLTQHQSQYPNQTHNLPG

SEQ ID NO: 20109 - protein, 1534 aa, Furcula furcula
MIIRAMSVEPLMPDRSKVRRQTKRDTTNFWSTPRPEVFLTLYSYDPSTFTHPKPYPLYFYYPIIQVKVEQHTPRTAWLGECLAISMRTRDTRESPVLFNPCHGERRALPWSKFLSLATRGKTMITRSKTKTNMKLNKQASESKSTTSEDHHDYNLSSPTPSAHSLSQSSSSPCHQFKNQSSPISSSNDDLSIGVAQEIESIREPVPTTSNTTRTRVKWNNELNEAIIKSYYRITSVETVKTVYRKSLHHQFIQTFPHLTHVSEQRVADQKRLILHKNLITNERLQEIRNEIAIELQLSQNHTQPQNQHTTLPQCTQSDVRTRMRWSNELNEGLIRCYFEVTEAETNLTIYRKRLHSKFIETYPEYSHISAQQLSDQRRSIVNNRLITVEKLSEIKKSVQEHYRYIQSPPQVTPEYRLIQDFAHTNISTTNAIVYPNTTTAPEATSTGNLTCPLSETITPITLTQTPDTSGPPEENTTENQDIENTFQETLENFTGTDHTKRPQIPKQKSSRKLSRIVDYINSRILPKYVDMNIDFNKLQTIIYCAAWTASKCNGAKILQNNNREYRRIRPQRKPRWQLRLENKVEMLRAKIGRMTQYINGNRSETLNFKVNQIMNEYRTHSVHENSNTQPSHFLDTLKQKLTLTTARLKRYRACTLRKTQNTQFNNNEKRFYRELKASASNTHTTADTSTSLSEHDLQRFWTRIWEDSMNHNDEAEWIGQEEKRNANITLMEFEMLPRESFDIVLKKLHNWKAPGSDNIHNFWYKKFTHLHPYLLNHINDFIQNPHIIPDYIMTGITYMIPKDPSDPGNPAKYRPITCLQTIYKIINACITEVIYSHISKNKILAEQQNGCRRANQGCKELLTIDSVILNHVKRTKGELHTMYIDYRKAYDSVPHSWLLKVLEIYKIHPLLIRFLQTIMQKWTTRLRLTCNLDTLETDPIKIKCGICQGDSLSPLWFCLALNPLSNILNETNNGYLLKYQDIESDRLTTYRLNHLMYMDDIKLYAPSQNILFKLTKFTEDFSRDIRMQFGIDKCKINSVKAGQTQELSYTLESGELNSSLDHSEVYKYLGYNQNHQFKHKEIKHKLLRQFKHRLNTLLRSQLYSRNLTKAINTYAIPILTYSFGIIKWTKTELKNIQRIINTSMTKHRKHHPRACTQRQTLPREEGGRGLIEILKLHNKQISALRTYFHQKAKDNPLHKTIEYNDKKLTPLNLQDRSQQKNESQTSIQSKLNEWSSKSLHGRHLHDLSQPNVDKLSSNAWLRSGELFPETEGFMIAIQDQTIETRNYQKYIIKTPNLPTDICRKCSSCPETIQHITGACKSIVQTDYKHRHDQVANIIHQKLALKLKLITNKPVPYYKYTPEAVLENAQYRLYFDRAILTDRTTHFNRPDITIHDKKNRIAFIIDIAVPNTHNLQTTISEKLSKYTDLKSKIKSMWHLNSVTIVPVVLSTTGVIPVQHHQSLKTLNLSPYTYMTLQKAVILNTCRIVRKFLTNDKETQLDTQHVIPSLTTQPQTDLIQQQPQTTTIYSHTNASN

SEQ ID NO: 20110 - protein, 933 aa, Pheosia gnoma
MHSVHEDPNTQPSHFLDTLKQKLTLTTARLNRYRACTLRKTQNTQFTNNEKRFYRDLKNSTSNRTHNTSATLNTPTDEELRRFWAGIWEFPADHNEEAEWINDEENRNINIPPMQFENIPSNNFMTVIKRLHNWKAPGSDNIHNYWYKKFTYIHPYLHRHINNFIEHPHTIPDYIMAGTTYMIPKDTSDSKNPAKYRPITCLQAIYKIITSCITEVFHSHISNNNILAEQQKGCKRFSQGCKEQLTIDSVVLQKVKHAKSELHTMYIDYRKAYDSVPHSWLLKVLEIYKIHPLLINFLQTTMQKWTTRLRLTANIETTETTPISIKRGIFQGDSLSPLWFCLALNPLSNILNDTNDGYPLKYKDSETNRLTTYRLNHLMYMDDIKLYAPSQNKLNQLTKLTEDFSEDIRMKFGIDKCRINSVRAGQNQDLSYTLENGDLITSLEHNEVYKYLGYNQSNQIQYKETKENLLLQFKHRLNTLLRSQLYSRNLIKSINTYAIPILTYSFGIVKWSKTQLKNIQRTMNTTMTKHRKHHPRACIQRQLLPRNEGGRGLIDITNLHNNQVHILRAYFHQKATTSLLHRSIEWNDKKLTPLNLQDRAQQNNEKLTSIQTKIDDWSRKSLHGRHRHDLCQPNVDKVASNAWLSRGELFPETEGFMIAIQDQIIETRNYQKYIIKIPNLPTDLCRKCNSCSETIQHITGACKSLAQTDYKHRHDQVANIIHQKIAHALKLTTNPPVPYYKYTPEVILENADYRLYFDRAILTDRTTHFNRPDITIHDKKNSTASIIDIAIPNTHNLQNTIAEKLSKYTDLKDEIQRMWRLNNVTIVPIVLSSTGVIPTQLHRSLKTLNLPPYIYTTLQKAVILNTCRIVRKFLQTDKDTYTSIHHSTTTSPSIQPQTHPLTPHQAQLFNQAPPQSLTQHQSQYPNQTHNLPG

SEQ ID NO: 20111 - protein, 1438 aa, Phalera bucephala
MDSYNRRYNLRPLPGGRRGTPGADAGCLSMRTIGDEGLSRRVPVDKCTTAEVHHDHNLSSPISSTHSLFQSPSSSPHPFEIPSSPVSSANSEASRSVAHETNSVGDHVPTMTNTKRTRMKWDNQLNEAIMKSYYRITRLETIKTIYRKPLYQQFLHAFPHLAHLSEQRVADQKRSIIYNKLISKERLQEIRNEIASEIQTIENLPQNNINTSQSDIHFQNTQQPNRNTPITQLQEHGQLTNNNKSRMRWSDALNESLMRCYFEVTENETNMTIYRKRLHIRFQQLHPEYLDISEQRLADQRRSIVNNKLIRPERLKEIKKDIQDKYRYSQSQSHTNTHYRHTPNVSRTVTPTTTHLDLHTDMEIVNISAHDTTGLLSSTQTQSLPACLPESSFLNSIHLEGNTINYNREIEDTFQHALHQFTNYNPQDRPYIPKQKSSRKLSVIVNYINTVILPKYVDITTNFNSLQNIIYCGAWTAAKCNGCKLLQIGNNNSNTTLRRKPKWQIRLEKKVDHLRASIGRMTQYINGNRTETLTRQIVQIMKQYRTHSIHENDNTQPSHFLDTLKQKLTLTSSRLNRYRTCTLRKTQNTHFTNNERRFYHELKTSTTNGADNTAPDRPSRDELRNFWAGIWEHPVNHNAEAEWIKKEEDRSANIVPMDFEAISNEHFQNVIRKLQNWKAPGTDNVHNFWYKKFTQVHHCLLNHINNFIQNPRIIPNYVMTGTTYMIPKDTTDSKNPAKYRPITCLQAIYKIITSCITEVIHSHTSSNNILAEQQKGCKRLSQGCKEQLIIDSVILHQVKKTKNELHTMYIDYKKAYDSVPHSWLLKVLKIYKIHPLLIHFLQITIQKWTTKLRLTSNNETIETDPIQIKRGIFQGDSLSPLWFCLALNPLSNLLNDTKDGYPLNCKDNDSDALTTYQVNHLMYMDDIKLYAPTQNKLYSLAKTTEDFSEDIHMLFGIDKCKINSVKAGQNQELSYPLKTGQLITSLEPNQVYKYLGYNQAHHIQYKETKMKLIQQFKHRLNTLLRSQLYARNLTKAINTYAIPILTYSFGVIKWSKAELKNIQRTINTTMTKHRKHHPRACIQRQTLPREEGGRGLIDVTNLHNRQILNLRAYFHKKATESHLHKTIVYNDNKLTSLNLTDKLPQKNEKLVTIETKLVEWSRKSLHGRHRHDLSQPNVDKIASNAWLSRGELFPETEGFMIAIQDQTIETRNYQKYIIKIPRLPTDQCRKCNSCTETIQHITGACKSLVQTDYKHRHDQVANIIHQKIAHNLKLIANQPIPYYKYTPEAVLENSDYRLYFDRAILTDRTTHYNRPDITIHDKKNHTAFIIDIAVPNTHNLQATIAEKLSKYTDLKDEIRRMWRLNTVTIVPIVLSTTGVIPKQLHQSIKTLNLPPFIYITLQKAVILNTCRIVRKFLQTDKDTHIAITQPSSSFSIQT

SEQ ID NO: 20112 - protein, 1534 aa, Furcula furcula
MIIRAMSVEPLMPDRSNVRRQTKRDTTNFWSTPRPEVFLTLYSYDPSTFTHPKPYPLYFYYPIIQVKVEQHTPRTAWLGECLAISMRTRDTRESPVLFNPCHGERRALPWSKFLSLATRGKTMITRSKTKTNMKLNKQASESKSTTSEYHHDYNLSSPTPSAHSLSQSSSSPCHQFQIQSSPISSSNDDLSIGVAQEIESIREPVPTTSNTTRTRVKWNNELNEAIIKSYYRITSVETVKTVYRKSLHHQFIQTFPHLTHVSEQRVADQKRLILHKNLITNERLQEIRNEIAIELQLSQNHTQPQNQHTTLPQCTQPDVRTRMRWSNELNEGLIRCYFEVTEAETNLTIYRKRLHSKFIETYPEYSHISAQQLSDQRRSIVNNRLITVEKLSEIKKSVQEHYRYIQSPPQVTPEYRLIQDFAHTNISTTNAIVYPNTTTAPEATSTGNLTCPLSETITPITLTHTPDTSGPPEENTTENQDIENTFQETLENFTGTDPTKRPQIPKQKSSRKLSRIVDYINSRILPKYVDMNIDFNKLQTIIYCAAWTASKCNGAKILQNNNREYRRIRPQRKPRWQLRLENKVEMLRTKIGRMTQYINGNRSETLNFKVNQIMNEYRTHSVHENSNTQPLHFLDTLKQKLTLTTARLKRYRACTLRKTQNTQFNNNEKRFYRELKASASNTHTTADTSTSLSEHDLQRFWTRIWEDSTNHNDEAEWIGQEEKRNANITLMEFEILPRESFDIVIKKLHNWKAPGSDNIHNFWDKKFTHLHPYLLNHINDFIQNPHIIPDYIMTGITYMIPKDPSDPGNPAKYRPITCLQTIYKIINACITEVIYSHISKNKILAEQQNGCRRANQGCKELLTIDSVILNHVKITKGELHTMYIDYRKAYDSVPHSWLLKVLEIYKIHPLLIRFLQTIMQKWTTRLRLTCNLDTLETDPIKIKCGIFQGDSLSPLWFCLALNPLSNILNETNNGYLLKYQDIESDRLTTYRLNHLMYMDDIKLYAPSQNILFKLAKFTEDFSRDIRMQFGIDKCKINSVKAGQTQELGYTLESGELISSLDHSEVYKYLGYNQNHQIKHKEIKHKLLQQFKHRLNTLLRSQLYSRNLTKAINTYAIPILTYSFGIIKWTKTELKNIQRIINTSMTKHRKHHPRACTQRQTLPREEGGRGLIDILNLHNKQISALRTYFHQKAKDNPLHKTIEYNDKKLTPLNLQDRSQQKNESQTSIQSKLNEWSSKSLHGRHPHDLSQPNVDKLSSNAWLRSGELFPETEGFMIAIQDQTIETRNYQKYIIKTPNLPTDICRKCSSCPETIQHITGACKSIVQTDYKHRHDQVANIIHQKLALKLKLITNKPVPYYKYTPEAVLENAQYRLYFDRAILTDRTTHFNRPDITIHDKKNCIAFIIDIAVPNTHNLQTTISEKLSKYTDLKSEIKSMWQLNSVTIVPVVLSTTGVIPVQLHQSLKTLNLSPYTYMTLQKAVILNTCRIVRKFLTNDKETQLDTQHVIPSLTTQPQTDLIQQQPQTTTIYSHTNAPN

SEQ ID NO: 20113 - protein, 1123 aa, Furcula furcula
MHGDESANITSTNISTYTDLPTGTEVINNPHSHIETITTSTSTEALITSENTFLHNIQVEESSDETHVIEDIFKEALEHFTDTDPTKRPYIPKQKTSRKLTKIVCSLNTIILPKYINIDTDFNALQTAVYCAAWTAAKCNGAKILEYRNDGCRIKFQTKPRWQIRLEKKDEDLRANIGRMTQYINGNRSETLVRKINQIMNQYRTHSVHENPNTQPSHYLDTLKQKLTVTASRLNRYRVCTLRKSQNTQFNNNEKHFYRDLKSSSSNTQNTNTISDLPSKDELQRFWAGIWEDPVNHNDKAEWIAQEEIKHTNTSPMAFEAVPTEVFENVIRKLHNWKAPGSDNIHNFWYKKFTYIHPHLHNHINRFIQDPHLIPDYVMSGITYMIPKDTSDSTNPAKYRPITCLQTIYKIISSCITELILLHISNNKVLAEQQKGCRRFSQGCKEQLIIDSILLQLVKKSKDELYTMYIDYRKAYDSVPHSWLLKVLDIYKIHPVLITFLQTIIKKWMTRLRMKSNLETIETDPIQIKRGIFQGDSLSPLWFCLALNPLSNILNHTNNGYPLKCKADESDRIITYQLNHLMYMDDIKLFAHSQSNLYKLAKLTEDFSRDINMQFGIDKCKINSVKAGQIQKLSYTLDTGQLITSLEQNEVYKYLGYNQSHHIQYKKIKSELLQQFRHRLNILLRSQLYSGNLTKAINTYVIPILTYSFGIIKWSKTELKNVQRIINTSMTKHRKHHPRACVQRQTLSRKEGGRGLIDITNLHNKQVSTLRTYFYHRSIESSLHKAVVYNDNKLTPLNLQDRSQQSNEIQTPIENKITEWSRKSLHGRHRHHLCQPNVDKVASNAWLSYGELFPETEGFMIAIQDQIIETRNYQKYIIKVPNIRTDLCRKCNSCPETTQHITGACKSIVQTDYKHRHDQVANIIHQKIAFNLNLNNNKPIPYYKYTPESVLENSQYRLYFDRAILTDRTTHYNRPDITIHDKKNHTAIIIDIAIPNTHNIQSIIAENLAKYTDLKDEIKRMWRLNYVTIVPIVLSTTGVIPIQLHHSLKSLNLPPYTYITLQKAVILNICRIVRKFLQTDKDVHINTENFALSITRSSFAQPSITQPLNSQLAPGHPYDHISD

SEQ ID NO: 20114 - protein, 1534 aa, Furcula furcula
MIIRAMSVEPLMPDRSKVRRQTKRDTTNFWSTPRPEVFLTLYSYDPSTFTHPKPYPLYFYNPIIQVKVEQHTPRTAWLGECLATSMRTRDTRESPVLFNPCHGERRALPWSKFLSLATRGKTMITRSKTKTNMKLNRQASESKSTTSEDHHDYNLSSPTPSAHSLSQSSSSPCHQFQIQSSPISSSNDDLSIGVAQEIESIREPVPTTSNTTRTRVKWNNELNEAIIKSYYRITSVETVKTVYRKSLHHQFIQTFPHLTHVSEQRVADQKRLILHKNLITKERLQEIRNEIAIELQLSQNHTQPQNQHTTLPQCTQPDVRTRMRWSNELNEALIRCYFEVTEAETNLTIYRKRLHSKFIETYPEYSHISAQQLSDQRRSIVNNRLITVEKLNEIKKSVQEHYRYIQSPPQVTPEYRLIHDFAHTNISTTNAIVYPNTTTAPEATSIVNLTCPLSETITPITLTQTPNTSGPPEENTTDNQDIENTFQETLENFTGTDPTKRPQIPKQKSSRKLSRIVNYINSRILPKYVDMNIDFNKLQTIIYCAAWTASKCNGAKILQNNNREYRRIRPQRKPRWQLRLENKVEMLRAKIGRMTQYINGNRSETLNFKVNQIMNEYRTHSVHENSNTQPSHFLDTLKQKLTLTTARLKRYRACTLRKTQNTQFNNNEKRFYRELEASASNTHNTADTSTSLSEHDLQTFWTRIWEDSTNHNDEAEWIGQEEKRNANITLMEFEILPRESFDIVLKKLHNWKAPGSDNIHNFWYKKFTHLHPYLLNHINDFIQNPHIIPDYIMTGITYMIPKDPSDPGNPAKYRPITCLQTIYKIINACITEVIYSHISKNKILAEQQNGCRRANQGCKELLTVDSVILNHVKRTKGELHTMYIDYRKAYDSVPHSWLLKVLEIYKIYPLLIRFLQTIMQKWTTRLRLTCNLDTLETDPIKIKCGIFQGDSLSPLWFCLALNPLSNILNETNNGYILKYQDIESDRQTTYRLNHLMYMDDIKWYAPSQNILFKLAKFTEDFSRDIRMQFGIDKCKINSVKAGQTQELGYTLESGELISSLDHSEVYKYLGYNQNHQIKHKEIKQKLLQQFKHRLNTLLRSQLYSRNLTKAINTYAIPILTYSFGIIKWTKTELKNIQRIINTSMTKHRKHHPRACTQRQTLPREEGGRGLIDILNLHNKQISALRTYFHQKAKDNPLHKTIEYNDKKLTPLNLQDRSQQKNESQTSIQSKLNEWSSKSLHGRHPHDLSQPNVDKLSSNAWLRSGELFPETEGFMIAIQDQTIETRNYQEYIIKTPNLPTDICRKCSSCPETIQHITGACKSIVQTDYKHRHDQVANIIHQTLALKLKLITNKPVPYYKYTPEAVLENAQYRLYFDRAILTDRTTHFNRPDITIHDKKNRIAFIIDIAVPNTHNLQTTISEKLSKYTDLKSEIKSMWQLNSVTIVPVVLSTTGVIPVQLHQSLKTLNLSPYTYMTLQKAVILNTCRIVRKFLTNDKETQLDTQHVIPSLTTQPQTDLIQQQPQTTTIYSHTNASN

SEQ ID NO: 20115 - protein, 1413 aa, Ostrinia nubilalis
MELRSKKVLSIGPLPGGNRRGAPGAGAGCSSMRSAGDEELSRRAPVDKIATAETTLLRDSPSPQSSLFPSPNSSPKSYEMASSKSPLSYNSSSEFSMDVAQETNSVSISVPTIFNIRKPRMRWTDEYNEAIIRSYYRITKLESARTTYRKPLHQEFITQFPNLSHVSEQRVADQRRLIICNKLLSDSRLQEIRTDIAEELQINNTQINTQTQDSTLTSAHSNTQGTNTTNTRMRWSDELNESLMRCYYIVTESETNMSAYRNKLHKKFIDTHPNLAHITAQRLSDQRRSIVNNRLVHPNKLLEIKNEVTTEANTNENFIQSPSIDCTIPNYSTQENTFTSHTIDTNSITYAEQNSTQQTNTTTLEEETHQSRTARTDDSDSDANREIRDTFEETYLAFIDSEPTSRPYIRKQKTSKKLSAIIHYINTTILPNYLNKETDFITLQTIIYCAAWTAAKCNGTKMETTTEGTNRTTVRRPKWEIRLEKKKEDLRAKIAKMTQFNNGNRSPALIDQVKKIMDQYKIHSVHEEPNTQITQFIDTLKQKLTVITSRIKRYRACTLRKTQNTQFHYNEKNFYRNLKTSTTNNASNNEQTSNFNIPAPDTLRNFWSEIWEEPKDHNDKAEWIEAEYERNEHIQPMPFEFIPIDTFQDVIRRLHNWKAPGSDKIHNFWYKKLTFIHPFLHNHLNEYIKNPETIPDYIMTGTTYMILKDSTDTTNPAKYRPITCLQTIYKILNSCLTNVMYEHIENNQILAEQQKGCRKFSQGCKEQLIIDSVILRQVQRQKRELHSMYIDYRKAYDSVPHTWLLEVLRIYKIHPTLTNFLRTVMQKWTTRLKVAHTETDPIYIKRGIFQGDSLSPLWFCLALNPLSNLLISSNTGFELKHIDTHTSRPTTMQINHLMYMDDIKLYAQSQDSLYQLANLTEQFSNDICMEFGIDKCKINAIKAGQNQRHTYQMESGQRIDSLEENEVYKYLGYNQAKLIEYKDTKAKLLQQFKHRLNSVMKTQLHSRNITKAINSFAVPILTYSFGIIKWTKTELNSIQRIINTTLTKHRKHHPRACIQRQTLPRNEGGRGIIDIQNLHNKQITTLRSYFHQKAITSTLHQATVQADIKLTPLNLQDMSTQENELQTSTQTKISEWTRKALHGRHRHDLCQPNVDKIASNAWLSRGELFPETEGFMIAIQDQIIETRNYQKHIMRIPNLPTDLCRKCNSSSETIQHVTGACKAIVQTDYKHRHDQVANIIHQKLACKYKLITHKPTPYYKYEPEPVLENSQYRLYFDRAILTDRTTHYNRPDITLQDKNNRTATIIDIAIPNTHNLQNSISEKLSKYTDLKDEIRRMWRLNEVNIVPIVLSTTGVIPKQLHQSLNTLNLPPLTYISLQKAVILNTCRIVRKFLQTHDSHNQPTRADTDSTTTN

SEQ ID NO: 20116 - protein, 1376 aa, Boloria selene
MNRTHERYHLRPLPGGRRGASGANAGCYSMRSVGDLKLNRRASVEENTTADNHPITSSSNSSLFSSIPSSPASYEEHEMFLHQNSQSSASNSSIITHTVTAEDVEQEASIAEYPGPTTVGKNTRYKWTKVMNVFIMRTYFTVTSLEKHTRDYLTPLYNAFIEQFPTMQITKQRIGDQRRAIIRRKLLPPDTITAIRLEVEQNLQGQLISQKHNHTEVSQSMTQSQQTDGAITSGRMKWSQELNEGIIKAYYESTEAERNTTSYRKKLHQTFIQYYPNLSHISEQRIADQRRTIIKNKMLTEQKIYEFKKAVESTLEVNYNPLNNNERHFQSSKVTERDNVEVNENQGNTYQATNTQNVESSSIIIQSNIEEEFSRIFIIFRDTDPTFRPYIPKQKTTRKLTSIVNYINCKVLPKHLNTDTDYETLQTIIYTAAYTSALLNGTKFRGNVSVKKCNKPFWQVRLENKIKQLRVDIGRLTQFIAGNQSPKFLIKIQSIKDRHSKHTQYENLNTQPHHLLDTLKQKLNVASSRLKRYLTCTARKQQNFKFINSEKSFYRHLTQNIQESPNTTQPPEAHVFHEYWANIWENPIQHNSNADWLNHIHNDRNVNEMLFTEISMDIFLKVLNRTHNWKAPGTDNIHNYWYKKLTYIHPYLHTHINKFVLLSNTMPKYITQGKTYMIAKNNLTQNPENYRPITCLQNIYKIITSCISEIIYSHLIDNNILTEQQKGCRKNSQGCKEQLTLDAIVMNSAHKNKQNIHAMFIDYRKAFDSIPHSWLLKTLYLYKINPKIINFLNNTMQNWHTTLKVNHYTDTKPTEPIRIQRGIFQGDSLSPLWFCIALNPLSELLNKSNIGYKLNSARSDSNISHLMYLDDIKLYASDKKGLFKLADITQEFSRDIHMQFGIDKCKILSSINKGLIDSNSYILETGETIEPMDESSTYKYLGFHQSKQIKIKQTKTELINKFRYRVNLILKSHLNAKNTTKAINTFAIPILTYSFGIIHWSQTDLQKLQRIIHTLLTKFRKHHPKSCVQRITLPRHEGGRGFIDIRNLHNKLITTFKNYFYSKSDHSAIHKHAIDTDKKLTPLNLHDKQKQINENITNVTQKIASWTEKTLHGRHRSHLCQSHVDKDKSNAWLKRGELFPETEGYMLAIQDEVIATRNYTKYILKDSKQLNDLCRHCNSAPETIQHITGACRSIVQTDYKHRHDQLASIIHQHLAFDFKFIKKKQPYYKYKPDCVLENNDYKLYWDRTILTDKTVHYNRPDITFYNKKNKTIFLIDIAIPNTHNIQATVSDKLSKYQDLAIEIKTQWQARTVHILPIVLSSTGVIPKSLENSLNLLNIPIYIIYILQKAAILNTCRITRKFLTSSTISSTSSHTQF

SEQ ID NO: 20117 - protein, 1406 aa, Boloria selene
MGGTKIEKQNISFVIPPNQRSQNQPTMNRTHERYHLRPLPGGRRGASGANAGCYSMRSVGDLKLNRRASVEENTTADNHPITPSSTSSLFSSIPSSPASYEEHQMFLQLNSQSSPSSSSIITHTVTAEDVEQEAIAEYPGPTTVGKNTRYKWTKEMNIFIMRTYFTVTSLEKDTSDYLTPLYNSFIEHFPTMHITRQRIGDQRRAIIRRKLLPLDTITAIRLEVEQYLQSQSKLQTHNYTNITQTMTHSKQTQVANTSDRMKWSQELNEGVIKAYYESTEAETNMTAYRQKMHQNFIQNYPYLSHISEQRIADQRRIIIKNKMLSEQKINEIKKSVESTLKVNYNPLNINKTHLQTSGITERHDHDGEVIQNQGNNREVTCQSNIQSVEISGIINQSNIEEEFNRIFIIFKNTDPTSRPYIPRQKTTRKLTSIVNFINNKVLPKYLNTDTEYETLQTLIYTAAYTSALLNGTKFRGNISVKKFSKPFWQIRLENKIKQLRVDIGRLTQFIAGNQRPKFLIKIQSIKDRHSKHTQYENLNTETNHLLDTLKQKLNVASCRLKRYLTCTARKQQNIQFINNEKSFYRHLTQNVQESPNPTQQPPEVHVFHSYWANIWENPIQHNSNADWLNDIHNDRNVNEMLFTEISMDIFLKVLNRTHNWKAPGTDNIHNYWYKKLTYIHLYLHTHINKFVLLANTMPKYITQGKTYMIAKNSVTQNPENYRPITCLQNIYKIITSCISEIIYSHLMDNNILTEQQKGCRKNSQGCKEQLTLDAIVMNSAQKYNQNIHAMFIDYRKAFDSIPHSWLLKTLNLYKVNPKIINFLNNTMQNWHTTLKINQFSDNKTTEPIRIQRGIFQGDSLSPLWFCIALNPLSDLLNKTNIGYKLNSVQNDSNISHLMYLDDIKLYASNKEGLFKLADITQEFSKDIHMQFGIDKCKILSVNKGKIDYNAYVLETGETIEPMDELSTYKYLGFHQSKQIKVKQTKTDLTNKFRYRVNVILKSHLNSKNTTKAINTFAVPILTYSFGIIQWSQTDLQKLQRMIHTQLTKFRKHHPKSCVQRITLPRHEGGRGFIDIRNLHNKLITTYKNYFYSKSDHSVIHKHAIETDIKLTPLNLHDREKQINENITDVSQKLASWAKKSLHGRHRSHLCQSHVDKDRSNAWIKRGELFPETEGYMLAIQDEVIATRNYTKYILKDSKQLNDLCRHCNSAPETIQHITGACRSIVQTDYKHRHDQLASIIHQHLAFDLNFIKKKQPYYKYKPDCVLENNDYKLYWDRTILTDKTVHYNRPDITFYNKKNKTVFLIDIAIPNTHNIQATISDKLSKYQDLAIEIKTQWKAQTVHILPMIVSSTGVIPKSLENSLKLLNIPVYIIYTLQKAAILNTCRITRKFLTSSTISSTSTHTHF

SEQ ID NO: 20118 - protein, 1375 aa, Boloria selene
MNRTHERYHLRPLPGGRRGASGANAGCYSMRSVGDLKLNRRASVEENTTADNHPITSSSNSSLFSSIPSSPASYEEHEMFLHQNSQSSASNSSIITHTVTAEDVEQEASIAEYPGPTTVGKNTRYKWTKEMNVFIMRTYFTVTSLEKHTRDYLTPLYNAFIEQFPTMQITKQRIGDQRRAIIRRKLLPPDTITAIRLEVEQNLQGQLISQKHNHTEVSQSMTQSQQTDGAITSGRMKWSQELNEGVIKAYYESTEAERNTTSYRKKMHQTFIQYYPNLSHISEQRIADQRRTIIKNKMLAEQKIYELKKAVESTLEVNYNPLNNNERHFQSSKVTERDNVEVNENQGNTYQATNTQNVESSSIIIQSNIEEEFSRIFIIFRDTDPTSRPYIPKQKTTRKLTSIVNYINCKVLPKHLNTDTDYETLQTIIYTAAYTSALLNGTKFRGNVSVKKCNKPFWQVRLENKIKQLRVDIGRLTQFIAGNQSPKFLIKIQSIKDRHSKHTQYENLNTQPHHLLDTLKQKLNVASSRLKRYLTCTARKQQNFKFINSEKSFYRNLTQNIQESPNTTQPPEAHVFHEYWANIWENPIQHNSNADWLNHIHNDRNVNEMLFTEISMDIFLKVLNRTHNWKAPGTDNIHNYWYKKLTYIHPYLHTHINKFVLLSNTMPKYITQGKTYMIAKNNLTQNPENYRPITCLQNIYKIITSCISEIIYSHLIDNNILTEQQKGCRKNSQGCKEQLTLDAIVMNSAHKNKQNIHAMFIDYRKAFDSIPHSWLLKTLYLYKINPKIINFLNNTMQNWHTTLKVNHYTDTKPTEPIRIQRGIFQGDSLSPLWFCIALNPLSELLNKSNIGYKLNSARSDSNISHLMYLDDIKLYASDKKGLFKLADITQEFSRDIHMQFGIDKCKILSINKGLIDSNSYILETGETIEPMDESSTYKYLGFHQSKQIKIKQTKTELINKFRYRVNLILKSHLNAKNTTKAINTFAIPILTYSFGIIHWSQTDLQKLQRIIHTLLTKFRKHHPKSCVQRITLPRHEGGRGFIDIRNLHNKLITTFKNYFYSKSDHSAIHKHAIDTDKKLTPLNLHDKQKQINENITNVTQKIASWTEKTLHGRHRSHLCQSHVDKDKSNAWLKRGELFPETEGYMLAIQDEVIATRNYTKYILKDSKQLNDLCRHCNSAPETIQHITGACRSIVQTDYKHRHDQLASIIHQHLAFDFKFIKKKQPYYKYKPDCVLENNDYKLYWDRTILTDKTVHYNRPDITFYNKKNKTIFLIDIAIPNTHNIQATVSDKLSKYQDLAIEIKTQWQARTVHILPIVLSSTGVIPKSLENSLNLLNIPIYIIYILQKAAILNTCRITRKFLTSSTISSTSSHTQF

SEQ ID NO: 20119 - protein, 1375 aa, Boloria selene
MNRTHERYHLRPLPGGRRGASGANAGCYSMRSVGDLKLNRRASVEENTTADNHPITSSSNSSLFSSIPSSPASYEEHEMFLHQNSQSSASNSSIITHTVTAEDVEQEASIAEYPGPTTVGKNTRYKWTKEMNVFIMRTYFTVTSLEKHTRDYLTPLYNAFIEQFPTMHITKQRIGDQRRAIIRRKLLPPDTITAIRLEVEQYLQGQLISQKHNHTEVTQSMTHSQQTDGAITSGRMKWSQELNEGVIKAYYESTEAERNTTSYRKKMHQTFIQYYPNLSHISEQRIADQRRTIIKNKMLTEQKIYEIKKAVESTLEVNYNPLNNNERHFQSSKVTERDDVEVNENQGNTYQATNTQNVESSSIIIQSNIEEEFSRIFIIFRDTDPTSRPYIPKQKTTRKLTSIVNYINCKVLPKYLNTDTDYETLQTIIYTAAYTSALLNGTKFRGNVSVKKCNKPFWQVRLENKIKQLRVDIGRLTQFIAGNQSQKFLIKIQSIKDRHSKHTQYENLNTQPHHLLDTLKQKLNVASSRLKRYLTCTARKQQNFKFINSEKSFYRNLTQNIQESPNTTEPPEAHVFHEYWANIWENPIQHNSNADWLNHIHNDRNVNEMLFTEISMDIFLKVLNRTHNWKAPGTDNIHNYWYKKLTYIHPYLHTHINKFVLLSNTMPKYITQGKTYMIAKNNLTQNPENYRPITCLQNIYKIITSCISEIIYSHLIDNNILTEQQKGCRKNSQGCKEQLTLDAIVMNSAHKNKQNIHAMFIDYRKAFDSIPHSWLLKTLYLYKINPKIINFLNNTMQNWHTTLKVNHYTDTKPTEPIRIQRGIFQGDSLSPLWFCIALNPLSELLNKSNIGYKLNSARTDSNISHLMYLDDIKLYASDKKGLFKLADITQEFSRDIHMQFGIDKCKILSINKGLIDSNSYILETGETIEPMDESSTYKYLGFHQSKQIKIKQTKTELINKFRYRVNLILKSHLNAKNTTKAINTFAIPILTYSFGIIHWSQTDLQKLQRIIHTLLTKFRKHHPKACVQRITLPRHEGGRGFIDIRNLHNKLITTFKNYFYSKSDHSAIHKHAIDTDKKLTPLNLHDKQKQINENITNVTQKIASWTEKTLHGRHRSHLCQSHVDKDKSNAWLKRGELFPETEGYMLAIQDEVIATRNYTKYILKDSKQLNDLCRHCNSAPETIQHITGACRSIVQTDYKHRHDQLASIIHQHLAFDFKFIKKKQPYYKYKPDCVLENNDYKLYWDRTILTDKTVHYNRPDITFYNKKNKTIFLIDIAIPNTHNIQATVSDKLSKYQDLAIEIKTQWQARTVHILPIVLSSTGVIPKSLENSLNLLNIPIYIIYILQKAAILNTCRITRKFLTSSTISSTSTHTQF

SEQ ID NO: 20120 - protein, 1375 aa, Boloria selene
MNRTHERYHLRPLPGGRRGASGANAGCYSMRSVGDLKLNRRASVEENTTADNHPITSSSNSSLFSSIPSSPASYEEHEMFLHQNSQSSASNSSIITHTVTAEDVEQEASIAEYPGPTTVGKNTRYKWTKEMNVFIMRTYFTVTSLEKHTRDYLTPLYNAFIEQFPTMHITKQRIGDQRRAIIRRKLLPPDTITAIRLEVEQYLQGQLISQKHNHTEVTQSMTHSQQTDGAITSGRMKWSQELNEGVIKAYYESTEAERNTTSYRKKMHQTFIQYYPNLSHISEQRIADQRRTIIKNKMLTEQKIYEIKKAVESTLEVNYNPLNNNERHFQSSKVTERDDVEVNENQGNTYQATNTQNVESSSIIIQSNIEEEFSRIFIIFRDTDPTSRPYIPKQKTTRKLTSIVNYINCKVLPKYLNTDTDYETLQTIIYTAAYTSALLNGTKFRGNVSVKKCNKPFWQVRLENKIKQLRVDIGRLTQFIAGNQSPKFLIKIQSIKDRHSKHTQYENLNTQPHHLLDTLKQKLNVASSRLKRYLTCTARKQQNFKFINSEKSFYRNLTQNIQESPNTTEPPEAHVFHEYWANIWENPIQHNSNADWLNHIHNDRNVNEMLFTEISMDIFLKVLNRTHNWKAPGTDNIHNYWYKKLTYIHPYLHTHINKFVLLSNTMPKYITQGKTYMIAKNNLTQNPENYRPITCLQNIYKIITSCISEIIYSHLIDNNILTEQQKGCRKNSQGCKEQLTLDAIVMNSAHKNKQNIHAMFIDYRKAFDSIPHSWLLKTLYLYKINPKIINFLNNTMQNWHTTLKVNHYTDTKPTEPIRIQRGIFQGDSLSPLWFCIALNPLSELLNKSNIGYKLNSARTDSNISHLMYLDDIKLYASDKKGLFKLADITQEFSRDIHMQFGIDKCKILSINKGLIDSNSYILETGETIEPMDESSTYKYLGFHQSKQIKIKQTKTELINKFRYRVNLILKSHLNAKNTTKAINTFAIPILTYSFGIIHWSQTDLQKLQRIIHTLLTKFRKHHPKACVQRITLPRHEGGRGFIDIRNLHNKLITTFKNYFYSKSDHSAIHKHAIDTDKKLTPLNLHDKQKQINENITNVTQKIASWTEKTLHGRHRSHLCQSHVDKDKSNAWLKRGELFPETEGYMLAIQDEVIATRNYTKYILKDSKQLNDLCRHCNSAPETIQHITGACRSIVQTDYKHRHDQLASIIHQHLAFDFKFIKKKQPYYKYKPDCVLENNDYKLYWDRTILTDKTVHYNRPDITFYNKKNKTIFLIDIAIPNTHNIQATVSDKLSKYQDLAIEIKTQWQARTVHILPIVLSSTGVIPKSLENSLNLLNIPIYIIYILQKAAILNTCRITRKFLTSSTISSTSTHTQF

SEQ ID NO: 20121 - protein, 1375 aa, Boloria selene
MNRTHERYHLRPLPGGRRGASGANAGCYSMRSVGDLKLNRRASVEENTTADNHPITSSSNSSLFSSIPSSPASYEEHEMFLHQNSQSSASNSSIITHTVTAEDVEQEASIAEYPGPTTVGKNTRYKWTKEMNVFIMRTYFTVTSLEKHTRDYLTPLYNAFIEQFPTMQITKQRIGDQRRAIIRRKLLPPDTITAIRLEVEQYLQGQLISQKHNHTEVTQSMTHSQQTDGAITSGRMKWSQELNEGVIKAYYESTEAERNTTSYRKKMHQTFIKYYPNLSHISEQRIADQRRTIIKNKMLTEQKIYEIKKAVESTLEVNYNPLNNNERHFQSSKVTERDDVEVNENQGNTYQATNTQNVESSSIIIQSNIEEEFSRIFIIFRDTDPTSRPYIPKQKTTRKLTSIVNYINCKVLPKHLNTDTDYETLQTIIYTAAYTSALLNGTKFRSNVSVKKCNKPFWQVRLENKIKQLRVDIGRLTQFIAGNQSPKFLIKIQSIKDRHSKHTQYENLNTQPHHLLDTLKQKLNVASSRLKRYLTCTARKQQNFKFINSEKSFYRNLTQNIQESPNTTQPPEAHVFHEYWANIWENPIQHNSNADWLNHIHNDKNVNEMLFTEISMDIFLKVLNRTHNWKAPGTDNIHNYWYKKLTYIHPYLHTHINKFVLLSNTMPKYITQGKTYMIAKNNLTQNPENYRPITCLQNIYKIITSCISEIIYSHLIDNNILTEQQKGCRKNSQGCKEQLTLDAIVMNSAHKNKQNIHAMFIDYRKAFDSIPHSWLLKTLYLYKINPKIINFLNNTMQNWHTALKVNHYTDTKPTEPIRIQRGIFQGDSLSPLWFCIALNPLSELLNKSNIGYKFNSARTDSNISHLMYLDDIKLYASDKKGLFKLADITQEFSRDIHMQFGIDKCKILSINKGLIDSNSYILETGETIEPMDESSTYKYLGFHQSKQIKIKQTKTELINKFRYRVNLILKSHLNAKNTTKAINTFAIPILTYSFGIIHWSQTDLQKLQRIIHTLLTKFRKHHPKSCVQRITLPRHEGGRGFIDIRNLHNKLITTFKNYFYSKSDHSAIHKHAIDTDKKLTPLNLHDKQKQINENITNVTQKIALWTEKTLHGRHRSHLCQSHVDKDKSNAWLKRGELFPETEGYMLAIQDEVIATRNYTKYILKDSKQLNDLCRHCNSAPETIQHITGACRSIVQTDYKHRHDQLASIIHQHLAFDFKFIKKKQPYYKYKPDCVLENNDYKLYWDRTILTDKTVHYNRPDITFYNKKNKTIFLIDIAIPNTHNIQATVSDKLSKYQDLAIEIKTQWQARTVHILPIVLSSTGVIPKSLENSLNLLNIPIYIIYILQKAAILNTCRITRKFLTSSTISSTSTHTQF

SEQ ID NO: 20122 - protein, 1282 aa, Darwinula stevensoni
MPLPQGLKTLAATTESRKIGHKKRLPIPTSPPQHHASINQPQAIFRTPLQASSHRQGNSTSLSLDGPTTTAQIHGTPCTNPRNLRSVRVAVSEAQQVCSAGVVNDGDLEPATQPNFQDVPKTLQHDEPLKTSSKAYTIDWPLQKICTCPICKRNYHSQASLERHLKKLHPERSILYRCTACSAEFPSARKAANHSSKLHPLLASQVMLVDTPELATVQCQRCPRRFLDYRCLHNHERAAHPQHHAQHAPAEPHASQTAQPHALRPGTPTRSISPSGPLQTHGPHLNQATPDAVTEAAPSQERNSDESPPQEADFTGSWIQRFSEASDDWEEFKRLYEQFTKEAKSAALQEMKKQNSTVSLNFSTGRQTKDSPPSTVVGPRSTQMAAVHTTNDPKHQEQDIPNPVPRREHQRGENTNYDAHEASRIQKLYRWSKRRAIRKVLEPNSPRYTGTASQCEAFFTDLTKAKALDHERVEAMILDTLPHIPSAENLESPITPEEVSARLRRATNTAPGSDKIEYIHLKYIDPSGKLLACIMNICLQHQRVPPQWKGSHTVLIHKKGDVSDPGNFRPIALLPTIYKLFSGIIAGRLTGWAIQNNVLSPEQKGFIPNTEGCMEQTFLLETAIAEARRRKLNLAIAWLDLQNAFGSLPHQVLQATWHRLGLPPVLLGILHDLYDGSNSTYQTCDGPTEKIPIEAGVKQGDPLSAILFNIVMEILIRKIKTTSESALPLYDAELSIGAFADDLVLISPSGDGLQHLLDTASEVATTIGLHFRPDKCMSLYLSAGQPGSSNFFMDGLLLPQLGPEDHYTYLGTPQGFGYPRARLEDAVSRVIEDLKRIEDSLLAPWQKLDAFKSAIQTRLQYIMRASYVQKKTLQPLATAIAEFSKKICHLSKWATNHYLHAEKAAGGLEIIDLLEDADILTLTQAIRMLSSNDERIAAIAKGQLRSVIKRITRRPETTSEEQEQYLSGLPMTGTRDTGDIRTLWSRCRASARRLKVLIKIEEDDDGKQATAVHADLKGKSVVMQPSSIVKTLRQRMREKHTEELTKCPDQGKVARQLLEDRRSISTHWLQTGVGIRFCDWRFVHKARLNLCHTRQRATKWKGGNGSCRKCGSPQETLPHILNHCKSNMLSIRRRHDNIVNRLVKSIPFSRRSLAVIDQHVPEDPESRRRPDIYLEEENGKTIIIDVAIPFENGEKALNHAAEEKEKKYRSLIQGLKNKGKDVIFHSFVLGALGAWRSENETCLNSLGVAKRYRGIFRRMCVADAIRGSRDIYIEFVTGSRQW

SEQ ID NO: 20123 - protein, 1065 aa, Patiria miniata
MLTYPADTSNFTCNKCDEPLIGHPNIQKHLTSHNCKISYNCNKCSKHFKSLSSVSCLYPRCISRTVSPTPPSSFPCDLCGRYFKSFPGLRLHMKQSHPVDFDREEAGLPEATNTRRDRWSEEDLAILANIEAQLPSSTKFMNIAIRDILKNRTLESIKGQRRKASHKYLVDQIRRSEHVPEPVEEAFVAVPEKDERFSEFFATYRNTQIDTNPGNSDLIELLEQRDNNNYLDYSNVLQNLGMKFTNSRNNRQFVVASVPSNASNRHKKRLLYGAHQHYFHKDTKKLASHLLDGQPLGPVAPACGAAYTTYMGIFGKEPKNDDQSFVPKPMGGGDLDLDGIKYPIHKDEVTKALKSMKKNGAAGPDKIHFKDLSKADALDLTTLFNLWFESGKVPEQLKLNNTILIPKGEADPTDISKWRPITIGSYLLRLYTRVLNTRLTEATALNPRQKAFIPADGCLENVSLLDHLLSKYRHENKSYYVMFLDLSKAFDSVHHSSISRALKRHNIPANFITCIDDLYTGVRTRITTGSSISDPIPMRCGVKQGCPLSPRLFNFVLDELVDSLPDYIGLEMGGARFNSLAFADDLVLMAESKCGLSTLLDTCQKFFDARCMRVNALKSAVFGATMVHRIDGRHISKLIPMTESVWQAHGTFIPAIPVTDTTKYLGQKFGVLGKSKYDLIEPLNRWLGAISDAYLKPQQKLILIKSYIVPRLIYHFGMNTYPANALKAIQRCINKSVRSIVHLPNSANTLYLTTPTSLGGLGLPDIPFLAKKLRHGSLTRLAKSKDVNIRHLYSSRSVQKELKGLSRALGLASVEADKSQIKHHVHDSTMRRLSDHSKTKQGQGALAFDHPAASAWVDNPTILQGDLYTKAVALRAETLPCRNNLAYTGGPTSCRHCSGAIETISHILQRCPSVLQARMRRHNEVCKQVARYMSRRYGEDSVYTEPLVTTNTGNFRPDLVIIDKAKNHAFIADISVPYEAHKHTLRDSGISKCTKYNTGPISMAIKNRFGVSSTSVEGIPIGARGAVLSSKPKYCGLKLSRNQLSILSQNAIKGSIFVFNCFMSK

SEQ ID NO: 20124 - protein, 1065 aa, Patiria miniata
MLTYPADTSNFTCNKCDEPLIGHPNIQKHLTSHNCKISYNCNKCSKHFKSLSSVSCLYPRCISRTVSPTPPSSFPCDLCGRYFKSFPGLRLHMKQSHPVDFDREEAGLPEATNTRRDRWSEEDLAILANIEAQLPSSTKFMNIAIRDILKNRTLESIKGQRRKASHKYLVDQIRRSEHVPEPVEEAFVAVPEKDERFSEFFATYRNTQIDTNPGNSDLIELLEQRDNNNYLDYSNVLQNLGMKFTNSRNNRQFVVASVPSNASNRHKKRLLYGAHQHYFHKDTKKLASHLLDGQPLGPVAPACGAAYTTYMGIFGKEPKNDDQSFVPKPMGGGDLDLDGIKYPIHKDEVTKALKSMKKNGAAGPDKIHFKDLSKADALDLTTLFNLWFESGKVPEQLKLNNTILIPKGEADPTDISKWRPITIGSYLLRLYTRVLNTRLTEATALNPRQKAFIPADGCLENVSLLDHLLSKYRHENKSYYVMFLDLSKAFDSVHHSSISRALKRHNIPANFITCIDDLYTGVRTRITTGSSISDPIPMRCGVKQGCPLSPRLFNFVLDELVDSLPDYIGLEMGGARFNSLAFADDLVLMAESKCGLSTLLDTCQKFFDARCMRVNALKSAVFGATMVHRIDGRHISKLIPMTESVWQAHGTFIPAIPVTDTTKYLGQKFGVLGKSKYDLIEPLNRWLGAISDAYLKPQQKLILIKSYIVPRLIYHFGMNTYPANALKAIQRCINKSVRSIVHLPNSANTLYLTTPTSLGGLGLPDIPFLAKKLRHGSLTRLAKSKDVNIRHLYSSRSVQKELKGLSRALGLASVEADKSQIKHHVHDSTMRRLSDHSKTKQGQGALAFDHPAASAWVDNPTILQGDLYTKAVALRAKTLPCRNNLAYTGGPTSCRHCSGAIETISHILQRCPSVLQARMRRHNEVCKQVARYMSRRYGEDSVYTEPLVTTNTGNFRPDLVIIDKAKNHAFIADISVPYEAHKHTLRDSGISKCTKYNTGPISMAIKNRFGVSSTSVEGIPIGARGAVLSSKPKYCGLKLSRNQLSILSQNAIKGSIFVFNCFMSK

SEQ ID NO: 20125 - protein, 1137 aa, Aurelia aurita
MSNDNISDNGVNEAGADNSEGPAPGRCSVRTQADPGRHPMTARNRTSRTAWSKEVNKIVMKCFYKSEPSKRGYRKRMFAKWQEIGVFNVSEQRLADQVRAIKNNGFLSNVELEEIERNRVMEENNGTVQERNEMNESGEEIHSNSFGGEGRSTDQADIDFEIGEPVSDEEKEILNLIKEKMENPSSLESVNLRSMDRKKVKEKLEIVNEVIDKVISRDITDTNHIILAAANVVADLVGMKKGKKKKNEAPMWKKRLLRQIAEIRKDVSRVEKWKEGKLKSEGLKDHLERKYHVWNKGFTTVIEELKQRIKAKTTKIKKYEERNNQYIQNRLFQTNQKLLFEKIEGVERENDIRPDVDQSKAFWSDIWSKDVKHNSEASWIKEVKKHVENVGKQSDIEVTLHSLQLQLRRVPKWKACGPDKVHGYWLKGFTKLHPLMAAQLNECISTGETPTWMTRGRTCLILKDVKKGSDVTNFRPITCLPIMWKILTGIASESLYHHLESEKLLPEEQKGCRKQSRGTKDQLMIDKMVMKNCRRRLTNLCVAWIDYKKAYDMVPHSWILACLSMFKLADNIHNLIEKSMSAWTVELTSGGEMLGEVKIKRGIFQGDSLSPILFVLAMIPLSIVLNNMKGGYMLGPNRGKLNHLLFMDDLKLYGKNMKELDSLVETTRIYSQDIGMEFGISKCAMLEMKRGRVVDSNGIDLPSGETIKALESNDGYKYLGIIQCDATKNNEMKEMLSKEYFRRIRKILKSSLNAGNTIQAINSRAVSIIRYGAGIVDWRKAELQQMDRKTRKLLTIYRSMHPQGDVDRTYLKRKKGGRGLISVEECVMLEKTSLGFYINGKEEVLLQEVVKEDMMSDNENPKTVKERLRKAREERYYSKPLHSAFFRETKEVRDEDNSWLWVKKGYLKKETEGLIMAAQDQAIRTNWIRHNIDKEDISPSCRLCGERDETVSHVVSECKELAQNDYKKARHDKVAAILHWQMCQKYGFPTTAKSYEHFVDKEMAVLENENVKLLWDFSIQTEKKIDHNKPDLVLLDKKGKTCYIIDVACPFDTRVEKKEKEKFEHYTDLKYELLKVWNTEVTKVYIIPIVIGALGIVTKNVEKYLEKIDFKPGLDPLQKACLLGTARIIRKVLDYSE

SEQ ID NO: 20126 - protein, 1085 aa, Aurelia aurita
MHYVLLSLIWYDNLLKFLNSKNLSFTNVTTWLFYSNSNSNNNNNNNNNNNNNNNNNNNNNNNNNNNNNNNNNNGTVQERNEMNESGEEIHSNSFGGEGRSTDQADIDFEIGEPVSDEEKEIRNLIKEKMENSSSLESVNLRSMDRKKVKEKLEIVNEVIDKVISRDITDTNHIILAAANVVADLVGMKKGKKKKNEAPMWKKRLLRQIAEIRKDVSRVEKWKEGKLKSEGLKDHLERKYHVWNKGFTTVIEELKQRIKAKTTKIKKYEERNNQYIQNRLFQTNQKLLFEKIEGVERENDIRPDVDQSKAFWSDIWSKDVKHNSEASWIKEVKKHVENVGKQSDIEVTLHSLQLQLRRVPKWKACGPDKVHGYWLKGFTKLHPLMAAQLNECISTGETPTWMTRGRTCLILKDVKKGSDVTNFRPITCLPIMWKILTGIASESLYHHLESEKLLPEEQKGCRKQSRGTKDQLMIDKMVMKNCRRRLTNLCVAWIDYKKAYDMVPHSWILACLSMFKLADNIHNLIEKSMSAWTVELTSGGEMLGEVKIKRGIFQGDSLSPILFVLAMIPLSIVLNNMKGGYMLGPNRGKLNHLLFMDDLKLYGKNMKELDSLVETTRIYSQDIGMEFGISKCAMLEMKRGRVVDSNGIDLPSGETIKALESNDGYKYLGIIQCDATKNNEMKEMLSKEYFRRIRKILKSSLNAGNTIQAINSRAVSIIRYGAGIVDWRKAELQQMDRKTRKLLTIYRSMHPQGDVDRTYLKRKKGGRGLISVEECVMLEKTSLGFYINGKEEVLLQEVVKEDMMSDNENPKTVKERLRKAREERYYSKPLHSAFFRETKEVRDEDNSWLWVKKGYLKKETEGLIMAAQDQAIRTNWIRHNIDKEDISPSCRLCGERDETVSHVVSECKELAQNDYKKARHDKVAAILHWQMCQKYGFPTTAKSYEHFVDKEMAVLENENVKLLWDFSIQTEKKIDHNKPDLVLLDKKGKTCYIIDVACPFDTRVEKKEKEKFEHYTDLKYELLKVWNTEVTKVYIIPIVIGALGIVTKNVEKYLEKIDFKPGLDPLQKACLLGTARIIRKVLDYSE

SEQ ID NO: 20127 - protein, 898 aa, Oikopleura longicauda
MRAIPKIKTMQVSIRKRHMGRTATLSNAKRSRDDGFMLYYAKHQLVSNKSECLRAFLQLGSEEGLLNELRNALRVKKAGGGNVKDNFSERVRKVMHGTVEGETLKGETVKVFYEKLLGDNGRPDRVNGEGDNSAAVFFTHAEISECLKHKSKGNACGIDRVSRGMLNSIKRCKAKFEYVHALLDAFLLRGVPKCFKVALVTLIPKKPGAKTPAEYRPISVTSLIYRLYSRLLSDRFYAAVGMQISSAQGGYRKRVNGCSKNLAILRSVLGEAKAENRSLAVASVDLAKAFDSVSHVAVKRCLQKLKMPDYLRRACLDTLDDNVLNFKGMGVSVRGRRGVPQGLPLSGYLFIATIDDAVKAMDDLLPYETANGAKVGALCLVDDLLIFTKSKYDLESKLRRLKTILGASGWSLNANKSYAYARVKQGTRMVTQSGSVPCGGGESIKLIPSGEKFKYLGVVISGSNCLKDNVHPIMKKLSESLTKLETANLTVVNKIRAIREVIIPQQVYRLSNISSVSIWNAKYAEKTSTVLRGRSNVTRLYSELDRKIARSVKSILKIPQTGVATALFYVNESRGGMGLHRLEVLIPSARIKLRDEMNLSPKLQELVDKYHFNDRPKCIKLLEKHHLSVEDFSREARANAMTQAAKCGTMGQSLILPSAKERAIPLIKRANLGFSSYRLQRAVSFKLNCLPTNSRKHIVDRKTSKLCRHGCGKLESLAHLLCDKGCGDVRNFWITRHNKVCEFLFDKLSKLKRPGAKLAIELETGNFKPDLVLFDDKMALVLEVAVRWGSGKNLTQIFNDKRAKYSTPAAISELKTKLAEIEPSEVERKVKVIPLIFSVHGSYYDSSMIATDVYKYMTDPRVLRKVLLLSAQIAMESSLKYIGSVLGDRSRYSNTRIT

SEQ ID NO: 20128 - protein, 1123 aa, Dendronephthya gigantea
MTQIDSTPNLLSPSQEDSRSIISRFLEACKPSPEPSSEPINPTAADQLSLLGDTPLLNSPHLCDLPISRPIATPSPAIPALMANIITTPDAGLPTTRQPCQPLKRLRAVDFFPENNTTHNPQSPPKSTPVPNSPPPTIQDLPPDDEMPANPPRPQHLPNLANHPVHHWDALGSPIEIGPSEVTLPTADITTDLNAFRTKWLGIFDEDLDWQSFSNHCETYAREARSLAQTISSTRRPKPAPRRPNRPSARPPIDNRRPTTADPIASRRIQQLYRMSKKRAARKILGDDSPNYTGSPDEAFNFFSTSFGQRECNLDALKEHLQSYVPTTETDDSLFDAPSAEELQQKLRSLSNSAPGKDRLEYRHIRLIDPKCEILARMYRFCFTSCDVPNQWKTATTILIHKKGPTDDAGNFRPIALMSCLYKILMAILAKRVTAFSIQHNLLSAQQKSARPSEGCYEHTFLLQSIVNDAKRQQKNMCLAWLDIRNAFGSIPHDAILATLTHMGFPPALTQFIKMAYTGASNEVLTSTGPTQSIPILAGVKQGCPLSAILFNLTMELILRKVSATASNNPRGPIKHHGYPLSILAYADDLVVIGKTKSDLQHLLNSLSEAADALSVTFRPEKCASLSITPRNQPRVAHNDFKVQNRSIPSLKAEDHYLYLGIPIGLIVNVSQLQSLVDELSNKIRKIEQSLLTPWQKLDAIRTFIQPCLTYALRASSPSHKSLQAYRTTLISALRKICHLPDRATTHYFFANRQSGGLGFQDPFTEADLQTTVQAVKILASSDPVVAGIARNELAQTVRFASQCEPTPELMSKYLSNSPDRRLDSLRYRTGSLWTRTRTTTKRRQVTINLRNVGAPTITTPEYTEPVSARDACRFLHNITRDKAATILRDLPDQDKLARSLQNDQYGNGSSWHFSGLNVRFKDWRFIHRARLNCCPTNSVKSRWSNTNPSCRHCNEDETLPHILCHCTQNMPAITARHDKIVSRLVNAVRSGHVTTDKTVADSGSNVRPDIVITDPANTCATIIDVCCPFDNGAEALHDAIDRKELKYEHLREFFTAQGLSCKIFGFAVGALGSWHPRNEKVLSALGMSGRYKNLFQKLCCTDIIQGSTDIYRQHLGCDDALP

SEQ ID NO: 20129 - protein, 1153 aa, Montipora capitata
MVRGQTKSSPVVVSPKSHYPQMMSANQSLQDNGVNETGVLDDESPSPGRCSTAMQRGPGRHYATAVRSMRRKWSQEENRVVMECYYRSEPGVRGYRKRMHDLWIAKDLFVVTEQRIVDQANQIRKKKWLSDLELEEIQRNVDDVQHGEVGPETENEEMSVTENTGEQVENERPNQGRDGVPYEKLQAHPDYKLSEEEQEWLVWMDEILKLERTRLPCLRGINKGKLKSAVKKVDILLGKIEVGNITTTNDIIYAGAALVTEMVGANKLKSKQKEPWWKRRLEKQVKEMNQDLGRINTLLQKKPIKKKHSERLQRKYNMKRKGLKVVREEIKQRIKAKVGKITRYQNRLSQYQQNRMFNNNEGRFYQLLNKEVHNQKNEIPDACEAKSYWESIWSESKEHNRRAEWLKDVQNTLGDNQGQQRITITVGKLRKIVGKMPNWKAPGPDGVQGYWLKNFRSVHENLRVHLNKCLARGEVPSWMNKGRTVLIQKDKDKGTAANNYRPITCLPLTWKLLTGIIADEIYEYLDSEVMLPEEQKGCRRKARGTHDLLFIDKMILKEVRTRKKNLATAWIDYKKAFDLIPHSWILECLKMLGINEEIRKLLEESMKNWRVELVCGSASLGEVSINRGIFQGDSLSPLLFVIALIPLTHILRKAEPTYKFSDDGERINHLLFMDDLKLYAMNEKGVDSLIQTVRVFSEDIGMEFGIEKCAVLVMKRGKVVKSEGIKLPDYKTIQGLKDGDSYKYLGILEADRIKHEEMKETVTKEYKRRVRTILETKVNGGNLVKAVNTWAIPLLRYSAAFLDWRKSELQDLDRKTRKLLTMHNGLHPKSNVDRIYIPREEGGRGLISVEDCVESATLGLERYINDSDERLIKAARKISGGHNNETEVEYKIRKKNERKEQWREKVMHGQFVRQTEEILGNESWFWLKKGSLKRETESLIMAAQEQALATNLMKARIYQTQEDSKCRMCRKVDESINHIVSECPKLAQKEYKRRHDWVGKKIHWEVCKEEGFIVNEKWYEHVPGPVLENERCKILWDFTIQTDHVIEARRPDMIVVEKRNKCCKIIDFAIPYDSRIEEKEVEKVVKYQDLARELKKLWKMKTMVIPIVIGTFGTVPKDLKKRLENIGIETKIDELQKSVILNTARILRKVLEV

SEQ ID NO: 20130 - protein, 950 aa, Montipora capitata
MDEILKLERTRLPCLRGINKGKLKSAVKKVDILLGKIEVGNITTTNDIIYAGAALVTEMVGANKLKSKQKEPWWKRRLEKQVKEMNQDLGRINTLLEKKPIKKKHSERLQRKYNMKRKGLKVVREEIKQRIKAKVGKITRYQNRLSQYQQNRMFNNNEGRFYQRLNKEVHNQKNEIPDACEAKSYWESIWSESKEHNRRAEWLKDVQNTLGDNQGQQRITITVGKLRKIVGKMPNWKAPGPDGAQGYWLKNFRSVHENLRVHLNKCLARGEVPSWMNKGRTVLIQKDKDKGTAANNYRPITCLPLKWKLLTGIIADEIYEYLDSEVMLPEEQKGCRRKARGTHDLLFIDKMILKEVRTRKKNLATAWIDYKRAFDLIPHSWILECLKMLGINEEIRKLLEESMKNWRVELVCGSASLGEVSINRGIFQGDSLSPLLFVIALIPLTHILRKAEPTYKFSDDGERINHLLFMDDLKLYAMNEKGVDSLIQTVRVFSEDIGMEFGIEKCAVLVMKRGKVVKSEGIKLPDYKTTQGLKDGDSYKYLGILEADRIKHEEMKETVTKEYKRRVRKILETKLNGGNLVKAINTWAIPLPRYSAAFLDWRKSELQDLDRKTRKLLTMHNGLHPKSNVDRIYIPREEGGRGLISVEDCVESATLGLERYINDSDERLIKAARKISGGHNNETEVEYKIRKKNERKEQWREKVMHGQFVRQTEEILGNESWFWLKKGSLKRETESLIMAAQEQALATNLMKARIYQTQEDSKCRMCRKVDESINHIVSECPKLAQKEYKRRHDWVGKKIHWEVCKEEGFIVNEKWYEHVPEPVLENERCKILWDFTIQTDHVIEARRPDMIVVEKRNKCCKIIDFAIPYDSCIEEKEVEKVVKYQDLARELKKLWKMKTLVIPIVIGTFGTVPKDLKKRLENIGIETKIDELQKSVILNTARILRKVLEV

SEQ ID NO: 20131 - protein, 892 aa, Montipora capitata
MVGANKLKSKQKEPWWKRRLEKQVKEMNQDLGRINTLLEKKPIKKKHSERLQRKYNMKRKGLKVVREETKQRIKAKVGKITRYQNRLSQYQQNRMFNNNEGRFYQRLNKEVHNQKNEIPDACEAKSYLESIWSESKEHNRRAEWLKDVQNTLGDNQGQQRITIKVGKLRKIVGKMPNWKAPGPDGVQGYWLKNFRSVHENLRVHLNKCLARGEVPSWMNKGRTVLIQKDKDKGTAANNYRPITCFPLTWKLLTGIIADEIYEYLDSEVMLPEEQKGCRRKARGTHDLLFIDKMILKEVRTRKKNLATAWIDYKKAFDLIPHSWILGCLKMLGINEEIRKLLEESMKNWRVELVCGSASLGEVSINRGIFQGDSLSPLLFVIALIPLTHILRKAEPTYKFSDDGERINHLLFMDDLKLYAMNEKGVDSLIQTVRVFSEDIGMEFGIEKCAVLVMKRGKVVKSEGIKLPDYKTIQGLKDGDSYKYLGILEADRIKHEEMKETVTKEYKRRVRKILETKLNGGNLVKAINTWAIPLLRYSAAFLDWRKSELQDLDRKTRKLLTMHNGLHPKSNVDRIYIPREEGGRGLISVEDCVESATLGLERYINDSDERLIKAARKISGGHNNETEVEYKIRKKNERKEQWREKVMHGQFVRQTEEILGNESWFWLKKGSLKRETESLIMAAQEQALATNLMKARIYQTQEDSKCRMCRKVDESINHIVSECPKLAQKEYKRRHDWVGKKIHWEVCKEEGFIVNEKWYEHVPEPVLENERCKILWDFTIQTDHVIEARRPDMIVVEKRNKCCKIIDFAMPYDSRIEEKEVEKVVKYQDLARELKKLWKMKTMVIPIVIGTFGTVPKDLKKRLENIGIETKIDELQKSVILNTARILRKVLEV

SEQ ID NO: 20132 - protein, 1017 aa, Pardosa pseudoannulata
MGQPPNLTQNSAVTTSSVSTQEDSHFPPSVDVADALPLSAEDSGLTVDELPEQTDVDTFSPPMPVDDPDAPSPSAAYLEEFKTFLSIDINSNWDAFCDKLAEYIGFAQTHVQLPPPRETFAPRPNDNAKNPRFIQKLYRRNRRRAIRTILNDAAPKCAIAPSELAEHFFPQVAPTPDLQLFTHPNPASDSVDMHPFTPEEVWARLKAAENSAPGDDRLTYNHWKSVDPDAKTLSVIYNLCIKAGKIPEAWKNSRTILIPKNGDGCLPSDWRPISLGCTISKLFCSCLARRLSSWIQAFDVLSTSQKGFLPFDGAFENNYVLNHRIQAARQKRTELCILSIDLSNAFGSTSHAAIFESLRSAGAGNSFLDLVQSLYSGTSTCLITEDGVSEPISIQAGVRQGCPLSGLLFNMAIDPLIRSLRSENELNVLAFADDLLLIEKNPTSLQALADKAQSACSLMGFMINPKKCFSMHLGTNPVGCKDTKFIINEQVIPTILDGESGAFLGKPVGYSIVQDPRNLDALSNAGEAILSSFLAPWQRIDAIKTFFYPSLHYAQRTWQYPKENWKAIDDKMRPLIKRTLNLPPRAANDYLYGDSQKGLLGIPVCNEDADIALIDSAFKLLTSKDNLLCEAAWNDLMELVSIRANKVADNSEAAAYLSGRDYPLTENPISSVWTKARKASSRLNVVWDIQPDRAVSIRIGDTTILERRKIFKLLRNALRSSRFEFLKRKKHQGKTTSCFGLSKSSTHYHHTGEFLRFTDWRFVHRARLGLVPLNGYREDATVAEKQCRRCGFPMESLPHVINHCKRYLPLITKRHNLIVERLKTAASRRWTVVRENQTVAGSSLRPDLLLERDGHALLIDVTCPFENGSSAFQDARSTKVSKYRDLVEALKPRYKSVSFEAVVVGALGSWDRANDKVISRLCSRKYAKLLRKLVVSDTLRISRDIYVEHLTGVRQTATSRNDRQADNIISLIDSARNVTHDDQSNLTSVQISNDVPSSGNLTNSNRNESPRGNTSQP

SEQ ID NO: 20133 - protein, 1058 aa, Rhopilema esculentum
MFRSFVLWILLFFGICSFCGKEFQALGRHTWRCKRRLDNNDSGPSGSINIPFIEIENESASVINERIVKCSCGKECKGMKGLKMHQRRCRVISGFQSDDTFEQVSEETLDNEIVLADISLNEYFELKPGVCLPRSNEEWTVANEYFKYFFTINPMDLSSIDQSIQSMNQVIYNYFRDTCGFVEEVNEELAAKYQDHATKKLKKELQLLKRNGAPIIEIKYVSRLLRQRLNSSASTVVKNISNHDNFISKSFWGYVKRVLQTSSTLLPSFSKDQCSQYFFKMFSSLLPCKNFSIPSWIPSLREPDHPFPLEPPSYEKITSVIRRMKSSATPCPRDKISIIVFKRCPYLRSLITNIIHNIWLSGKVPLEWKKACTILIHKKGSNDDPANFRPITLEPVPLKIFTSCLRDSLFNFLKVNGLIEHEIQKGFTSNISGTLEHTAMMAQVINKARIKQRSLVVTLLDLKNAFGEVHHNLIPTVLSYHHIPDNIQLLISSLYTDFKTSIITSHYNTPAIPVRRGVLQGDCLSPLLFNLCFNTFIQYIKAEKYKQLGFSPHDQNDRMFQPVHWFQFADDAAVITSNEKENQLLLNCFTRWCQWANMIIRVDKCITFGIKKFSTRSLQYQPKLFINNESIPPVSNGNSFKYLGRHFDFEMTNQEHKSDLLSSLSNMLKQIDSQPLHAKNKLLLYHNFVLSKISWNLTVADLSKTWVVENLDSLVSKYIRQWLDLPISATLSSIILSKNQFGLSLTLPSAKFLQCQTILRNALKSSPNDNIRSLWKNTSSSTNIQYDIYRNTKEALKAVQQEHKDRLQNILTSQGSLLSHLFNQDLSQINKLWSKVQSSMPQNIFNFTIRYLNNTLATQKNLKKWNLSQTSDCSFCFLPETLLHVVAGCKTYLEQGRYTWRHNSILNFLATSLKAVNESTIYADIPGYLSPSIITGENLRPDLLLKTNNNYLYILELTVGFESNLDTNATRKHSKYAPLLSDLQRKFKCVSFVNLSMSSLGIFGNSCISFFKMCDSLSIDQQQKRYLISKLSKIAIRTTYYIFCCKNKPWTNPELHPF

SEQ ID NO: 20134 - protein, 919 aa, Rhopilema esculentum
MNNSIYNYFKETCGTIDIISNDLVAKYQDRKAKELKKDLKLLKMNNATLLEIKYVSHLLRHKINGCSLISNTTHIADHDKFISKNFWGYVKRILKTSSSILPTFPNDICTQYFLKALSSLSPTQCFSIPSWIPTFQEPDHPFPSEPPSYQKITTIIRRMKSSASPCPLDNISIIVFKHCPYLRSKLTEIFRVIWLSGDIPNEWKKAFTILIHKKDSVEDPSNFRPITLESVPLKIFTSCLRDFMFDFLKINGYIEHQIQKGFTSNISGTLEHTSMMAHIIDKARTKQRSLVVTLLDLKNAFGEVHHNLIPTILSYNHIPDNIQLLISSLYTDFKTSIITSHYNTPAIQVRRGVLQGDCLSPLLFNLCFNTFIQYIKAEKYKQLGFSLPDQNDRMFQPVHWFQFADDAAVITSNEKENQLLLNCFTRWCQWANMNIRVDKCITFGIKKFSTRSLQYQPKLFINNKPIPSVSNGNSFKYLGRHFDFEMTNQEHKSDLLSSLSNMLKQIDSQPLHAKNKLRLYHNFVFSKISWNLTVADLSKTWVVENLDNLVSKYIRQWLDLPISATLSSMILSKNQFGLSLTLPSTKFLQCQTVLRNALKSSPNDNIRSLWKNTSSGTNIQYDIYRNTKEALKAVQHEHKDRLQNILTSQGSLLSHLFNQNLPQINKLWSKVQSSMPQNIFNFTIRYLNNTLATQKNLKKWNLSQTSDCSFCFLPETLLHVVAGCKTYLEQGRYTWRHNSFLNFLATSLKAVNESTIYADIPGFLSPSIITGENIRPDLLLRTNNNYLYILELTVGFESNLETNATRKHSKYAPLLSDLQRQFKCVSFVNLSMSSLGIFGNSCNSFFKMCDSLSPSISNKNSISFLNFPTLPSVLRTTYFVAKISHGQIRNYILFNFSCFILFYFSQFFLLPCDCYSFFL

SEQ ID NO: 20135 - protein, 893 aa, Nemopilema nomurai
MNNSIYNYFKETCVTIDIISNDLVAKYQDRKAKELKKDLKLMKMNNATLLEIKYVSHLLRHKINVCSMISNTTHIADHDKFISKNFWGYVKHILKTSSSILPTFPNDICTQYFLKALSSLSPTQCFSIPSWIPTFQEPDHPFPSEPPSYQQITTIIRRMKSSASPCPLDKISIMVFKHCPYLRSILTEIFRVIWLSGDIPNEWKKACTILIHKKDSVEDPSNFRPITLESVPLKIFTSCLRDFMFDFLKINGYIEHQIQKGFTSNISGTLEHTSMMAHIIDKARTKQRSLVVTLLDLKNAFGEVHHNLIPTILSYHHIPDNIQLLISSLYTDFKTSIITSHYNTPAIPVRRGVLQGDCLSPLLFNLCFNTFIQYIKAEKYKQLGFSLPDQNDRMFQPVHWFQFADDAAVITSNEKENQLLLNCFTRWCQWANMIIRVDKCITFGIKKFSTRSLQYQPKLFINNKPIPSVSNGNSFKYLGRHFDFEMTNQEHKSDLLSSLSNMLKQIDSQPLHAKNKLRLYHNFVLSKISWNLTVADLSKTWVVENLDNLVSKYIRQWLDLPISATLSSIILSKNQFGLSLTLPSTKFLQCQTVLRNALKSSPNDNIRSLWKKTSSGTNIQYHIYRNSKEALKAVQHEHKDRLQNILTSQGSLLSHLFNQNLPQINKLWSKVQSSMPQNIFNFTIRYLNNTLATQKNPKKWNLSQTSDCSFCFLPETLLHVVAGCKTYLEQGRYTWRHNSILNFLATSLKAVNESTIYADIPGFLSPSIITGENLRPDLLLRTNNNYLYILELTVGFESNLETNATRKHSKYAPLLSGLQRQLKCVSFVNLSMSSLGIFGNSCNSFFKMCDSLSIDQQQKQYLISKLSNIAIRTTYYIFCCKNKPRTNPELHPF

SEQ ID NO: 20136 - protein, 1021 aa, Rhopilema esculentum
MFRSFVLWILLFFAICSFCGKEFQALGRHTWRCKRRLDNNDSGPSGSINIPFIEIENESASVINERIVKCSCGKECKGMKGLKMHQRRCRVISGFQSDDTFEQVSEETLDNEIVLADISLNEYFELKPGVCLPRSNEEWTVANEYFKYFFTINPMDLSSIDQSIQSMNQAIYNYFRDTCGFVEEVNEELAAKYQDHATKKLKKELQLLKRNGAPVIEIKYVSRLLRQRLNSSASTVVKNISNHDNFISKSFWGYVKRVLQTSSTLLPSFSKDQCSQYFFKMFSSLLPCKNFSIPSWIPSLREPDHPFSLEPPSYEKITSVIRRMKSSATPCPRDQISIIVFKRCPYLRSLITNIIHNIWLSGKVPLEWKKACTILIHKKGSNDDPANFRPITLEPVPLKIFTSCLRDSLFNFLKVNGLIEHEIQKGFTSNISGTLEHTAMMAQVINKARIKQRSLVVTLLDLKNAFGEVHHNLIPTVLSYHHIPDNIQLLISSLYTDFKTSIITSHYNTPAIPVRRGVLQGDCLSPLLFNLCFNTFIQYIKAEKYKQLGFSPHDQNDRMFQPVHWFQFADDAAVITSNEKENQLLLNCFTRWCQWANMIIRVDKCITFGIKKFSTRSLQYQPKLFINNESIPPVSNGNSFKYLGRHFDFEMTNQEHKSDLLSSLSNMLKQIDSQPLHAKNKLLLYHNFVLSKISWNLTVADLSKTWVVENLDNLVSKYIRQWLDLPISATLSSIILSKNQFGLSLTLPSAKFLQCQTILRNALKSSPNDNIRSLWKNTSSSTNIQYDIYRNTKEALKAVQQEHKDRLQNILTSQGSLLSHLFNQDLPQINKLWSKVQSSMPQNIFNFTIRYLNNTLATQKNLKKWNLSQTSDCSFCFLPETLLHVVAGCKTYLEQGRYTWRHNSILNFLATSLKAVNESTIYADIPGYLSPSIITGENLRPDLLLKTNNNYLYILELTVGFESNLDTNATRKHSKYAPLLSDLQRKFKCVSFVNLSMSSLGIFGNSCISFFKMCDSLSIDQ

SEQ ID NO: 20137 - protein, 1058 aa, Rhopilema esculentum
MFRSFVLWILLFFAICSFCGKEFQALGRHTWRCKRRLDNNDSGPSGSINIPFIEIENESASVINERIVKCSCGKECKGMKGLKMHQRRCRVISGFQSDDTFEQVSEETLDNEIVLADISLNEYFELKPGVCLPRSNEEWTVANEYFKYFFTINPMDLSSIDQSIQSMNQAIYNYFRDTCGFVEEVNEELAAKYQDHATKKLKKELQLLKRNGAPVIEIKYVSRLLRQRLNSSASTVVKNISNHDNFISKSFWGYVKRVLQTSSTLLPSFSRDQCSQYFFKMFSSLLPCKNFSIPSWIPSLREPDHPFPLEPPSYEKITSVIRRMKSSATPCPRDKISIIVFKRCPYLRSLITNIIHNIWLSEKVPLEWKKACTILIHKKGSNDDPANFRPITLEPVPLNIFTSCLRDSLFNFLKVNGLIEHEIQKGFTSNISGTLEHTAMMAQVINKARIKQRSLVVTLLDLKNAFGEVHHNLIPTVLSYHHIPDNIQLLISSLYTDFKTSIITSHYNTPAIPVRRGVLQGDCLSPLLFNLCFNTFIQYIKAEKYKQLGFSPHDQNDRMFQPVHWFQFADDAAVITSNEKENQLLLNCFTRWCQWANMIIRVDKCITFGIKKFSTRSLQYQPKLFINNESIPPVSNGNSFKYLGRHFDFEMTNQEHKSDLLSSLSNMFKQIDSQPLHAKNKLLLYHNFVLSKISWNLTVADLSKTWVVENLDNLVSKYIRQWLDLPISATLSSIILSKNQFGLSLTLPSAKFLQCQTILRNALKSSPNDNIRSLWKNTSSSTNIQYDIYRNTKEALKAVQQEHKDRLQNILTSQGSLLSHLFNQDLPQINKLWSKVQSSMPQNIFNFTIRYLNNTLATQKNLKKWNLSQTSDCSFCFLPETLLHVVAGCKTYLEQGRYTWRHNSILNFLATSLKAVNESTIYADIPGYLSPSIITGENLRPDLLLKTNNNYLYILELTVGFESNLDTNATRKHSKYAPLLSDLQRKFKCVSFVNLSMSSLGIFGNSCISFFKMCDSLSIDQQQKRYLISKLSNIAIRTTYYIFCCKNKPWTNPELHPF

SEQ ID NO: 20138 - protein, 1058 aa, Morbakka virulenta
MFEFSFRYFLTLFVVCSFCGKEFQSLGRHVWRCKKRLQENTCNPNGEINLPLIRKNNRDSYTSNVTAGVKCSCGKVCKGLKGLKIHQRNCRVIKGFEEDTFEQIPEDISNNNEPTTVLSSGEQLEIKEGIRLPRSSEQWEIANCYFQSIFASVELKPSTIDSVIRFMNDSIYEHFKRTCGTTNKNFDEGYQRKYQDRKVNQLKKDLKLLKKSNTSVMEIKYVSSLLRQKLTSSHNVHTLSNHDNFISKNFWGYVKRVLQKSSSILPTFSEVCCTQYFSKILSSTIPNKHFKIPSWIPSFNEPEHPFSTDPPSYKKITSVIRRMKSSASPCPLDKISIICFKRCPYLRSFLTKIIKIIWISGKVPPEWKKASTILIHKKGNTDDPSNFRPITLQTVPLKVFTSCLRDSVFEYLKNNNFVEHMIQKGFTSKISGTLEHTAMMAHVINKARTNQRSLVITLLDLKNAFGEVHHNLITSVLDHHHIPDKIKSLITSLYTEFKTSFITDHFTTEAITVRHGLLQGDCLSPLLFNMCFNTFIQYIRAEKYKQLGFSPHDKNDRMFNPVHWFQFADDAAVITSGERENQLLLNCFTRWCQWANMIIRVDKCATFGIKKFTTRSLQFQPKLFVNNETVPPVAMGDAFKYLGRYFDFEMTNQSHKSKLLSVLLDLLKQIDSLPIHPKHKLRLYSEFALPKVSWHLTVSNVSKTWVAENLDNLVSKYIRQWLDLPISATLSSIILSKNQFGLNLQLPTTKFLQCQTVTRNALKLSPNDNIRTLWKNTSNGTNIQHDVYKNTKEVLKAVQTEHKERLQSHLTTQGTILSFLFDNATSKYNKFWSEVQSKLPKNIFSFTIRYLNNTLPTRKNLSKWKLSLSSSCSSCFEPETLLHVVAGCKTYLQEGRYTWRHNSALQFLAGSFKSLEGCTTYADICGFLSPCVITGDALRPDLLLVTLQQKLYILELMVGYETNLDKNASRKYKKYRSLIRDLQSSFSKVSFVNLSMTSSVIFCQSCITFSEMCNTLNIDNKHERFLSTKLYNIIIRTTYYIFCRRNKPWTNTELLSLY

SEQ ID NO: 20139 - protein, 950 aa, Morbakka virulenta
MLLLLLLLLLSSGEQLEIKEGIRLPRSSEQWEIANCYFQSIFASVELKPSTIDSVIRFMNDSIYEHFKRTCGTTNKNFDEGYQRKYQDRKVNQLKKDLKLLKKSNTSVMEIKYVSSLLRQKLTSSHNVHTLSNHDNFISKNFWGYVKRVLQKSSSILPTFSEVCCTQYFSKILSSTIPNKHFKIPSWIPSFNEPEHPFSTDPPSYKKITSVIRRMKSSASPCPLDKISIICFKRCPYLRSFLTKIIKIIWISGKVPPEWKKASTILIHKKGNTDDPSNFRPITLQTVPLKVFTSCLRDSVFEYLKNNNFVEHMIQKGFTSKISGTLEHTAMMAHVINKARTNQRSLVITLLDLKNAFGEVHHNLITSVLDHHHIPDKIKSLITSLYTEFKTSFITDHFTTEAITVRHGLLQGDCLSPLLFNMCFNTFIQYIRAEKYKQLGFSPHDKNDRMFNPVHWFQFADDAAVITSGERENQLLLNCFTRWCQWANMIIRVDKCATFGIKKFTTRSLQFQPKLFVNNETVPPVAMGDAFKYLGRYFDFEMTNQSHKSKLLSVLLDLLKQIDSLPIHPKHKLRLYSEFALPKVSWHLTVSNVSKTWVAENLDNLVSKYIRQWLDLPISATLSSIILSKNQFGLNLQLPTTKFLQCQTVTRNALKLSPNDNIRTLWKNTSNGTNIQHDVYKNTKEVLKAVQTEHKERLQSHLTTQGTILSFLFDNATSKYNKFWSEVQSKLPKNIFSFTIRYLNNTLPTRKNLSKWKLSLSSSCSSCFETETLLHVVAGCKTYLQEGRYTWRHNSALQFLAGSLKSLEGCTIYADICGFLSPCIITGDALRPDLLLVTPQQQLYILELTVGYETNLDKNSSRKYEKYRSLIRDLQSSFSKVSFVNLSMSSLGIFGKSCITFSKMCNALNIDNKHERFLSTKLSNIIIRTTYYIFCRRNKPWTSPELLSLY

SEQ ID NO: 20140 - protein, 1058 aa, Morbakka virulenta
MFEFSFRYFLTLFVVCSFCGKEFQSLGRHVWRLKKRLQENTCNPNGEINLPLIRKNNRDSYTSNVTAGVKCSCGKVCKGLKGLKIHQRNCRVIKGFEEDTFEQIPEDISNNSEPTTVLSSGEQLEIKEGIRLPRSSEQWEIANCYFQSIFASVELKPSTIDSVIRFMNDSIYEHFKRTCGTTNKNFDEGYQRKYQDRKVNQLKKDLKLLKKSNTSVMEIKYVSSLLRQKLTSSHNVHTLSNHDNFISKNFWGYVKRVLQKSSSILPTFSEVCCTQYFSKILSSTIPNKHFKIPSWIPSFNEPEHPFSTDPPSYKKITSVIRRMKSSASPCPLDKISIICFKRCPYLRSFLTKIIKIIWISGKVPPEWKKASTILIHKKGNTDDPSNFRPITLQTVPLKVFTSCLRDSVFEYLKNNNFVEHMIQKGFTSKISGTLEHTAMMAHVINKARTNQRSLVITLLDLKNAFGEVHHNLITSVLDHHHIPDKIKSLITSLYTEFKTSFITDHFTTEAITVRHGLLQGDCLSPLLFNMCFNTFIQYIRAEKYKQLGFSPHDKNDRMFNPVHWFQFADDAAVITSGERENQLLLNCFTRWCQWANMIIRVDKCATFGIKKFTTRSLQFQPKLFVNNETVPPVAMGDAFKYLGRYFDFEMTNQSHKSKLLSVLLDLLKQIDSLPIHPKHKLRLYSEFALPKVSWHLTVSNVSKTWVAENLDNLVSKYIRQWLDLPISATLSSIILSKNQFGLNLQLPTTKFLQCQTVTRNALKLSPNDNIRTLWKNTSNGTNIQHDVYKNTKEVLKAVQTEHKERLQSHLTTQGTILSFLFDNATSKYNKFWSEVQSKLPKNIFSFTIRYLNNTLPTRKNLSKWKLSLSSSCSSCFETETLLHVVAGCKTYLQEGRYTWRHNSALQFLAGSLKSLEGCTIYADICGFLSPCIITGDALRPDLLLVTPQQQLYILELTVGYETNLDKNSSRKYEKYRSLIRDLQSSFSKVSFVNLSMSCLDIFGKSCITFSKMCNALNIDNKHERFLSTKLSNIIIRTTYYIFCRRNKPWTSPELLSLY

SEQ ID NO: 20141 - protein, 1071 aa, Rhopilema esculentum
MIRSSIVYLLILFVICSFCEKDFSSLGRHAWRCKRRVQTNHTGPSGSINIPLIDSGNRDAAINNESCVKCSCGKSCKGIKGLRIHQRNCRVIKGFDEEQLFEVVNDADLENNDSHTDIPLVDYFEIKPGIRLPRSDQEWLLANQYFHSVFSSISVDASTVDRVIQLMNETIYNYFKETCGTIECCNEDLKEKYSNFTAKNLKKELRTLKHSNAPLTEIKYVSNLLRNKIKKHISPSKSSNITNHDRYISKNFWNYVKRTLQYETSALPTFSAAGCTEYFVKTFSAIAPNKHFTIPSWIPTFNEPSYSFDLEPPSYITITSIIRRMKASTSPCPLDKISIICFKRSPYLRSFLTEIIRVVWLSGKVPSEWKKASTILIHKKDSTDDPSNFRPITLESVPLKIFTSCLRDSIFTFLKHNGFIEHQIQKGFTSKVSGTLEHTAMMSHLINKARIKQRSLVVSLLDLKNAFGEVHHKLIPAILAYHHIPSEIQSLISSLYLDFKTCVITDKFQTPAIPVRRGVLQGDCLSPLLFNLCFNTFIQYIKSDKYKQLGFSPHDGNDRMFQPVHWFQFADDAAVVTSGEKENQLLLNCFTRWRQWANFIVRVDKCVTFGVKKHSTRSLQFQPKLFICNQIVPAVKNGDSFKYLGRFFDFEMSNQDHKSKLVSLFSTLMKDIDDLPLHPKNKLLLYHRYVLSKVSWHFTVADLPKTWVVQNLDNLVSNYIRQWLDLPVSATLSGIILSKNQFGLNLQLPSIKFTQCQTACRNALKSSPNIDIQTLWKNTSHGTNLQYDIYRNTKEVLKAVKSDNKERLSQNLTSQGATITFLLKHSLEKLNGIWSSTQSNLPSNIFNFTIKYLNNTLPTRKNLLKWNLSQTSDCEFCLLPETLLHVVAGCKVYLDQGRYTWRHNSALNFLATSFQAINGSSLYADLPGFLSPSIITGDQLRPDLLLKTKENCLYVLELTIGFETNLNCNAVRKSGKYATLVSDLKRQFKSVSFVNLSISSLGIFGDSCNSFIDMCDSLSIDHQQKRYLISKLTSISIRTTYYIFCCRNKTWTTPLIQSYTPFNIFFLITTM

SEQ ID NO: 20142 - protein, 1058 aa, Morbakka virulenta
MFEFSFRYFLTLFLVCSFCGKEFQSLGRHVWRCKKRLQENTCNPNGEINLPLIRKNNRDSYTSNVTAGVKCSCGKVCKGLKGLKIHQRNCRVIKGFEEDTFEQIPEDISNNNEPTTVLSSGEQLEIKEGIRLPRSSEQWEIANCYFQSIFASVELKPSTIDSVIRFMNDSIYEHFKRTCGTTNKNFDEGYQRKYQDRKVNQLKKDLKLLKKSNTSVMEIKYVSSLLRQKLTSSHNVHTLSNHDNFISKNFWGYVKRVLQKSSSILPTFSEVCCTQYFSKILSSTIPNKHFKIPSWIPSFNEPEHPFSTDPPSYKKITSVIRRMKSSASPCPLDKISIICFKRCPYLRSFLTKIIKIIWISGKVPPEWKKASTILIHKKGNTDDPSNFRPITLQTVPLKVFTSCLRDSVFEYLKNNNFVEHMIQKGFTSKISGTLEHTAMMAHVINKARTNQRSLVITLLDLKNAFGEVHHNLITSVLDHHHIPDKIKSLITSLYTEFKTSFITDHFTTEAITVRHGLLQGDCLSPLLFNMCFNTFIQYIRAEKYKQLGFSPHDKNDRMFNPVHWFQFADDAAVITSGERENQLLLNCFTRWCQWANMIIRVDKCATFGIKKFTTRSLQFQPKLFVNNETVPPVAMGDAFKYLGRYFDFEMTNQSHKSKLLSVLLDLLKQIDSLPIHPKHKLRLYSEFALPKVSWHLTVSNVSKTWVAENLDNLVSKYIRQWLDLPISATLSSIILSKNQFGLNLQLPTTKFLQCQTVTRNALKLSPNDNIRTLWKNTSNGTNIQHDVYKNTKEVLKAVQTEHKERLQSHLTTQGTILSFLFDNATSKYNKFWSEVQSKLPKNIFSFTIRYLNNTLPTRKNLSKWKLSLSSSCSSCFETETLLHVVAGCKTYLQEGRYTWRHNSALQFLAGSLKSLEGCTIYADICGFLSPCIITGDALRPDLLLVTPQQQLYILELTVGYETNLDKNSSRKYEKYRSLIRDLQSSFSKVSFVNLSMSSLGIFGKSCITFSKMCNALNIDNKHERFLSTKLSNIIIRTTYYIFCRRNKPWTSPELLSLY

SEQ ID NO: 20143 - protein, 1058 aa, Morbakka virulenta
MFEFSFRYLLTLFVVCSFCGKEFQSLGRHVWRCKKRLQENTCNPNGEINLPLIRKNNRDSYTSNVTAGVKCSCGKVCKGLKGLKIHQRNCRVIKGFEEDTFEQIPEDISNNSEPTTVLSSGEQLEIKEGIRLPRSSEQWEIANSYFQSIFASVELKPSTIDSVIRFMNDSIYEHFKRTCGTTNKNFDEGYQRKYQDRKVNQLKKDLKLLKKSNTSVMEIKYVSSLLRQKLTSSHNVHTLSNHDNFISKNFWGYVKRVLQKSSSILPTFSEVCCTQYFSKILSSTIPNKHFKIPSWIPSFNEPEHPFSTDPPSYKKITSVIRRMKSSASPCPLDKISIICFKRCPYLRSFLTKIIKIIWISGKVPPEWKKASTILIHKKGNTDDPSNFRPITLQTVPLKVFTSCLRDSVFEYLKNNNFVEHMIQKGFTSKISGTLEHTAMMAHVINKARTNQRSLVITLLDLKNAFGEVHHNLITSVLDHHHIPDKSKSLITSLYTEFKTSFITDHFTTEAITVRHGLLQGDCLSPLLFNMCFNTFIQYIRAEKYKQLGFSPHDKNDRMFNPVHWFQFADDAAVITSGERENQLLLNCFTRWCQWANMIIRVDKCATFGIKKFTTRSLQFQPKLFVNNETVPPVAMGDAFKYLGRYFDFEMTNQSHKSKLLSVLLDLLKQIDSLPIHPKHKLRLYSEFALPKVSWHLTVSNVSKTWVAENLDNLVSKYIRQWLDLPISATLSSIILSKNQFGLNLQLPTTKFLQCQTVTRNALKLSPNDNIRTLWKNTSNGTNIQHDVYKNTKEVLKAVQTEHKERLQSHLTTQGTILSFLFDNATSKYNKFWSEVQSKLPKNIFSFTIRYLNNTLPTRKNLSKWKLSLSSSCSSCFETETLLHVVAGCKTYLQEGRYTWRHNSALQFLAGSLKSLEGCTIYADICGFLSPCIITGDALRPDLLLVTPQQQLYILELTVGYETNLDKNSSRKYEKYRSLIRDLQSSFSKVSFVNLSMSSLGIFGKSCITFSKMCNALNIDNKHERFLSTKLSNIIIRTTYYIFCRRNKPWTSPELLSLY

SEQ ID NO: 20144 - protein, 900 aa, Morbakka virulenta
MINYVIRFMNDSIYEHFKRTCGTTNKNFDEGYQRKYQDRKVNQLKKDLKLLKKSNTSVMEIKYVSSLLRQKLTSSHNVHTLSNHDNFISKNFWGYVKRVLQKSSSILPTFSEVCCTQYFSKILSSTIPNKHFKIPSWIPSFNEPEHPFSTDPPSYKKITSVIRRMKSSASPCPLDKISIICFKRCPYLRSFLTKIIKIIWISGKVPPEWKKASTILIHKKGNTDDPSNFRPITLQTVPLKVFTSCLRDSVFEYLKNNNFVEHMIQKGFTSKISGTLEHTAMMAHVINKARTNQRSLVITLLDLKNAFGEVHHNLITSVLDHHHIPDKIKSLITSLYTEFKTSFITDHFTTEAITVRHGLLQGDCLSPLLFNMCFNTFIQYIRAEKYKQLGFSPHDKNDRMFNPVHWFQFADDAAVITSGERENQLLLNCFTRWCQWANMIIRVDKCATFGIKKFTTRSLQFQPKLFVNNETVPPVAMGDAFKYLGRYFDFEMTNQSHKSKLLSVLLDLLKQIDSLPIHPKHKLRLYSEFALPKVSWHLTVSNVSKTWVAENLDNLVSKYIRQWLDLPISATLSSIILSKNQFGLNLQLPTTKFLQCQTVTRNALKLSPNDNIRTLWKNTSNGTNIQHDVYKNTKEVLKAVQTEHKERLQSHLTTQGTILSFLFDNATSKYNKFWSEVQSKLPKNIFSFTIRYLNNTLPTRKNLSKWKLSLSSSCSSCFETETLLHVVAGCKTYLQEGRYTWRHNSALQFLAGSLKSLEGCTIYADICGFLSPCIITGDALRPDLLLVTPQQQLYILELTVGYETNLDKNSSRKYEKYRSLIRDLQSSFSKVSFVNLSMSSLGIFGKPCITFSKMCNALHIDNKHERFLSTKLSNIIIRTTYYLFRRRNKLWTNPELLSLY

SEQ ID NO: 20145 - protein, 1058 aa, Morbakka virulenta
MFEFSFRYFLTLFVVCSFCGKEFQSLGRHVWRCKKRLQENTCNPNGEINLPLIRKNNRDSYTSNVTAGVKCSCGKVCKGLKGLKIHQRNCRVIKGFEEDTFEQIPEDISNNNEPTTVLSSGEQLEIKEGIRLPRSSEQWEIANCYFQSIFASVELKPSTIDSVIRFMNDSIYEHFKRTCGTTNKNFDEGYQRKYQDRKVNQLKKDLKLLKKSNTSVMEIKYVSSLLRQKLTSSHNVHTLSNHDNFISKNFWGYVKRVLQKSSSILPTFSEVCCTQYFSKILSSTIPNKHFKIPSWIPSFNEPEHPFSTDPPSYKKITSVIRRMKSSASPCPLDKISIICFKRCPYLRSFLTKIIKIIWISGKVPPEWKKASTILIHKKGNTDDPSNFRPITLQTVPLKVFTSCLRDSVFEYLKNNNFVEHMIQKGFTSKISGTLEHTAMMAHVINKARTNQRSLVITLLDLKNAFGEVHHNLITSVLDHHHIPDKIKSLITSLYTEFKTSFITDHFTTEAITVRHGLLQGDCLSPLLFNMCFNTFIQYIRAEKYKQLGFSPHDKNDRMFNPVHWFQFADDAAVITSGERENQLLLNCFTRWCQWANMIIRVDKCATFGIKKFTTRSLQFQPKLFVNNETVPPVAMGDAFKYLGRYFDFEMTNQSHKSKLLSVLLDLLKQIDSLPIHPKHKLRLYSEFALPKVSWHLTVSNVSKTWVAENLDNLVSKYIRQWLDLPISATLSSIILSKNQFGLNLQLPTTKFLQCQTVTRNALKLSPNDNIRTLWKNTSNGTNIQHDVYKNTKEVLKAVQTEHKERLQSHLTTQGTILSFLFDNATSKYNKFWSEVQSKLPKNIFSFTIRYLNNTLPTRKNLSKWKLSLSSSCSSCFETETLLHVVAGCKTYLQEGRYTWRHNSALQFLAGSLKSLEGCTIYADICGFLSPCIITGDALRPDLLLVTPQQQLYILELTVGYETNLDKNSSRKYEKYRSLIRDLQSSFSKVSFVNLSMSSLGIFGKSCITFSKMCNALNIDNKHERFLSTKLSNIIIRTTHYIFCRRNKPWTSPELLSLY

SEQ ID NO: 20146 - protein, 1058 aa, Morbakka virulenta
MFEFSFRYFLTLFVVCSFCGKEFQSLGRHVWRCKKRLQENTCNPNGEINLPLIRKNNRDSYTSNVTAGVKCSCGKVCKGLKGLKIHQRNCRVIKGFEEDTFEQIPEDISNNSEPTTVLSSGEQLEIKEGIRLPRSSEQWEIANCYFQSIFASVELKPSTIDSVIRFMNDSIYEHFKRTCGTTNKNFDEGYQRKYQDRKVNQLKKDLKLLKKSNTSVMEIKYVSSLLRQKLTSSHNVHTLSNHDNFISKNFWGYVKRVLQKSSSILPTFSEVCCTQYFSKILSSTIPNKHFKIPSWIPSFNEPEHPFSTDPPSYKKITSVIRRMKSSASPCPLDKISIICFKRCPYLRSFLTKIIKIIWISGKVPPEWKKASTILIHKKGNTDDPSNFRPITLQTVPLKVFTSCLRDSVFEYLKNNNFVEHMIQKGFTSKISGTLEHTAMMAHVINKARTNQRSLVITLLDLKNAFGEVHHNLITSVLDHHHIPDKIKSLITSLYTEFKTSFITDHFTTEAITVRHGLLQGDCLSPLLFNMCFNTFIQYIRAEKYKQLGFSPHDKNDRMFNPVHWFQFADDAAVITSGERENQLLLNCFTRWCQWANMIIRVDKCATFGIKKFTTRSLQFQPKLFVNNETVPPVAMGDAFKYLGRYFDFEMTNQSHKSKLLSVLLDLLKQIDSLPIHPKHKLRLYSEFALPKVSWHLTVSNVSKTWVAENLDNLVSKYIRQWLDLPISATLSSIILSKNQFGLNLQLPTTKFLQCQTVTRNALKLSPNDNIRTLWKNTSNGTNIQHDVYKNTKEVLKAVQTEHKERLQSHLTTQGTILSFLFDNATSKYNKFWSEVQSKLPKNIFSFTIRYLNNTLPTRKNLSKWKLSLSSSCSSCFETETLLHVVAGCKTYLQEGRYTWRHNSALQFLAGSLKSLEGCTIYADICGFLSPCIITGDALRPDLLLVTPQQQLYILELTVGYETNLDKNSSRKYEKYRSLIRDLQSSFSKVSFVNLSMSSLGIFGKSCITFSKMCNALNIDNKHERFLSTKLSNIIIRTTYYIFCRRNKPWTSPELLSLY

SEQ ID NO: 20147 - protein, 1058 aa, Morbakka virulenta
MFEFSFRYFLTLFVVCSFCGKEFQSLGRHVWRCKKRLQENTCNPNGEINLPLIRKNNRDSYTSNVTAGVKCSCGKVCKGLKGLKIHQRNCRVIKGFEEDTFEQIPEDISNNSEPTTVLSSGEQLEIKEGIRLPRSSEQWEIANSYFQSIFASVELKPSTIDSVIRFMNDSIYEHFKRTCGTTNKNFDEGYQRKYQDRKVNQLKKDLKLLKKSNTSVMEIKYVSSLLRQKLTSSHNVHTLSNHDNFISKNFWGYVKRVLQKSSSILPTFSEVCCTQYFSKILSSTIPNKHFKIPSWIPSFNEPEHPFSTDPPSYKKITSVIRRMKSSASPCPLDKISIICFKRCPYLRSFLTKIIKIIWISGKVPPEWKKASTILIHKKGNTDDPSNFRPITLQTVPLKVFTSCLRDSVFEYLKNNNFVEHMIQKGFTSKISGTLEHTAMMAHVINKARTNQRSLVITLLDLKNAFGEVHHNLITSVLDHHHIPDKIKSLITSLYTEFKTSFITDHFTTEAITVRHGLLQGDCLSPLLFNMCFNTFIQYIRAEKYKQLGFSPHDKNDRMFNPVHWFQFADDAAVITSGERENQLLLNCFTRWCQWANMIIRVDKCATFGIKKFTTRSLQFQPKLFVNNETVPPVAMGDAFKYLGRYFDFEMTNQSHKSKLLSVLLDLLKQIDSLPIHPKHKLRLYSEFALPKVSWHLTVSNVSKTWVAENLDNLVSKYIRQWLDLPISATLSSIILSKNQFGLNLQLPTTKFLQCQTVTRNALKLSPNDNIRTLWKNTSNGTNIQHDVYKNTKEVLKAVQTEHKERLQSHLTTQGTILSFLFDNATSKYNKFWSEVQSKLPKNIFSFTIRYLNNTLPTRKNLSKWKLSLSSSCSSCFETETLLHVVAGCKTYLQEGRYTWRHNSALQFLAGSLKSLEGCTIYADICGFLSPCIITGDALRPDLLLVTPQQQLYILELTVGYETNLDKNSSRKYEKYRSLIRDLQSSFSKVSFVNLSMSSLGIFGKSCITFSKMCNALNIDNKHERFLSTKLSNIIIRTTYYIFCRRNKPWTSPELLSLY

SEQ ID NO: 20148 - protein, 892 aa, Morbakka virulenta
MNDSIYEHFKRTCGTTNKNFDEGYQRKYQDRKVNQLKKDLKLLKKSNTSVMEIKYVSSLLRQKLTSSHNVHTLSNHDNFISKNFWGYVKRVLQKSSSILPTFSEVCCTQYFSKILSSTIPNKHFKIPSWIPSFNEPEHPFSTDPPSYKKITSVIRRMKSSASPCPLDKISIICFKRCPYLRSFLTKIIKIIWISGKVPPEWKKASTILIHKKGNTDDPSNFRPITLQTVPLKVFTSCLRDSVFEYLKNNNFVEHMIQKGFTSKISGTLEHTAMMAHVINKARTNQRSLVITLLDLKNAFGEVHHNLITSVLDHHHIPDKIKSLITSLYTEFKTSFITDHFTTEAITVRHGLLQGDCLSPLLFNMCFNTFIQYIRAEKYKQLGFSPHDKNDRMFNPVHWFQFADDAAVITSGERENQLLLNCFTRWCQWANMIIRVDKCATFGIKKFTTRSLQFQPKLFVNNETVPPVAMGDAFKYLGRYFDFEMTNQSHKSKLLSVLLDLLKQIDSLPIHPKHKLRLYSEFALPKVSWHLTVSNVSKTWVAENLDNLVSKYIRQWLDLPISATLSSIILSKNQFGLNLQLPTTKFLQCQTVTRNALKLSPNDNIRTLWKNTSNGTNIQHDVYKNTKEVLKAVQTEHKERLQSHLTTQGTILSFLFDNATSKYNKFWSEVQSKLPKNIFSFTIRYLNNTLPTRKNLSKWKLSLSSSCSSCFETETLLHVVAGCKTYLQEGRYTWRHNSALQFLAGSLKSLEGCTIYADICGFLSPCIITGDALRPDLLLVTPQQQLYILELTVGYETNLDKNSSRKYEKYRSLIRDLQSSFSKVSFVNLSMSSLGIFGKSCITFSKMCNALNIDNKHERFLSTKLSNIIIRTTYYIFCRRNKPWTSPELLSLY

SEQ ID NO: 20149 - protein, 1058 aa, Morbakka virulenta
MFEFSFRYFLTLFVVCSFCGKEFQSLGRHVWRCKKRLQENSCNPNGEINLPLIRKNNRDSYTSNVTAGVKCSCGKVCKGLKGLKIHQRNCRVIKGFEEDTFEQIPEDISNNSEPTTVLSSGEQLEIKEGIRLPRSSEQWEIANCYFQSIFASVELKPSTIDSVIRFMNDSIYEHFKRTCGTTNKNFDEGYQRKYQDRKVNQLKKDLKLLKKSNTSVMEIKYVSSLLRQKLTSSHNVHTLSNHDNFISKNFWGYVKRVLQKSSSILPTFSEVCCTQYFSKILSSTIPNKHFKIPSWIPSFNEPEHPFSTDPPSYKKITSVIRRMKSSASPCPLDKISIICFKRCPYLRSFLTKIIKIIWISGKVPPEWKKASTILIHKKGNTDDPSNFRPITLQTVPLKVFTSCLRDSVFEYLKNNNFVEHMIQKGFTSKISGTLEHTAMMAHVINKARTNQRSLVITLLDLKNAFGEVHHNLITSVLDHHHIPDKIKSLITSLYTEFKTSFITDHFTTEAITVRHGLLQGDCLSPLLFNMCFNTFIQYIRAEKYKQLGFSPHDKNDRMFNPVHWFQFADDAAVITSGERENQLLLNCFTRWCQWANMIIRVDKCATFGIKKFTTRSLQFQPKLFVNNETVPPVAMGDAFKYLGRYFDFEMTNQSHKSKLLSVLLDLLKQIDSLPIHPKHKLRLYSEFALPKVSWHLTVSNVSKTWVAENLDNLVSKYIRQWLDLPISATLSSIILSKNQFGLNLQLPTTKFLQCQTVTRNALKLSPNDNIRTLWKNTSNGTNIQHDVYKNTKEVLKAVQTEHKERLQSHLTTQGTILSFLFDNATSKYNKFWSEVQSKLPKNIFSFTIRYLNNTLPTRKNLSKWKLSLSSSCSSCFETETLLHVVAGCKTYLQEGRYTWRHNSALQFLAGSLKSLEGCTIYADICGFLSPCIITGDALRPDLLLVTPQQQLYILELTVGYETNLDKNSSRKYEKYRSLIRDLQSSFSKVSFVNLSMSSLGIFGKSCITFSKMCNALNIDNKHERFLSTKLSNIIIRTTYYIFCRRNKPWTSPELLSLY

SEQ ID NO: 20150 - protein, 952 aa, Cassiopea xamachana
MDESYCETEECPEERLRDQFELNPGIRLPRSDNEWLLANTFFQSAFVNVVVNESTVSDVVKLMSTTIYNYFKEACGTVGSCDKELENKYKDCLAKDLKKQLKYLKSSNAPISEIKFVSSRLRKQLNRHLPVNHNSNITNHDRFISKHFWNYVKRYLQSTQSLLPSFHLTRCTEHFCKAFSALNSNKLFPIPSWIPKFSERAYPFDMKLPSYQTITSIIRRMKASTSPCPLDKISIICFKRCPYLRSFLTEIIRVIWLSGRVPPEWKKAAILIHKKGSTDDPANFRPITLESVPLKIFTSCLRNSMFNFLKKNNFIENQIQKGFTSNISGTIEHTSFMSHVIDKARIKQRSLVITLLDLKSAFGEVHHNLIKSVLSYHHIPSHVQALISNLYLDFKTSIITEEFQTPAISVRRGVLQGDCLSPLLFNLCFNTFIQFIKAEKYQHLGFSVHDGSDRMFQPVHWFQFADDAAVITSGEKENQILLNCFTRWCQWASFVIRVDKCVTFGVKKYSTRSIQFQPKLLIDKQLVPPVKNGESFKYLGRYFDFEMTNELHKSKLLSLFSTLMTGIDDLPLHPKNKLLVYHRYALSKVSWHFTVSDIPRTWVTENLDNLVSRYIRSWLDLPVSATLTSLALTQKQFGLNLQMPSVKFTQCQTVSRNILRSSPNANVQALWKNTSTGANLQYDIYRNTREVLKAVKLGIRERLTHNLPSQGALLSFLLDHSLKILNGIWSGVQSNLPVNIYNFTIKYLSNTLPTRKILFLWKLRQSSDCQFCLLPETLLHVVAGCTVYLEQGRYTWRHNSVLSFLATSLKVVEGSSLYADIPGFPSPSIITGDALRPDLPLKTKDNCLYILELTIGFETNLSNNAERKRLKYSRLVSDLRSQYKSVTFVNLSMSSLGIYANSCLSFLKMCDSLSIDNQHKRILISKLSTISIRTTYYIFCCRDKPWNNPDLL

SEQ ID NO: 20151 - protein, 1058 aa, Morbakka virulenta
MFEFSFRYFLTLFVVCSFCGKEFQSLGRHVWRCKKRLQGNTCNPNGEINLPLIRKNNRDSYTSNVTAGVKCSCGKVCKGLKGLKIHQRNCRVIKGFEEDTFEQIPEDISNNSEPTTVLSSGEQLEIKEGIRLPRSSEQWEIANCYFQSIFASVELKPSTIDSVIRFMNDSIYEHFKRTCGTTNKNFDEGYQRKYQDRKVNQLKKDLKLLKKSNTSVMEIKYVSSLLRQKLTSSHNVHTLSNHDNFISKNFWGYVKRVLQKSSSILPTFSEVCCTQYFSKILSSTIPNKHFKIPSWIPSFNEPEHPFSTDPPSYKKITSVIRRMKSSASPCPLDKISIICFKRCPYLRSFLTKIIKIIWISGKVPPEWKKASTILIHKKGNTDDPSNFRPITLQTVPLKVFTSCLRDSVFEYLKNNNFVEHMIQKGFTSKISGTLEHTAMMAHVINKARTNQRSLVITLLDLKNAFGEVHHNLITSVLDHHHIPDKIKSLITSLYTEFKTSFITDHFTTEAITVRHGLLQGDCLSPLLFNMCFNTFIQYIRAEKYKQLGFSPHDKNDRMFNPVHWFQFADDAAVITSGERENQLLLNCFTRWCQWANMIIRVDKCATFGIKKFTTRSLQFQPKLFVNNETVPPVAMGDAFKYLGRYFDFEMTNQSHKSKLLSVLLDLLKQIDSLPIHPKHKLRLYSEFALPKVSWHLTVSNVSKTWVAENLDNLVSKYIRQWLDLPISATLSSIILSKNQFGLNLQLPTTKFLQCQTVTRNALKLSPNDNIRTLWKNTSNGTNIQHDVYKNTKEVLKAVQTEHKERLQSHLTTQGTILSFLFDNATSKYNKFWSEVQSKLPKNIFSFTIRYLNNTLPTRKNLSKWKLSLSSSCSSCFEPETLLHVVAGCKTYLQEGRYTWRHNSALQFLAGSLKSLEGCTIYADNCGFLSPCIITGDALRPDLLLVTPQQQLYILELTVGYETNLDKNSSRKYEKYRSLIRDLQSSFSKVSFVNLSMSSLGIFGKSCITFSKMCNALNIDNKHERFLSTKLSNIIIRTTYYIFCRRNKPWTSPELLSLY

SEQ ID NO: 20152 - protein, 970 aa, Rhopilema esculentum
MPLIITVGEEQLHEIVTDDDLDTNDNPDVPLEEYFEIKPGIRLPSSDNEWLLANSYFQSALVDVSINESSVDNVTRLMMDSIYDYFRDTCGVIENCNKDLSTKYKDHSIKSLKKQLKALKYSKAPILEIKYVSGLIRKKLKTNILQTNTSDTIDHDKYIAKNFWSYVKRFFQSKSSLLPSFSATRCTEYFSNAFSALYPNKRFTIPSWIPSFDEPSYPFDTQPPSYQVITSIIRRMKSSTSPCPLDKISIICFKRCPYLRSFLTKIIHSIWVSGSVPSEWKKASTILIHKKDNTDDPSNFRPITLESVPLKIFTSCLRNSVFNFLKQNGFIESQIQKGFTPKISGTLEHTALMGHMINKARTKQRSLVVTLLYLKNAFGEVHHNLIPTILSYHHIPSHIQALVSSLYSGFKTSILTDTFQTPAIPVCRGVLQGDCLSPLIFNLCFNTYIQYIKAEKYKQLGFSPHDENDRMFQPVHWFQFADDAAVVTSGEKENQLLLNCFTRWCQWAIFVIRVDKCVTFGIKKYSTRSFQFQPKLFVNNQSVPVVKNGESFKYLGRFFDFEMTNGSHKEKLLSMFPSLLKEIDDLPLHPKNKLLLYHRYVLSKVSWHFTVADLSKTWVIENLDNLVSKYIRQWLDLPISATLTSIVLSKNQFGLDLQLPSVKFTQCQTVSRNALRTSPNTNIQALWKNTSSGMNLQYDIYRNTKDVLKAVKSDSRERLAYQLLSQGAIISFLLDHSLKKLNGLWSVVQSNLPTNIFNFTIKYLNNTLPTRKNLSLWNPSQSSDCEFCLLPETVLHVVAGCKVYLEQGRYTWRHNSALNFLATSLKAIEGSSLFADIFGFSSPSIITGDNLRPDLLLCTKENILYVLELTIGFETNLNCNAERKRSKYARLVSDLRPRFKSVIFVNLSISSLGIFGDSCSSFLEMCDSLSIEDQHKRYLISKLSTISIRTTYYIFCCRNKTWTNPELLPF

SEQ ID NO: 20153 - protein, 893 aa, Rhopilema esculentum
MNETIYNYFKETCGTMECCNEDLKEKYSNSTAKNLKKELRTLKHSNAPLIEIKFVSNLLRNKIKKHISPSKSSNVTNHDRYISKNFWNYVKRTLQYETSALPTFSAAGCTEYFVKTFSAIAPNKHFTIPSWIPTFNEPSYSFDLEPPSYKTITSIIRRMKASTSPCPLDKISIICFKRSPYLRSFLTEIIRVVWLSGKVPSEWKKASTILIHKKDSTDDPSNFRPITLESVPLKIFTSCLRDSIFTFLKHNGFIEHQIQKGFTSKVSGTLEHTAMMSHFINKARIKQRSLVVSLLDLKNAFGEVHHKLIPAILAYHHIPSEIQSLISSLYLDFKTCVITDKFQTPAIPVRRGVLQGDCLSPLLFNLCFNTFIQYIKSDKYKQLGFSPHDGNDRMFQPVHWFQFADDAAVVTSGEKENQLLLNCFTRWCQWANFIVRVDKCVTFGVKKHSTRSLQFQPKLFICNQIVPAVKNGDSFKYLGRFFDFEMSNQDHKSKLVSLFSTLMKDIDDLPLHPKNKLLLYHRYILSKVSWHFTVADLPKTWVVQNLDNLVSNYIRQWLDLPVSATLSGIILSKNQFGLNLQLPSIKFTQCQTVCRNALKSSPNIDIQTLWKNTSHGTNLQYDIYRNTKKVLKAVKTDNKERLSQNLPSQGATITFLLKHSLEKLNGIWSSTQSNLPCNIFNFTIKYLNNTLPTRKNLLKWNLSQTSDCEFCLLPETLLYVVAGCKVYLDQGRYTWRHNSALNFLATSFQAINGSSLYADLPGFLSPSIITGDQLRPDLLLKTKENCLYVLELTIGFETNLNCNAARKSGKYATLVSDLKRQFKSVSFVNLSISSLGIFGDSCSSFIDMCDSLSIDHQQKRYLISKLTSISIRTTYYIFCCRNKTWTNPELHPF

SEQ ID NO: 20154 - protein, 1058 aa, Morbakka virulenta
MFEFSFRYFLTLFVVCSFCGKEFQSLGRHVWRCKKRLQENTCNPNGEINLPLIRKNNRDSYTSNVTAGVKCSCGKVCKGLKGLKIHQRNCRVIKGFEEDTFEQIPEYISNNSEPTTVLSSGEQLEIKEGIRLPRSSEQWEIANCYFQSIFASVELKPSTIDSVIRFMNDSIYEHFKRTCGTTNKNFDEGYQRKYQDRKVNQLKKDLKLLKKSNTSVMEIKYVSSLLRQKLTSSHNVHTLSNHDNFISKNFWGYVKRVLQKSSSILPTFSEVCCTQYFSKILSSTIPNKHFKIPSWIPSFNEPEHPFSTDPPSYKKITSVIRRMKSSASPCPLDKISIICFKRCPYLRSFLTKIIKIIWISGKVPPEWKKASTILIHKKGNTDDPSNFRPITLQTVPLKVFTSCLRDSVFEYLKNNNFVEHMIQKGFTSKISGTLEHTAMMAHVINKARTNQRSLVITLLDLKNAFGEVHHNLITSVLDHHHIPDKIKSLITSLYTEFKTSFITDHFTTEAITVRHGLLQGDCLSPLLFNMCFNTFIQYIRAEKYKQLGFSPHDKNDRMFNPVHWFQFADDAAVITSGERENQLLLNCFTRWCQWANMIIRVDKCATFGIKKFTTRSLQFQPKLFVNNETVPPVAMGDAFKYLGRYFDFEMTNQSHKSKLLSVLLDLLKQIDSLPIHPKHKLRLYSEFALPKVSWHLTVSNVSKTWVAENLDNLVSKYIRQWLDLPISATLSSIILSKNQFGLNLQLPTTKFLQCQTVTRNALKLSPNDNIRTLWKNTSNGTNIQHDVYKNTKEVLKAVQTEHKERLQSHLTTQGTILSFLFDNATSKYNKFWSEVQSKLPKNIFSFTIRYLNNTLPTRKNLSKWKLSLSSSCSSCFETETLLHVVAGCKTYLQEGRYTWRHNSALQFLAGSLKSLEGCTIYADICGFLSPCIITGDALRPDLLLVTPQQQLYILELTVGYETNLDKNSSRKYEKYRSLIRDLQSSFSKVSFVNLSMSSLGIFGKSCITFSKMCNALNIDNKHERFLSTKLSNIIIRTTYYIFCRRNKPWTSPELLSLY

SEQ ID NO: 20155 - protein, 952 aa, Cassiopea andromeda
MDESYCETKECPEERLRDQFELNPGIRLPRSDNEWLLANTFFQSAFVNVVVNESTVSDVVKLMSTTIYNYFKEACGTVGSCDKELENKYKDCLAKDLKKQLKYLKSSNAPISEIKFVSSRLRKQLNRHLPVNHNSNITNHDRFISKHFWNYVKRYLQSTQSLLPSFHLTRCTEHFCKAFSALNSNKLFPIPSWIPKFSERAYPFDMKPPSYQTITSIIRRMKASTSPCPLDKISIICFKRCPYLRSFLTEIIRVIWLSGRVPPEWKKAAILIHKKGSTDDPANFRPITLESVPLKIFTSCLRNSIFNFLKKNNFIENQIQKGFTSNISGTIEHTSFMSHVIDKARIKQRSLVITLLDLKSAFGEVHHNLIKSVLSYHHIPSHVQALISNLYLDFKTSIITEEFQTPAISVRRGVLQGDCLSPLLFNLCFNTFIQFIKAEKYQHLGFSVHDGSDRMFQPVHWFQFADDAAVITSGEKENQILLNCFTRWCQWASFVIRVDKCVTFGVKKYSTRSIQFQPKLLIDKQLVPPVKNGESFKYLGRYFDFDMTNELHKSKLLSLFSTLMTGIDDLPLHPKNKLLVYHRYALSKVSWHFTVSDIPRTWVTENLDNLVSRYIRSWLDLPVSATLTSLALTQKQFGLNLQMPSVKFTQCQTVSRNILRSSPNANVQALWKNTSTGANLQYDIYRNTREVLKAVKLGIRERLTHNLPSQGALLSFLLDHSLKILNGIWSGVQSNLPVNIYNFTIKYLSNTLPTRKILFLWKLRQSSDCQFCLLPETLLHVVAGCTVYLEQGRYTWRHNSVLSFLATSLKVVEGSSLYADIPGFPSPSIITGDALRPDLPLKTKDNCLYILELTIGFETNLSNNAERKRLKYSRLVSDLRSQYKSVTFVNLSMSSLGIYANSCLSFLKMCDSLSIDNQHKRILISKLSTISIRTTYYIFCCRDKPWNNPDLL

SEQ ID NO: 20156 - protein, 1058 aa, Morbakka virulenta
MFEFSFRYFLTLFVVCSFCGKEFQSLGRHVWRCKKRLQENTCNPNGEINLPLIRKNNRDSYTSNVTAGVKCSCGKVCKGLKGLKIHQRNCRVIKGFEEDTFEQIPEDISNNTEPTTVLSSGEQLEIKEGIRLPRSSEQWEIANYYFKSIFASVELKPSTIDSVIRFMNDSIYEHFKRTCGTTNKNFDEGYQRKYQDRKVNQLKKDLKLLKKSNTSVMEIKYVSSLLRQKLTSSHNVHTLSNHDNFISKNFWGYVKRVLQKSSSILPTFSEVCCTQYFSKIFSSTIPNKHFKIPSWIPSFNEPEHPFSTDPPSYKKITSVIRRMKSSASPCPLDKISIICFKRCPYLRSFLTKIIKIIWISGKVPPEWKKASTILIHKKGNTDDPSNFRPITLQTVPLKVFTSCLRDSVFEYLKNNNFVEHMIQKGFTSKISGTLEHTAMMAHVINKARTNQRSLVITLLDLKNAFGEVHHNLITSVLDHHHIPDKIKSLITSLYTEFKTSFITDHFTTEAITVRHGLLQGDCLSPLLFNMCFNTFIQYIRAEKYKQLGFSPHDKNDRMFNPVHWFQFADDAAVITSGERENQLLLNCFTRWCQWANMIIRVDKCATFGIKKFTTRSLQFQPKLFVNNETVPPVAMGDAFKYLGRYFDFEMTNQSHKSKLLSVLLDLLKQIDSLPIHPKHKLRLYSEFALPKVSWHLTVSNVSKTWVAENLDNLVSKYIRQWLDLPISATLSSIILSKNQFGLNLQLPTTKFLQCQTVTRNALKLSPNDNIRTLWKNTSNGTNIQHDVYKNTKEVLKAVQTEHKERLQSHLTTQGTILSFLFDNATSKYNKFWSEVQSKLPKNIFSFTIRYLNNTLPTRKNLSKWKLSLSSSCSSCFETETLLHVVAGCKTYLQEGRYTWRHNSALQFLAGSLKSLEGCTIYADICGFLSPCIITGDALRPDLLLVTPQQQLYILELTVGYETNLDKNSSRKYEKYRSLIRDLQSSFSKVSFVNLSMSSLGIFGKSCITFSKMCNALNIDNKHERFLSTKLSNIIIRTTYYIFCRRNKPWTNPELLSLY

SEQ ID NO: 20157 - protein, 1058 aa, Morbakka virulenta
MFEFSFRYLLTLFVVCSFCGKEFQSLGRHVWRCKKRLQENTCNPNGEINLPLIRKNNRDSYTSNVTAGVKCSCGKVCKGLKGLKIHQRNCRVIKGFEEDTFEQIPEDISNNSEPTTVLSSGEQLEIKEGIRLPRSSEQWEIANCYFQSIFASVELKPSTIDSVIRFMNDSIYEHFKRTCGTTNKNFDEGYQRKYQDRKVNQLKKDLKLLKKSNTSVMEIKYVSSLLRQKLTSSHNVHTLSNHDNFISKNFWGYVKRVLQKSSSILPTFSEVCCTQYFSKILSSTIPNKHFKIPSWIPSFNEPEHPFSTDPPSYKKITSVIRRMKSSASPCPLDKISIICFKRCPYLRSFLTKIIKIIWISGKVPPEWKKASTILIHKKGNTDDPSNFRPITLQTVPLKVFTSCLRDSVFEYLKNNNFVEHMIQKGFTSKISGTLEHTAMMAHVINKARTNQRSLVITLLDLKNAFGEVHHNLITSVLDHHHIPDKIKSLITSLYTEFKTSFITDHFTTEAITVRHGLLQGDCLSPLLFNMCFNTFIQYIRAEKYKQLGFSPHDKNDRMFNPVHWFQFADDAAVITSGERENQLLLNCFTRWCQWANMIIRVDKCATFGIKKFTTRSLQFQPKLFVNNETVPPVAMGDAFKYLGRYFDFEMTNQSHKSKLLSVLLDLLKQIDSLPIHPKHKLRLYSEFALPKVSWHLTVSNVSKTWVAENLDNLVSKYIRQWLDLPISATLSSIILSKNQFGLNLQLPTTKFLQCQTVTRNALKLSPNDNIRTLWKNTSNGTNIQHDIYKNTKEVLKAVQTEHKERLQSHLTTQGTILSFLFDNATSKYNKFWSEVQSKLPKNIFSFTIRYLNNTLPTRKNLSKWKLSLSSSCSSCFEPETLLHVVAGCKTYLQEGRYTWRHNSALQFLAGTLKSLEGCTIYADICGFLSPCIITGDALRPDLLLVTPQQQLYILELTVGYETNLDKNSSRKYEKYRSLIRDLQSSFSKVSFVNLSMSSLGIFGKSCITFSKMCNALNIDNKHERFLSTKLSNIIIRTTYYIFCCRNKPWTSPELLSLY

SEQ ID NO: 20158 - protein, 1058 aa, Morbakka virulenta
MFEFSFRYFLTLFVVCSFCGKEFQSLGRHVWRCKKRLQENTCNPNGEINLPLIRKNNRDSYTSNVTAGVKCSCGKVCKGLKGLKIHQRNCRVIKGFEEDTFEQIPEDISNNNEPTTVLSSGEQLEIKEGIRLPRSSEQWEIANCYFQSIFASVELKPSTIDSVIRFMNDSIYEHFKRTCGTTNKNFDEGYQRKYQDRKVNQLKKDLKLLKKSNTSVMEIKYVSSLLRQKLTSSHNVHTLSNHDNFISKNFWGYVKRVLQKSSSILPTFSEVCCTQYFSKILSSTIPNKHFKIPSWIPSFNEPEHPFSTDPPSYKKITSVIRRMKSSASPCPLDKISIICFKRCPYLRSFLTKIIKIIWISGKVPPEWKKASTILIHKKGNTDDPSNFRPITLQTVPLKVFTSCLRDSVFEYLKNNNFVEHMIQKGFTSKISGTLEHTAMMAHVINKARTNQRSLVITLLDLKNAFGEVHHNLITSVLDHHHIPDKIKSLITSLYTEFKTSFITDHFTTEAITVRHGLLQGDCLSPLLFNMCFNTFIQYIRAEKYKQLGFSPHDKNDRMFNPVHWFQFADDAAVITSGERENQLLLNCFTRWCQWANMIIRVDKCATFGIKKFTTRSLQFQPKLFVNNETVPPVAMGDAFKYLGRYFDFEMTNQSHKSKLLSVLLDLLKQIDSLPIHPKHKLRLYSEFALPKVSWHLTVSNVSKTWVAENLDNLVSKYIRQWLDLPISATLSSIILSKNQFGLNLQLPTTKFLQCQTVTRNALKLSPNDNIRTLWKNTSNGTNIQHDVYKNTKEVLKAVQTEHKERLQSHLTTQGTILSFLFDNATSKYNKFWSEVQSKLPKNIFSFTIRYLNNTLPTRKNLSKWKLSLSSSCSSCFETETLLHVVAGCKTYLQEGRYTWRHNSALQFLAGSLKSLEGCTIYADICGFLSPCIITGDALRPDLLLVTPQQQLYILELTVGYETNLDKNSSRKYEKYRSLIRDLQSSFSKVSFVNLSMSSLGIFGKSCITFSKMCNALNIDNKHERFLSTKLSNIIIRTTYYIFCRRNKPWTNPELLSLY

SEQ ID NO: 20159 - protein, 1058 aa, Morbakka virulenta
MFEFSFRYLLTLFVVCSFCGKEFQSLGRHVWRCKKRLQENTCNPNGEINLPLIRKNNRDSYTSNVTAGVKCSCGKVCKGLKGLKIHQRNCRVIKGFEEDTFEQIPEDISNNSEPTTVLSSGEQLEIKEGIRLPRSSEQWEIANCYFQSIFASVELKPSTIDSVIRFMNDSIYEHFKRTCGTTNKNFDEGYQRKYQDRKVNQLKKDLKLLKKSNTSVMEIKYVSSLLRQKLTSSHNVHTLSNHDNFISKNFWGYVKRVLQKSSSILPTFSEVCCTQYFSKILSSTIPNKHFKIPSWIPSFNEPEHPFSTDPPSYKKITSVIRRMKSSASPCPLDKISIICFKRCPYLRSFLTKIIKIIWISGKVPPEWKKASTILIHKKGNTDDPSNFRPITLQTVPLKVFTSCLRDSVFEYLKNNNFVEHMIQKGFTSKISGTLEHTAMMAHVINKARTNQRSLVITLLDLKNAFGEVHHNLITSVLDHHHIPDKIKSLITSLYTEFKTSFITDHFTTEAITVRHGLLQGDCLSPLLFNMCFNTFIQYIRAEKYKQLGFSPHDKNDRMFNPVHWFQFADDAAVITSGERENQLLLNCFTRWCQWANMIIRVDKCATFGIKKFTTRSLQFQPKLFVNNETVPPVAMGDAFKYLGRYFDFEMTNQSHKSKLLSVLLDLLKQIDSLPIHPKHKLRLYSEFALPKVSWHLTVSNVSKTWVAENLDNLVSKYIRQWLDLPISATLSSIILSKNQFGLNLQLPTTKFLQCQTVTRNALKLSPNDNIRTLWKNTSNGTNIQHDVYKNTKEVLKAVQTEHKERLQSHLTTQGTILSFLFDNATSKYNKFWSEVQSKLPKNIFSFTIRYLNNTLPTRKNLSKWKLSLSSSCSSCFETETLLHVVAGCKTYLQEGRYTWRHNSALQFLAGSLKSLEGCTIYADICGFLSPCIITGDALRPDLLLVTPQQQLYILELTVGYETNLDKNSSRKYEKYRSLIRDLQSSFSKVSFVNLSMSSLGIFGKSCITFSKMCNALNIDNKHERFLSTKLSNIIIRTTYYIFCRRNKPWTNPELLSLY

SEQ ID NO: 20160 - protein, 1058 aa, Morbakka virulenta
MFEFSFRYFLTLFVVCSFCGKEFQSLGRHVWRCKKRLQENTCNPNGEINLPLIRKNNRDSYTSNVTAGVKCSCGKVCKGLKGLKIHQRNCRVIKGFEEDTFEQIPEDISNNSEPTTVLSSGEQLEIKEGIRLPRSSEQWEIANCYFKSIFASVELKPSTIDSVIRFMNDSIYEHFKRTCGTTNKNFDEGYQRKYQDRKVNQLKKDLKLLKKSNTSVMEIKYVSSLLRQKLTSSHNVHTLSNHDNFISKNFWGYVKRVLQKSSSILPTFSEVCCTQYFSKILSSTIPNKHFKIPSWIPSFNEPEHPFSTDPPSYKKITSVIRRMKSSASPCPLDKISIICFKRCPYLRSFLTKIIKIIWISGKVPPEWKKASTILIHKKGNTDDPSNFRPITLQTVPLKVFTSCLRDSVFEYLKNNNFVEHMIQKGFTSKISGTLEHTAMMAHVINKARTNQRSLVITLLDLKNAFGEVHHNLITSVLDHHHIPDKIKSLITSLYTEFKTSFITDHFTTEAITVRHGLLQGDCLSPLLFNMCFNTFIQYIRAEKYKQLGFSPHDKNDRMFNPVHWFQFADDAAVITSGERENQLLLNCFTRWCQWANMIIRVDKCATFGIKKFTTRSLQFQPKLFVNNETVPPVAMGDAFKYLGRYFDFEMTNQSHKSKLLSVLLDLLKQIDSLPIHPKHKLRLYSEFALPKVSWHLTVSNVSKTWVAENLDNLVSKYIRQWLDLPISATLSSIILSKNQFGLNLQLPTTKFLQCKTVTRNALKLSPNDNIRTLWKNTSNGTNIQHDVYKNTKEVLKAVQTEHKERLQSHLTTQGTILSFLFDNATSKYNKFWSEVQSKLPKNIFSFTIRYLNNTLPTRKNLSKWKLSLSSSCSSCFETETLLHVVAGCKTYLQEGRYTWRHNSALQFLAGSLKSLEGCTIYADICGFLSPCIITGDALRPDLLLVTPQQQLYILELTVGYETNLDKNSSRKYEKYRSLIRDLQSSFSKVSFVNLSMSSLGIFGKSCITFSKMCNALNIDNKHECFLSTKLSNIIIRTTYYIFCRRNKPWTNPELLSLY

SEQ ID NO: 20161 - protein, 1058 aa, Morbakka virulenta
MFEFSFRYLLTLFVVCSFCGKEFQSLGRHVWRCKKRLQENTCNPNGEINLPLIRKNNRDSYTSNVTAGVKCSCGKVCKGLKGLKIHQRNCRVIKGFEEDTFEQIPEDISNNSEPTTVLSSGEQLEIKEGIRLPRSSEQWEIANCYFQSIFASVELKPSTIDSVIRFMNDSIYEHFKRTCGTTNKNFDEGYQRKYQDRKVNQLKKDLKLLKKSNTSVMEIKYVSSLLRQKLTSSHNVHTLSNHDNFISKNFWGYVKRVLQKSSSILPTFSEVCCTQYFSKIFSSTIPNKHFKIPSWIPSFNEPEHPFSTDPPSYKKITSVIRRMKSSASPCPLDKISIICFKRCPYLRSFLTKIIKIIWISGKVPPEWKKASTILIHKKGNTDDPSNFRPITLQTVPLKVFTSCLRDSVFEYLKNNNFVEHMIQKGFTSKISGTLEHTAMMAHVINKARTNQRSLVITLLDLKNAFGEVHHNLITSVLDHHHIPDKIKSLITSLYTEFKTSFITDHFTTEAITVRHGLLQGDCLSPLLFNMCFNTFIQYIRAEKYKQLGFSPHDKNDRMFNPVHWFQFADDAAVITSGERENQLLLNCFTRWCQWANMIIRVDKCATFGIKKFTTRSLQFQPKLFVNNETVPPVAMGDAFKYLGRYFDFEMTNQSHKSKLLSVLLDLLKQIDSLPIHPKHKLRLYSEFALPKVSWHLTVSNVSKTWVAENLDNLVSKYIRQWLDLPISATLSSIILSKNQFGLNLQLPTTKFLQCQTVTRNALKLSPNDNIRTLWKNTSNGTNIQHDVYKNTKEVLKAVQTEHKERLQSHLTTQGTILSFLFDNATSKYNKFWSEVQSKLPKNIFSFTIRYLNNTLPTRKNLSKWKLSLSSSCSSCFETETLLHVVAGCKTYLQEGRYTWRHNSALQFLAGSLKSLEGCTIYADICGFLSPCIITGDALRPDLLLVTPQQQLYILELTVGYETNLDKNSSRKYEKYRSLIRDLQSSFSKVSFVNLSMSSLGIFGKSCITFSKMCNALNIDNKHERFLSTKLSNIIIRTTYYIFCRRNKPWTSPELLSLY

SEQ ID NO: 20162 - protein, 1058 aa, Rhopilema esculentum
MVRSYIISILILFTICSFCGKDFVTLGRHQWRCKRQIHSKDTGPDGAINIPLINTRSNSIVLNSQQCVKCCCGKSCKGIKGLRIHQRNCKVLKGLGEEQLHEIVTDDDLDTNDNPDVPLEEYFEIKPGIRLPSSDNEWLLANSYFQSALVDVSINESSVDNVTRLMMDSIYDYFRDTCGVIENCNKDLSTKYKDHSIKSLKKQLKALKYSKAPILEIKYVSGLIRKKLKTNILQTNTSDTIDHDKYIAKNFWSYVKRFFQSKSSLLPSFSATRCTEYFSNAFSALYPNKRFTIPSWIPSFDEPSYPFDTQPPSYQVITSIIRRMKSSTSPCPLDKISIICFKRCPYLRSFLTKIIHSIWVSGSVPSEWKKASTILIHKKDNTDDPSNFRPITLESVPLKIFTSCLRNSVFNFLKQNGFIERQIQKGFTPKISGTLEHTALMGHMINKARTKQRSLVVTLLDLKNAFGEVHHNLIPTILSYHHIPSHIQALVSSLYSGFKTSILTDTFQTPAIPVCRGVLQGDCLSPLIFNLCFNTYIQYIKAEKYKQLGFSPHDENDRMFQPVHWFQFADDAAVVTSGEKENQLLLNCFTRWCQWANFVIRVDKCVTFGIKKYSTRSLQFQPKLFVNNQSVPVVKNGESFKYLGRFFDFEMTNGSHKEKLLSMFPSLLKEIDDLPLHPKNKLLLYHRYVLSKVSWHFTVADLSKTWVIENLDNLVSKYIRQWLDLPISATLTSIVLSKNQFGLDLQLPSVKFTQCQTVSRNALRTSPNTNIQALWKNTSSGMNLQYDIYRNTKDVLKAVKSDSRERLAHQLLSQGAIISFLLDHSLKKLNGLWSVVQSNLPTNIFNFTIKYLNNTLPTRKNLSLWNLSQSSDCEFCLLPETLLHVVAGCKVYLEQGRYTWRHNSALNFLATSLKAIEGSSLFADIPGFSSPSIITGDNLRPDLLLRTKENILYVLELTIGFETNLNCNAERKRSKYARLVSDLRPWFKSVIFVNLSISSLGIFGDSCSSFLEMCHSLSIDDQHKRYLISKLSTISIRTTYYIFCCRNKTWTNPELLPF

SEQ ID NO: 20163 - protein, 1058 aa, Morbakka virulenta
MFEFSFRYFLTLFVVCSFCGKEFQSLGRHVWRCKKRLQENTCNPNGEINLPLIRKNNRDSYTSNVTAGVKCSCGKVCKGLKGLKIHQRNCRVIKGFEEDTFEQIPEDISNNNEPTTVLSSGEQLEIKEGIRLPRSSEQWEIANCYFQSIFASVELKPSTIDSVIRFMNDSIYEHFKRTCGTTNKNFDEGYQRKYQDRKVNQLKKDLKLLKKSNTSVMEIKYVSSLLRQKLTSSHNVHTLSNHDNFISKNFWGYVKRVLQKSSSILPTFSEVCCTQYFSKILSSTIPNKHFKIPSWIPSFNEPEHPFSTDPPSYKKITSVIRRMKSSASPCPLDKISIICFKRCPYLRSFLTKIIKIIWISGKVPPEWKKASTILIHKKGNTDDPSNFRPITLQTVPLKVFTSCLRDSVFEYLKNNNFVEHMIQKGFTSKISGTLEHTAMMAHVINKARTNQRSLVITLLDLKNAFGEVHHNLITSVLDHHHIPDKIKSLITSLYTEFKTSFITDHFTTEAITVRHGLLQGDCLSPLLFNMCFNTFIQYIRAEKYKQLGFSPHDKNDRMFNPVHWFQFADDAAVITSGERENQLLLNCFTRWCQWANMIIRVDKCATFGIKKFTTRSLQFQPKLFVNNETVPPVAMGDAFKYLGRYFDFEMTNQSHKSKLLSVLLDLLKQIDSLPIHPKHKLRLYSEFALPKVSWHLTVSNVSKTWVAENLDNLVSKYIRQWLDLPISATLSSIILSKNQFGLNLQLPTTKFLQCQTVTRNALKLSPNDNIRTLWKNTSNGTNIQHDVYKNTKEVLKAVQTEHKERLQSHLTTQGTILSFLFDNATSKYNKFWSEVQSKLPKNIFSFTIRYLNNTLPTRKNLSKWKLSLSSSCSSCFETETLLHVVAGCKTYLQEGRYTWRHNSALQFLAGSLKSLEGCTIYADICGFLSPCIITGDALRPDLLLVTPQQQLYILELTVGYETNLDKNSSRKYEKYRSLIRDLQSSFSKVSFVNLSMSSLGIFGKSCITFSKMCNALNIDNKHERFLSTKLSNIIIRTTYYIFCRRNKPWTSPELLSLY

SEQ ID NO: 20164 - protein, 1058 aa, Morbakka virulenta
MFEFSFRYFLTLFVVCSFCGKEFQSLGRHVWRCKKRLQGNTCNPNGVINLPLIRKNNRDSYSSNVTAGVKCSCGKVCKGLKGLKIHQRNCRVIKGFEEDTFEQIPEDISNNSEPTTVLSSGEQLEIKEGIRLPRSSEQWEIANCYFQSIFASVELKPSTIDSVIRFMNDSIYEHFKRTCGTTNKNFDEGYQRKYQDRKVNQLKKDLKLLKKSNTSVMEIKYVSSLLRQKLTSSHNVHTLSNHDNFISKNFWGYVKRVLQKSSSILPTFSEVCCTQYFSKILSSTIPNKHFKIPSWIPSFNEPEHPFSTDPPSYKKITSVIRRMKSSASPCPLDKISIICFKRCPYLRSFLTKIIKIIWISGKVPPEWKKASTILIHKKGNTDDPSNFRPITLQTVPLKVFTSCLRDSVFEYLKNNNFVEHMIQKGFTSKISGTLEHTAMMAHVINKARTNQRSLVITLLDLKNAFGEVHHNLITSVLDHHHIPDKIKSLITSLYTEFKTSFITDHFTTEAITVRHGLLQGDCLSPLLFNMCFNTFIQYIRAEKYKQLGFSPHDKNDRMFNPVHWFQFADDAAVITSGERENQLLLNCFTRWCQWANMIIRVDKCATFGIKKFTTRSLQFQPKLFVNNETVPPVAMGDAFKYLGRYFDFEMTNQSHKSKLLSVLLDLLKQIDSLPIHPKHKLRLYSEFALPKVSWHLTVSNVSKTWVAENLDNLVSKYIRQWLDLPISATLSSIILSKNQFGLNLQLPTTKFLQCQTVTRNALKLSPNDNIRTLWKNTSNGTNIQHDVYKNTKEVLKAVQTEHKERLQSHLTTQGTILSFLFDNATSKYNKFWSEVQSKLPKNIFSFTIRYLNNTLPTRKNLSKWKLSLSSSCSSCFETETLLHVVAGCKTYLQEGRYTWRHNSAQQFLAGSLKSLEGCTIYADICGFLSPCIITGDALRPDLLLVTPQQQLYILELTVGYETNLDKNSSRKYEKYRSLIRDLQSSFSKVSFVNLSMSSLGIFGKSCITFSKMCNALNIDNKHERFLSTKLSNIIIRTTYYIFCRRNKPWTNPERLSLY

SEQ ID NO: 20165 - protein, 1057 aa, Morbakka virulenta
MFEFSFRYLLTLFVVCSFCGKEFQSLGRHVWRCKKRLQENTCNPNGEINLPLIRKNNRDSYTSNVTAGVKCSCGKVCKGLKGLKIHQRNCRVIKGFEEDTFEQIPEDISNNNEPTTVLSSGEQLEIKEGIRLPRSSEQWEIANCYFQSIFASVELKPSTIDSVIRFMNDSIYEHFKRTCGTTNKNFDEGYQRKYQDRKVNQLKKDLKLLKKSNTSVMEIKYVSSLLRQKLTSSHNVHTLSNHDNFISKNFWGYVKRVLQKSSSILPTFSEVCCTQYFSKILSSTIPNKHFKIPSWIPSFNEPEHPFSTDPPSYKKITSVIRRMKSSASPCPLDKISIICFKRCPYLRSFLTKIIKIIWISGKVPPEWKKASTILIHKKGNTDDPSNFRPITLQTVPLKVFTSCLRDSVFEYLKNNNFVEHMIQKGFTSKISGTLEHTAMMAHVINKARTNQRSLVITLLDLKNAFGEVHHNLITSVLDHHHIPDKIKSLITSLYTEFKTSFITDHFTTEAITVRHGLLQGDCLSPLLFNMCFNTFIQYIRAEKYKQLGFSPHDKNDRMFNPVHWFQFADDAAVITSGERENQLLLNCFTRWCQWANMIIRVDKCATFGIKKFTTRSLQFQPKLFVNNETVPPVAMGDAFKYLGRYFDFEMTNQSHKSKLLSVLLDLLKQIDSLPIHPKHKLRLYSEFALPKVSWHLTVSNVSKTWVAENLDNLVSKYIRQWLDLPISATLSSIILSKNQFGLNLQLPTTKFLQCQTVTRNALKLSPNDNIRTLWKNTSNGTNIQHDVYKNTKEVLKAVQTEHKERLQSHLTTQGTILSFLFDNATSKYNKFWSEVQSKLPKNIFSFTIRYLNNTLPTRKNLSKWKLSLSSSCSSCFETETLLHVVAGCKTYLQEGRYTWRHNSALQFLAGSLKSLEGCTIYADICGFLSPCIITGDALRPDLLLVTPQQQLYILELTVGYETNLDKNSCRKYEKYRSLIRDLQSSFSKVSFVNLSMSSLGIFGKSCITFSKMCNALNIDNKHERFLSTKLSNIIIRTTYYIFCRRNKPWTNPELLSL

SEQ ID NO: 20166 - protein, 999 aa, Morbakka virulenta
MFSRPRDEIPLKPIPNIYEFSPLPWLHQRNCRVIKGFEEDTFEQIPEDISNNSEPTTVLSSGEQLEIKEGIRLPRSSEQWEIANSYFQSNFASVELKPSTIDSVIRFMNDSIYEHFKRTCGTTNKNFDEGYQRKYQDRKVNQLKKDLKLLKKSNTSVMEIKYVSSLLRQKLTSSHNVHTLSNHDNFISKNFWGYVKRVLQKSSSILPTFSEVCCTQYFSKILSSTIPNKHFKIPSWIPSFNEPEHPFSTDPPSYKKITSVIRRMKSSASPCPLDKISIICFKRCPYLRSFLTKIIKIIWISGKVPPEWKKASTILIHKKGNTDDPSNFRPITLQTVPLKVFTSCLRDSVFEYLKNNNFVEHMIQKGFTSKISGTLEHTAMMAHVINKARTNQRSLVITLLDLKNAFGEVHHNLITSVLDHHHIPDKIKSLITSLYTEFKTSFITDHFTTEAITVRHGLLQGDCLSPLLFNMCFNTFIQYIRAEKYKQLGFSPHDKNDRMFNPVHWFQFADDAAVITSGERENQLLLNCFTRWCQWANMIIRVDKCATFGIKKFTTRSLQFQPKLFVNNETVPPVAMGDAFKYLGRYFDFEMTNQSHKSKLLSVLLDLLKQIDSLPIHPKHKLRLYSEFALPKVSWHLTVSNVSKTWVAENLDNLVSKYIRQWLDLPISATLSSIILSKNQFGLNLQLPTTKFLQCQTVTRNALKLSPNDNIRTLWKNTSNGTNIQHDVYKNTKEVLKAVQTEHKERLQSHLTTQGTILSFLFDNATSKYNKFWSEVQSKLPKNIFSFTIRYLNNTLPTRKNLSKWKLSLSSSCSSCFEPETLLHVVAGCKTYLQEGRYTWRHNSALQFLAGSLKSLEGCTIYADIFGFLSPCIITGDALRPDLLLVTPQQQLYILELTVGYETNLDKNSSRKYEKYRSLIRDLQSSFSKVSFVNLSMSSLGIFGKSCITFSKMCNALNIDNKHERFLSTKLSNIIIRTTYYIFCHRNKPWTNPELLSLY

SEQ ID NO: 20167 - protein, 1056 aa, Rhopilema esculentum
MFRCTLLAFLSIFVVCATCGKDFVSLGRHTWRCRKRVDNNGIGPNGAINMPLIDNGIEPPANSQVKCCCGKICKGIKGLKLHQRSCRVITGFDKEELFEEVADNLPDTNTGQDTLHEEIIDLKPGVRLPKTDEQWKLANQFFHSILSNFTLRQDSIGEAIIHMNEVIFNYCKDTYGFQENNSNTGLVEKYQHHSLKNLKKDLKLLKDSHASLDEIRYVSRLLRSKLAKKTSTITSCETLDHDLSISKNFWGYVKRFLQKKPSLLPSFSLERCKQFFIETLSAKHPNKQFPIPSWIPSFSNPTHPFHSDPPPYQKITSIIRRMKSSSSPCPIDKISVICFKRCPYLRSFLTDLIRLIWLSGHVPSEWKKACTILIHKKGDTEDPSNFRPITLQSVPLKIFTSCLRDSVFDFLKQNSFIEHQIQKGFTHQISGTLEHTAMMSHIIDKARIKQRSLVITLLDLKNAFGEVHHNLIKSVLSYHHVPENIQSLISSLYINFKTSIITDKFVTPAIPVKRGVLQGDCLSPLLFNMCFNTFIQYIKAEKFKQLGFSPHSQPDCMFTPEHWFQFADDAAVITNGEKENQLLLNCFTRWCQWSNMIIRVDKCTTFGIKKFSTRSLQYQPKLFINNEMVPPVITGESFKYLGRHFDFNMSNQEHMSKLSSIFTELLTQIDSLPLHPKNKLLLYNSYLLSQVSWHLTVADLSKTWIVENLDNQVSAFIRRWLDLPISATLSGIILSKNQFGLNLILPSVKFMQCQTVCRNALKSSPNQNIQSLWKNTSQSMNIQYDVYRNTREVLKAVRSEHKERLQNHLVSQGTVLSFIFDHSLPIASKIWTTVQSNMPKNIYSFTIKYLSNSLATRKNLSKWNITQSSDCSFCHMPETLLHIVAGCKTYLEEGRYTWRHNSALNFLAQSLKAIPNCSLYADLSGYLSPSIITGDSFRPDLLLVTSDHRLFILELTVGYETNLDVNANRKREKYSNLIHSLSSAYSSIMFVNLSISSLGIFGLSCSSFIDMCNALDISENHLRFMISKLSNLTIRTTYYIFCRRNKSWNNPELLQF

SEQ ID NO: 20168 - protein, 892 aa, Morbakka virulenta
MNDSIYEHFKRTCGTTNKNFDEGYQRKYQDRKVNQLKKDLKLLKKSNTSVMEIKYVSSLLRQKLTSSHNVHTLSNHDNFISKNFWGYVKRVLQKSSSILPTFSEVCCTQYFSKILSSTIPNKHFKIPSWIPSFNEPEHPFSTDPPSYKKITSVIRRMKSSASPCPLDKISIICFKRCPYLRSFLTKIIKIIWISGKVPPEWKKASTILIHKKGNTDDPSNFRPITLQTVPLKVFTSCLRDSVFEYLKNNNFVEHMIQKGFTSKISGTLEHTAMMAHVINKARTNQRSLVITLLDLKNAFGEVHHNLITSVLDHHHIPDKIKSLITSLYTEFKTSFITDHFTTEAITVRHGLLQGDCLSPLLFNMCFNTFIQYIRAEKYKQLGFSPHDKNDRMFNPVHWFQFADDAAVITSGERENQLLLNCFTRWCQWANMIIRVDKCATFGIKKFTTRSLQFQPKLFVNNETVPPVAMGDAFKYLGRYFDFEMTNQSHKSKLLSVLLDLLKQIDSLPIHPKHKLRLYSEFALPKVSWHLTVSNVSKTWVAENLDNLVSKYIRQWLDLPISATLSSIILSKNQFGLNLQLPTTKFLQCQTVTRNALKLSPNDNIRTLWKNTSNGTNIQHDVYKNTKEVLKAVQTEHKERLQSHLTTQGTILSFLFDNATSKYNKFWSEVQSKLPKNIFSFTIRYLNNTLPTRKNLSKWKLSLSSSCSSCFETETLLHVVAGCKTYLQEGRYTWRHNSALQFLAGSLKSLEGCTIYADICGFLSPCIITGDALRPDLLLVTPQQQLYILELTVGYETNLDKNSSRKYEKYRSLIRDLQSSFSKVSFVNLSMSSLGIFGKSCITFSKMCNALNIDNKHERFLSTKLSNIIIRTTYYIFCRRNKPWTNPELLSLY

SEQ ID NO: 20169 - protein, 1058 aa, Morbakka virulenta
MFEFSFRYFLTLFVVCSFCGKEFQSLGRHVWRCKKRLQENTCNPNGEINLPLIRKNNRDSYTSNVTAGVKCSCGKVCKGLKGLKIHQRNCRVIKGFEEDTFEQIPEDISNNREPTTVLSSGEQLEIKEGIRLPRSSEQWEIANCYFQSIFASVELKPSTIDSVIRFMNDSIYEHFKRTCGTTNKNFDEGYQRKYQDRKVNQLKKDLKLLKKSNTSVMEIKYVSSLLRQKLTSSHNVHTLSNHDNFISKNFWGYVKRVLQKSSSILPTFSEVCCTQYFSKILSSTIPNKHFKIPSWIPSFNEPEHPFSTDPPSYKKITSVIRRMKSSASPCPLDKISIICFKRCPYLRSFLTKIIKIIWISGKVPPEWKKASTILIHKKGNTDDPSNFRPITLQTVPLKVFTSCLRDSVFEYLKNNNFVEHMIQKGFTSKISGTLEHTAMMAHVINKARTNQRSLVITLLDLKNAFGEVHHNLITSVLDHHHIPDKIKSLITSLYTEFKTSFITDHFTTEAITVRHGLLQGDCLSPLLFNMCFNTFIQYIRAEKYKQLGFSPHDKNDRMFNPVHWFQFADDAAVITSGERENQLLLNCFTRWCQWANMIIRVDKCATFGIKKFTTRSLQFQPKLFVNNETVPPVAMGDAFKYLGRYFDFEMTNQSHKSKLLSVLLDLLKQIDSLPIHPKHKLRLYSEFALPKVSWHLTVSNVSKTWVAENLDNLVSKYIRQWLDLPISATLSSIILSKNQFGLNLQLPTTKFLQCQTVTRNALKLSPNDNIRTLWKNTSNGTNIQHDVYKNTKEVLKAVQTEHKERLQSHLTTQGTILSFLFDNATSKYNKFWSEVQSKLPKNIFSFTIRYLNNTLPTRKNLSKWKLSLSSSCSSCFETETLLHVVAGCKTYLQEGRYTWRHNSALQFLAGSLKSLEGCTIYADICGFLSPCIITGDALRPDLLLVTPQQQLYILELTVGYETNLDKNSSRKYEKYRSLIRDLQSSFSKVSFVNLSMSSLGIFGKSCITFSKMCNALNIDNKHERFLSTKLSNIIIRTTYYIFCRRNKPWTSPELLSLY

SEQ ID NO: 20170 - protein, 1058 aa, Morbakka virulenta
MFEFSFRYFLTLFVVCSFCGKEFQSLGRHVWRCKKRLQENTCNPNGEINLPLIRKNNRDSYTSNVTAGVKCSCGKVCKGLKGLKIHQRNCRVIKGFEEDTFEQIPEDISNNSEPTTVLSSGEQLEIKEGIRLPRSSEQWEIANCYFQSIFASVELKPSTIDSVIRFMNDSIYEHFKRTCGTTNKNFDEGYQRKYQDRKVNQLKKDLKLLKKSNTSVMEIKYVSSLLRQKLTSSHNVHTLSNHDNFISKNFWGYVKRVLQKSSSILPTFSEVCCTQYFSKILSSTIPNKHFKIPSWIPSFNEPEHPFSTDPPSYKKITSVIRRMKSSASPCPLDKISIICFKRCPYLRSFLTKIIKIIWISGKVPPEWKKASTILIHKKGNTDDPSNFRPITLQTVPLKVFTSCLRDSVFEYLKNNNFVEHMIQKGFTSKISGTLEHTAMMAHVINKARTNQRSLVITLLDLKNAFGEVHHNLITSVLDHHHIPDKIKSLITSLYTEFKTSFITDHFTTEAITVRHGLLQGDCLSPLLFNMCFNTFIQYIRAEKYKQLGFSPHDKNDRMFNPVHWFQFADDAAVITSGERENQLLLNCFTRWCQWANMIIRVDKCATFGIKKFTTRSLQFQPKLFVNNETVPPVAMGDAFKYLGRYFDFEMTNQSHKSKLLSVLLDLLKQIDSLPIHPKHKLRLYSEFALPKVSWHLTVSNVSKTWVAENLDNLASKYIRQWLDLPISATLSSIILSKNQFGLNLQLPTTKFLQCQTVTRNALKLSPNDNIRTLWKNTSNGTNIQHDVYKNTKEVLKAVQTEHKERLQSHLTTQGTILSFLFDNATSKYNKFWSEVQSKLPKNIFSFTIRYLNNTLPTRKNLSKWKLSLSSSCSSCFETETLLHVVAGCKTYLQEGRYTWRHNSALQFLAGTLKSLEGCTIYADICGFLSPCIITGDALRPDLLLVTPQQQLYILELTVGYETNLDKNSSRKYEKYRSLIRDLQSSFSKVSFVNLSMSSLGIFGKSCITFSKMCNALNIDNKHERFLSTKLSNIIIRTTYYIFCRRNKPWTNPELLSLY

SEQ ID NO: 20171 - protein, 1058 aa, Morbakka virulenta
MFEFSFRYLLTLFVVCSFCGKEFQSLGRHVWRCKKRLQENTCNPNGEINLPLIRKNNRDSYTSNVTAGVKCSCGKVCKGLKGLKIHQRNCRVIKGFEEDTFEQIPEDISNNSEPTTVLSSGEQLEIKEGIRLPRSSEQWEIANCYFQSIFASVELKPSTIDSVIRFMNDSIYEHFKRTCGTTNKNFDEGYQRKYQDRKVNQLKKDLKLLKKSNTSVMEIKYVSSLLRQKLTSSHNVHTLSNHDNFISKNFWGYVKRVLQKSSSILPTFSEVCCTQYFSKIFSSTIPNKHFKIPSWIPSFNEPEHPFSTDPPSYKKITSVIRRMKSSASPCPLDKISIICFKRCPYLRSFLTKIIKIIWISGKVPPEWKKASTILIHKKGNTDDPSNFRPITLQTVPLKVFTSCLRDSVFEYLKNNNFVEHMIQKGFTSKISGTLEHTAMMAHVINKARTNQRSLVITLLDLKNAFGEVHHNLITSVLDHHHIPDKIKSLITSLYTEFKTSFITDHFTTEAITVRHGLLQGDCLSPLLFNMCFNTFIQYIRAEKYKQLGFSPHDKNDRMFNPVHWFQFADDAAVITSGERENQLLLNCFTRWCQWANMIIRVDKCATFGIKKFTTRSLQFQPKLFVNNETVPPVAMGDAFKYLGRYFDFEMTNQSHKSKLLSVLLDLLKQIDSLPIHPKHKLRLYSEFALPKVSWHLTVSNVSKTWVAENLDNLVSKYIRQWLDLPISATLSSIILSKNQFGLNLQLPTTKFLQCQTVTRNALKLSPNDNIRTLWKNTSNGTNIQHDVYKNTKEVLKAVQTEHKERLQSHLTTQGTILSFLFDNATSKYNKFWSEVQSKLPKNIFSFTIRYLNNTLPTRKNLSKWKLSLSSSCSSCFETETLLHVVAGCKTYLQEGRYTWRHNSALQFLAGSLKSLEGCTIYADICGFLSPCIITGDALRPDLLLVTPQQQLYILELTVGYETNLDKNSSRKYEKYRSLIRDLQSSFSKVSFVNLSMSSLGIFGKSCITFSKMCNALNIDNKHERFLSTKLSNIIIRTTYYIFFRRNKPWTSPELWSLY

SEQ ID NO: 20172 - protein, 1058 aa, Morbakka virulenta
MFEFSFRYFLTLFVVCSFCGKEFQSLGRHVWRCKKRLQENTCNPNGEINLPLIRKNNRDSYTSNVTAGVKCSCGKVCKGLKGLKIHQRNCRVIKGFEEDTFEQIPEDISNNGEPTTVLSSGEQLEIKEGIRLPRSSEQWEIANCYFQSIFASVELKPSTIDSVIRFMNDSIYEHFKRTCGTTNKNFDEGYQRKYQDRKVNQLKKDLKLLKKSNTSVMEIKYVSSLLRQKLTSSHNVHTLSNHDNFISKNFWGYVKRVLQKSSSILPTFSEVCCTQYFSKILSSTIPNKHFKIPSWIPSFNEPEHPFSTDPPSYKKITSVIRRMKSSASPCPLDKISIICFKRCPYLRSFLTKIIKIIWISGKVPPEWKKASTILIHKKGNTDDPSNFRPITLQTVPLKVFTSCLRDSVFEYLKNNNFVEHMIQKGFTSKISGTLEHTAMMAHVINKARTNQRSLVITLLDLKNAFGEVHHNLITSVLDHHHIPDKIKSLITSLYTEFKTSFITDHFTTEAITVRHGLLQGDCLSPLLFNMCFNTFIQYIRAEKYKQLGFSPHDKNDRMFNPVHWFQFADDAAVITSGERENQLLLNCFTRWCQWANMIIRVDKCATFGIKKFTTRSLQFQPKLFVNNETVPPVAMGDAFKYLGRYFDFEMTNQSHKSKLLSVLLDLLKQIDSLPIHPKHKLRLYSEFALPKVSWHLTVSNVSKTWVAENLDNLVSKYIRQWLDLPISATLSSIILSKNQFGLNLQLPTTKFLQCQTVTRNALKLSPNDNIRTLWKNTSNGTNIQHDVYKNTKEVLKAVQTEHKERLQSHLTTQGTILSFLFDNATSKYNKFWSEVQSKLPKNIFSFTIRYLNNTLPTRKNLSKWKLSLSSSCSSCFETETLLHVVAGCKTYLQEGRYTWRHNSALQFLAGSLKSLEGCTIYADICGFLSPCIITGDALRPDLLLVTPQQQLYILELTVGYETNLDKNSSRKYEKYRSLIRDLQSSFSKVSFVNLSMSSLGIFGKSCITFSKMCNALNIDNKHERFLSTKLSNIIIRTTYYIFCRRNKPWTSPELLSLY

SEQ ID NO: 20173 - protein, 892 aa, Morbakka virulenta
MNDSIYEHFKRTCGTTNKNFDEGYQRKYQDRKVNQLKKDLKLLKKSNTSVMEIKYVSSLLRQKLTSSHNVHTLSNHDNFISKNFWGYVKRVLQKSSSILPTFSEVCCTQYFSKILSSTIPNKHFKIPSWIPSFNEPEHPFSTDPPSYKKITSVIRRMKSSASPCPLDKISIICFKRCPYLRSFLTKIIKIIWISGKVPPEWKKASTILIHKKGNTDDPSNFRPITLQTVPLKVFTSCLRDSVFEYLKNNNFVEHMIQKGFTSKISGTLEHTAMMAHVINKARTNQRSLVITLLDLKNAFGEVHHNLITSVLDHHHIPDKIKSLITSLYTEFKTSFITDHFTTEAITVRHGLLQGDCLSPLLFNMCFNTFIQYIRAEKYKQLGFSPHDKNDRMFNPVHWFQFADDAAVITSGERENQLLLNCFTRWCQWANMIIRVDKCATFGIKKFTTRSLQFQPKLFVNNETVPPVAMGDAFKYLGRYFDFEMTNQSHKSKLLSVLLDLLKQIDSLPIHPKHKLRLYSEFALPKVSWHLTVSNVSKTWVAENLDNLVSKYIRQWLDLPISATLSSIILSKNQFGLNLQLPTTKFLQCQTVTRNALKLSPNDNIRTLWKNTSNGTNIQHDVYKNTKEVLKAVQTEHKERLQSHLTTQGTILSFLFDNATSKYNKFWSEVQSKLPKNIFSFTIRYLNNTLPTRKNLSKWKLSLSSSCSSCFETETLLHVVAGCKTYLQEGRYTWRHNSALQFLAGSLKSLEGCTIYADIFGFLSPCIITGDALRPDLLLVTPQQQLYILELTVGYETNLDKNSSRKYKKYRSLIRDLQSSFSKVSFVNLSLSSLGIFGQSCITFSKMCNALNIDNKHERFLSTKLSNIIIRTTYYIFCRRNKPWTNPELLSLY

SEQ ID NO: 20174 - protein, 1058 aa, Morbakka virulenta
MFEFSFRYLLTLFVVCSFCGKEFQSLGRHVWRCKKRLQENTCNPNGEINLPLIRKNNRDSYTSNVTAGVKCSCGKVCKGLKGLKIHQRNCRVIKGFEEDTFEQIPEDISNNSEPTTVLSSGEQLEIKEGIRLPRSSEQWEIANCYFQSIFASVELKPSTIDSVIRFMNDSIYEHFKRTCGTTNKNFDEGYQRKYQDRKVNQLKKDLKLLKKSNTSVMEIKYVSSLLRQKLTSSHNVHTLSNHDNFISKNFWGYVKRVLQKSSSILPTFSEVCCTQYFSKILSSTIPNKHFKIPSWIPSFNEPEHPFSTDPPSYKKITSVIRRMKSSASPCPLDKISIICFKRCPYLRSFLTKIIKIIWISGKVPPEWKKASTILIHKKGNTDDPSNFRPITLQTVPLKVFTSCLRDSVFEYLKNNNFVEHMIQKGFTSKISGTLEHTAMMAHVINKARTNQRSLVITLLDLKNAFGEVHHNLITSVLDHHHIPDKIKSLITSLYTEFKTSFITDHFTTEAITVRHGLLQGDCLSPLLFNMCFNTFIQYIRAEKYKQLGFSPHDKNDRMFNPVHWFQFADDAAVITSGERENQLLLNCFTRWCQWANMIIRVDKCATFGIKKFTTRSLQFQPKLFVNNETVPPVAMGDAFKYLGRYFDFEMTNQSHKSKLLSVLLDLLKQIDSLPIHPKHKLRLYSEFALPKVSWHLTVSNVSKTWVAENLDNLVSKYIRQWLDLPISATLSSIILSKNQFGLNLQLPTTKFLQCQTVTRNALKLSPNDNIRTLWKNTSNGTNIQHDVYKNTKEVLKAVQTEHKERLQSHLTTQGTILSFLFDNATSKYNKFWSEVQSKLPKNIFSFTIRYLNNTLPTRKNLSKWKLSLSSSCSSCFETETLLHVVAGCKTYLQEGRYTWRHNSALQFLAGSLKSLEGCTIYADICGFLSPCIITGDALRPDLLLVTPQQQLYILELTVGYETNLDKNSSRKYEKYRSLIRDLQSSFSKVSFVNLSMSSLGIFGKSCITFSKMCNAFNIDNKHERFLSTKLSNIIIRTTYYIFCRRNKPWTSPELLSLY

SEQ ID NO: 20175 - protein, 1058 aa, Morbakka virulenta
MFEFSFRYFLTLFVVCSFCGKEFQSLGRHVWRCKKRLQGNTCNPNGEINLPLIRKNNRDSYTSNVTAGVKCSCGKVCKGLKGLKIHQRNCRVIKGFEEDTFEQIPEDISNNSEPTTVLSSGEQLEIKEGIRLPRSSEQWEIANCYFQSIFASVELKPSTIDSVIRFMNDSIYEHFKRTCGTTNKNFDEGYQRKYQDRKVNQLKKDLKLLKKSNTSVMEIKYVSSLLRQKLTSSHNVHTLSNHDNFISKNFWGYVKRVLQKSSSILPTFSEVCCTQYFSKILSSTIPNKHFKIPSWIPSFNEPEHPFSTDPPSYKKITSVIRRMKSSASPCPLDKISIICFKRCPYLRSFLTKIIKIIWISGKVPPEWKKASTILIHKKGNTDDPSNFRPITLQTVPLKVFTSCLRDSVFEYLKNNNFVEHMIQKGFTSKISGTLEHTAMMAHVINKARTNQRSLVITLLDLKNAFGEVHHNLITSVLDHHHIPDKIKSLITSLYTEFKTSFITDHFTTEAITVRHGLLQGDCLSPLLFNMCFNTFIQYIRAEKYKQLGFSPHDKNDRMFNPVHWFQFADDAAVITSGERENQLLLNCFTRWCQWANMIIRVDKCATFGIKKFTTRSLQFQPKLFVNNETVPPVAMGDAFKYLGRYFDFEMTNQSHKSKLLSVLLDLLKQIDSLPIHPKHKLRLYSEFALPKVSWHLTVSNVSKTWVAENLDNLVSKYIRQWLDLPISATLSSIILSKNQFGLNLQLPTTKFLQCQTVTRNALKLSPNDNIRTLWKNTSNGTNIQHDVYKNTKEVLKAVQTEHKERLQSHLTTQGTILSFLFDNATSKYNKFWSEVQSKLPKNIFSFTIRYLNNTLPTRKNLSKWKLSLSSSCSSCFETETLLHVVAGCKTYLQEGRYTWRHNSALQFLAGSLKSLEGCTIYADICGFLSPCIITGDALRPDLLLVTPQQQLYILELTVGYETNLDKNSSRKYEKYRSLIRDLQSSFSKVSFVNLSMSSLGIFGKSCITFSKMCNALNIDNKHERFLSTKLSNIIIRTTYYIFCRRNKPWTNPELLSLY

SEQ ID NO: 20176 - protein, 1058 aa, Morbakka virulenta
MFQFSFRYFLTLFVVCSFCGKEFQSLGRHVWRCKKRLQGNTCNPNGEINLPLIRKNNRDSYTSNVTAGVKCSCGKVCKGLKGLKIHQRNCRVIKGFEEDTFEQIPEDISNNSEPTTVLSSGEQLEIKEGIRLPRSSEQWEIANCYFQSIFASVELKPSTIDSVIRFMNDSIYEHFKRTCGTTNKNFDEGYQRKYQDRKVNQLKKDLKLLKKSNTSVMEIKYVSSLLRQKLTSSHNVHTLSNHDNFISKNFWGYVKRVLQKSSSILPTFSEVCCTQYFSKILSSTIPNKHFKIPSWIPSFNEPEHPFSTDPPSYKKITSVIRRMKSSASPCPLDKISIICFKRCPYLRSFLTNIIKIIWISGKVPPEWKKASTILIHKKGNTDDPSNFRPITLQTVPLKVFTSCLRDSVFEYLKNNNFVEHMIQKGFTSKISGTLEHTAMMAHVINKARTNQRSLVITLLDLKNAFGEVHHNLITSVLDHHHIPDKIKSLITSLYTEFKTSFITDHFTTEAITVRHGLLQGDCLSPLLFNMCFNTFIQYIRAEKYKQLGFSPHDKNDRMFNPVHWFQFADDAAVITSGERENQLLLNCFTRWCQWANMIIRVDKCATFGIKKFTTRSLQFQPKLFVNNETVPPVAMGDAFKYLGRYFDFEMTNQSHKSKLLSVLLDLLKQIDSLPIHPKHKLRLYSEFALPKVSWHLTVSNVSKTWVAENLDNLVSKYIRQWLDLPISATLSSIILSKNQFGLNLQLPTTKFLQCQTVTRNALKLSPNDNIRTLWKNTSNGTNIQHDVYKNTKEVLKAVQTEHKERLQSHLTTQGTILSFLFDNATSKYNKFWSEVQSKLPKNIFSFTIRYLNNTLPTRKNLSKWKLSLSSSCSSCFETETLLHVVAGCKTYLQEGRYTWRHNSALQFLAGSLKSLEGCTIYADNCGFLSPCIITGDALRPDLLLVTPQQQLYILELTVGYETNLDKNSSRKYEKYRSLIRDLQSSFSKVSFVNLSMSSLGIFGKSCITFSKMCNALNIDNKHERFLSTKLSNIIIRTTYYIFCRRNKPWTSPELLSLY

SEQ ID NO: 20177 - protein, 1098 aa, Hycleus phaleratus
MERVAEAERSLDGKMNYKKLMSATGLSHEQLRRIREKQDYKRIFSRIMNTTPETHNTDIDRAINAVDGSLLGNDVEEILDGDPALTDPSAGATACSALDSSFGRRSRHSLIDHAGVRLGADTSRISGKFSFPRRTSLLGRPTDDLVAISNESTSDGDSAAAGPSTVVTVATVHHDSSYKGRSQQSNLSPTDCTALRSSTASSRISQAQAAPHRTSLFNRQNSNTDRFTTIELNLRECIAKGITDFRESDPLLSRIAVTALDGSFSLLQNYIDEWISTRLSLRERPIAETRRAGMRPAYGEGRSGSGKRAAIYKKSQDLFIKNKRMLTEIILSGRPFDGPREVPEVSEVEDFYSDIYETNTRNETPNQDNSASTINIDDPIMPEDVAMAKMGWRRSAPGLDGIAVGRVLKCPDACLSVLFNVIVYRKCYPLLWRTMRTTLIPKSGDLKSPSNWRPITVGPAVQRLLHRILQARISNVITLNRNQRGFVSVDGTLANSLILEQFIRTKTKRALPFNVISLDVRKAFDTVSHTTIVRALQRRGLNGYCIDYILDTLQNTSTIIKIGSSMTRPINICRGVRQGDPLSPLIFNIVIDDLLQELDVLSLGGHIRDEQRCAALAFADDIVLLADTRDDMKRMLLHTEAFFMSRGMTLNTEKSHAISAGTIQGKSIPTSSHIFFVGGRAIPMVLQTNSFKYLGHEYNSKGIMKPCLPNLEVWLRRLCSSALKPDQKLLLLKQFIVPRLLYGLQNPKITAKVLKEADRLIRLAVKKFLHLNIHTPDAVLHAKIRHGGIGIMELSSCVPDIMLRRLKGLFEVEGDLMLATVLHSEEITMLMDRLNSMIGELTPEKKWREKLSAGPLTKGLEAAEDDSASRLWIDRKPYGWTGKDFVKAIQLRTANLPTRAIPSNPPNLRKCRGGCNNDESLAHVLQTCPVTHGARIKRHDEIVGKIAQNCRRKKINYELEPRVRHPDGTLYKPDIVAHLCDNTTIISDVQVSWASDTTLERVWERKKKVYDCDKFKFAARRIWPNRNFVFAPLIIEARGLWPKINSAAARHLQIDRRLKASCVCSAIKWAATIHRMFTRSVWRTGPGPPGGFFARLNL

SEQ ID NO: 20178 - protein, 1372 aa, Hycleus cichorii
MASGAGEHGPGPSRTRQGINQLQDDPAAEAGEQQTTAKNDGLVRESVQCRWNLRTRKVRYPAESGRNTTGAARDSSTFSCAQNSIRIVAANEGEQPVPPKNQGGQLIIETVINGAENHYRTSIPRTVQNATTLDVNDVDDDNRDSDSSRSDSTIDDDSFEHRDRPRRASQYTSLRCDRCEKSFKTTSGITRHWKRPCKQSTKCHFCGREFPTYSGLKQHEKQVHINEYRSNALAEAVEVCDVCDAAFISFAGLRQHHMKRHPNVPFQGELKLMEKVAEAEKSIGGKMNYKKLMSATGLSHEQLRRLRAKQDYKFIFSRIMNIIPETKNTDIGRDTSDSSVDNCSIEYDGDVIADRGPALANPSAGAVVRAAFDSSLKRRSQHVMVGDPGVQLSADSSRVSGRFSLPRRTRLPDRHIDKSLGIVSDESTSSSDSAAAGPSTVVTVATVHHDSSFKRRSQQSNSSLADCAAVRPGADSSRISHVPAAAHHTSIPSRQSFNTERVTVSELNLREFITGAIAEFEESDPLLSRLAATALDGSLSLLQSYIDEWISTKLSSGKRPIAQTRRAGSRPAYGEGRSGSGRRAARYKKSQDLFIKNKRMLTEIILSGRPFDGPRETPEVSEVENFYSNIYEINTENEIPNLEDYVLTTNIDDPIMPEDVASAKMGWRCSAPGLDGISVRQVLSCPDASLSLLFNVIIYRKCYPSLWRTLRTTLIPKSGDLKSPSNWRPITVGPAVQRLLHRILHARISNVVTLNGNQRGFVSVDGTLANCLILEQFIKTKTNRALPFNVVSLDVRKAFDTVSHASIAAALRRRGLKGYCIDYLLDTLQNTSTIIKTGGSMTRPIKICRGVRQGDPLSPLIFNIVIDDLLRELDTLSLGGHIKDEQRCAALAFADDIVLLANTRNDMKRMLQYTEAFFTSRGMTLNTEKSHAISAGTIQGKSIATSNNIFFVGGKAIPMILQTNSFKYLGHEYNSKGIMKPCLPNLEVWLRRLCASALKPDQKLLLLKQFIIPRLLYGLQNPKITAKVLKEADRLIRLTVKRFLHLNIHTPDAVLHAKIRHGGIGIMELSSCVPDIMLRRLKGLLEVDGDQVLASVLHSEEITMLMDRLNSMVGVLTPEKKWKEKLSSGPLTKGLEAAEDDSASRLWIDRKPYGWTGKDYVKAIQLRTANLPTRAIPSNPPNLRKCRGGCNNDESLAHVLQTCPVTHGARIKRHDEIVGKIAQNCRRKKINFELEPRVRHPDGSLYKPDIVAHLRDTTTIISDVQISWASDTTLESVWERKKRVYNCDKFKFAAARIWPNRNFVFTPLIIEARGIWPKINSAAARHLQIDRRLKASCVHSAIKWAATIHRMFTRSVWRTGPGPPGGFFARLN

SEQ ID NO: 20179 - protein, 1076 aa, Hycleus phaleratus
MERVAEAERSLGGKMNYKKLMSATGLSHEQLRRIREKQDYKRMLSRIMNATPETKSVGFGSASSESSARIENDVDAISNCGSALTEPSAGAEERAAFNSSRFSGRFSLPRRSDLIDQRTDRSLVVVSDKSTSDSDPAAAGPSTVVTVATVHHNPSYKRGSQQLNLSLTDGSAARAGADSSRISQALEVSHRASLLSRQNLNNEQFTVSELSLRECIAEAVAEFEESDPLLSRLAATALDGSLSLLQNCIDKWISTKLGSSKKPIAGTRRAGSRPAYGVGRSGSGKRAAIYKKSQDLFIKNKRMLTEIILSGRPFDGPQETPEVSEVENFYSNIYEINTCNVRPDQDDSALTIDIDHPIMPEDVATAKVGWRCSAPGMDGIAVRQVLKCPDASLSVLFNVIIYRKCYPSLWRTMRTTLIPKSGDLKSPSNWRPITVGPAVQRLLHRILHARISNVVTLSGNQRGFVSVDGTLANCLILEQFIKTKTKRALPFNVVSLDVRKAFDTVSHAAIAGALQRRGLKGYCIDYLLDTLQNTSTIIKIGSSMTRPINICRGVRQGDPLSPLIFNIVIDDLLQELDALSLGGRIGDEQRCAALAFADDIVLLADTRDNMKRMLLHTEAFFVSRGMTLNTDKSHAISAGTIQGKSIPTSNHIFFVGGKAIPMILQTNSFKYLGHEYNSKGIMKPCLPNLDVWLRRLCSSALKPDQKLLLLKQFVIPRLLYGLQNPKITAKVLKEADRLIRLTVKKFLHLNIHTPDAVLHAKIRHGGIGIMELSSCVPDIMLRRLKGLFEVDGDLILATVLHSEEITMLMDRLNSMIGVLTPEKKWKEKLSAGPLTKGLEAAEDDSASRLWIDKKPYGWTGKDFVKAIQLRTANLPTRAIPSNPPNLRKCRGGCNNDESLAHVLQTCPVTHGARIKRHDEIVDKIARNCRRKKINYELEPRVRHPDGTLYKPDIVAHLCDTTTIISDVQVSWASDTTLEKVWERKKRVYDCEKFKFAAGRIWPNRNFVFTPLIIEARGIWPKINSAAARHLQIDRRLKASCVYSAIKWAATIHRMFTRSVWRTGPGPPGGFFARLNL

SEQ ID NO: 20180 - protein, 1054 aa, Hycleus phaleratus
MNIIPETKNTDIGRATSGSSSDNSLIANDGDVTLNGGSTLVDHSTDATADAAFNSSLKIRYQHSQIDHTGVGLGPGPSRISGRFSVPRRTSLLGLQTNQSLVTVDDGSTSNSDSAAAGPSTVFTVATVHHDSSYKRRSQPSNLSPTDCTAVRASADPSQLSNTIPAPRRMSLLSRQNLDTNRFTMSEMNLREFIAEVATEHKQSDPLLSRLAAIALDGSFSMLQNYIDEWISTRLGSGRRPTAQTRRSGTRPAYGEGRSGSGKRAAMYKKSQDLFMKNKRMLTEIILSGRPFDGPREIPEVSEVENFYSNIYETTTRNERSSQEDLALTINIDDPILPEDVATAKMGWRCSAPGLDGISVKDVLKCPDASLSLLFNVIIYRKCYPSQWRTMRTTLIPKSGDLKSPSNWRPITVGPAVQRLFHRILHARILNVVSLNRSQRGFISVDGTLANCLILEHFIRTKTKRALPFNVISLDVRKAFDTVSHTTIKGALQRRGLKGYCIDYILDTLQNTSTMIKIGNSMTRPINICRGVRQGDPLSPLIFNMVIDDLLQELDALSLGGHIKDEQRCAALAFADDIVLLADSRDDMKKMLLHTEAFFMSHGMTLNSEKSHAISAGTIQGKSIPTSNHIFFVGGRAIPMVLQTNSFKYLGHEYNSKGIMKPCLPNLEVWLRRLSSAALKPDQKLLLLKQFIIPRLLYGLQNPKITAKLLGEADRLIRLTLKKFLHLNIHTPDAVLHAKIRHGGIGIMELSSCVPDIMLRRLKGLFEVDGDLILSAVLHSEEIAMLMDRLNSMIGVLTPEKKWREKLSTGPLTKGLEAAEDDSASRLWIDRKPYGWTGKDFVKAVQLRTANLPTRAIPSNPPNLRKCRGGCNSDESLAHVLQTCPVTHGARIKRHDEIVGKIAQNCRRKKINIELEPRVRHPDGTLFKPDIVAHLRDTTTIISDVQVSWASDTTLERVWERKKKVYDCEKFKFAAGKLWPNRKFVFTPVIIEARGIWPNINSAAARHLQIDRRLKASCVNSAIKWAATIHRMFTRSVWRTGPGPPGGFFARYNL

SEQ ID NO: 20181 - protein, 772 aa, Hycleus phaleratus
MLTDIIITGRAFDGPSDLPSIDEVEKFYGEMYETISHAEVRDDRNVSQLTNLDEPITEEDVAIAKINWHCSAPGLDGIAVRDVLSCPNSALSVLFSVVIYRNCQPSSWRYMRTTLIPKSGDLKSPSNWRPITVGSALQRLLHRLLHVRISNEITLNKNQRGFISLDGTMANSLILDFYIKSRTQRALPFNVVSLDVRKAFDTVCHSAIGRALLQRGLSGLCVDYIVGTLHSSFTTIKVGNTTTRPIKICKGVRQGDPLSPLLFNIVLDDLLRELDAMSLGGHINNEQRCTALAFADDIILLADNRADMKRLLSRTEAFLSSCGMSLNTEKCHAISAGTIGGKTIPTANPTFFIKGKPIPMVLQTNCFKYLGHGFDSKGILKPCLPNLEVWLRRLSSSPLKPDQKLLLLKQFIVPKLLYGLQNPKITTRTLKESDRLIRMACKKFLHLNIHTPDAALHAKIRHGGIGLMELSSCVPDILSRRIKNLFDIDDDIILTTVLHSEMIASLIERLNTMVGVLTPEKKWTEKISTCPLTKGIQAVVEDSASRRWIDCKPRGWTGKDYVKAIQLRTANLPTRAIPSNPPNLRKCRGGCRNDESLAHVLQTCPVTHGARIRRHDEIVNKIARNCQLKKINLELEPRIRHVDGTLYKPDIVAHLRDGHTVISDIQVAWVSDATLERVWERKRKVYDNTKFKQAAERIWPDRDFVFAPIILEARGIWPRVNDSAVRYLHIDRRLKESCVHSVLKWAATIHRMFTRSVWRTGPGPPQGFFHQR

SEQ ID NO: 20182 - protein, 1011 aa, Chelonus insularis
MPSQTVGQLLPFQCPLCPKSFASPQGLGLHKKGAHSAQANEEINLASKKIPWHDEDLRRLAHAELAASSDPPKSMNIYLDRLGIVSRNSASIAYIRNTDRYKRLRLQLQEERHLQPMITTTPQDLYDISSLPRLTLSNPSCPIKTYLIDARSSLLSQPTSTNGSSSLINAINEVLESKSPEESLSQWFRSIFPDTEPYCPRQSWQTQVTSNHVSRDHARRREYARIQNLWRRNRAKAAELVIDGQVKSTHLTLEDQEQFWRPIFERPSMPFSSSSNPSSSSLPTFSDLCGPVLPCEVTKIRPQSRSAPGPDGLSPALWLTRLDPFAVAIAMNVVLLWGHIPPFWRDSRTVLIPKSDGASDPSLFRPISVSSIFLRHLHRIIADRVISRNSFDKRQRGFIHSDGTAENVATCAAVLHKAQHSKKTVHMVSIDAQKAFDTVSHHALNHVLKKRGFSPVFTNYFKNLYDESSTRLEVNGLFSDPIHPQQGVRQGDPFSSVAFNLIMDEILASLDPATGFDLDGVLVNALCFADDLDLIASTRDGMQDALNRVECAMKIHGLSPAPHKCSAVSLILAGKEQKMKIMTSSLFTICGNKIKQLGLSDNWKHLGVNFSIKGPCSPVIDLRDQLSRISRAPLKPQQRLILLRTFLLPRFTHQLVLGKVSYGLLNRLDKQVRGSLRSWLKLPKDTTNSFFHASVAEGGLGIPSFATKIPELVSARLDALCKSSFDAAVSASKGSWAEARRKWINGQSHPNSHWATRLHESVDGAELVQCRGSPLSYSWIYSPLGIPSRDWIEYIRVRINALPSMIRVTRGVRRVLIDTRCRALCDTSETAYHIIQQCPRSHGGRIFRHDAVVDALLDTLCRSEYTVWKEPHFSTRVGLRKPDIVALRGITAFVIDVQVVSGGGDLGIKHRNKRSYYANNYDLLGCVSELTSVPITRVKVSTLTISWRGIWARQSADFLLGLGLPKRRLLGLTTRVLRGSYLNFVRFNSDTSRASHNTWPFRPRRRRPAQT

SEQ ID NO: 20183 - protein, 1062 aa, Araneus ventricosus
MCAIFCRVLVKEYMSKASVGSGPRPADSDSVGFASFVSVDSSSSSRLTTSPSLVVLNEKTSSRPLTRRQKKLAQTKSLDLPDPPDPDPDPLPPDPDPNSIGPVSPDLSGAGPGGSSSSSAGDIDVHDLTLSFVDPSLEISSGAGSPKDLVNSSYQIVETIKEVRQELETANTSILELSRSETVDVNKTLPSEVAFSFDEVDSKIIDYLDLLFRSDRSSELSAELKDTWSDFRSRPCKQTLFLRTCLIFEVLLPDKSNVSKRPREAVCPSVRADLSRRVRRRIEFARAQRLFTKNPSRFSDSLFSPTNLAQDSNPFNSDFQSFWETVMTIPRDAGRSPQFANSPINEELNSKLMSPITSDEIGKCFPRKGSAPGPDLASVGELRRISNFELAKFFNIFLLCRQLPDRFSRARTIFLPKKRDAKEPGDFRPISLTPIPARLFSKVLARRLAPTVRLDPEQRGFIPSDGIAQNTFLLDFVLRHSKEKSKRTFVASLDLRKAFDSVSHEAVFSALKAQAVDHRFVELIQSIYSKSSTSFAPFPGHKFSPTCGVKQGDPLSSILFNLVVDQLIKKLKGPVGLDIDGPTLSVSAYADDILLFASSAVGLQHLLNEAAEFLEKCNLFVNCSKSFTISILADAKTKKTKVDSATPFYIKSDSLRILKTCDSFKYLGVNFSAKGLLAEDCCPTLKDYLTKLKSAPLKPQQRLWILKNTLLPKLFHLLVLSSVTAGKLAKLDSVTRAFVRGALFLPNDCPNSFIHASVADGGLGVPSFRVSVPLWRRSRLGGLGAVMSGGSLSGTAGGYLQRLSDRVISIQISDNPNAYFRQKLYNSVDGAALASSFKVKDQNLWVQSRNKFLSGRDYVNLLKTKIACLPTASRCARGRPAKDKYCRAGCPRKETLNHIPQTCPRTHGKRIMRHEAVANYVKRACENRGYEVVTEPLYRTTIGNRKPDILAKKGDKVLVIDAQVVGDSVDLDRANDRKIHYYRDNLDLDQQIQSKYGTHDVSYLGVTLNIRGVWSAKSANDLVNKFKILSRTDVPVVSTRVLIGTFASFTMFSRSTARATRD

SEQ ID NO: 20184 - protein, 1144 aa, Araneus ventricosus
MATAGFVCVHCSKWFGTKIGFGVHMQSQHREEYEASIKVPKSKTRWSAEEIALMAMSEANFLREGRFLEVNSYLLSQFPNRTREAIKGQRRQMKYKDLVKEYMSKTFVSSGPCPADLDSFGSASSVSVSSSSSSKLTTSPSHFPLTRRQKKLAQIKSLDLPDPPDPDPDPLPPDPDPNLFGPVSPDLSGAGPCRYSDSSVDDLDVHELSLSLPDPSLEVSSGAGSPNDLVNSSHQIVETIREVRQELETANTSILELSRSETVDANRTLPPEVAFSFDEVDSKIIDYLDLLFRSDRSSELSVELKDVWSDFRSRPCKQTLFVRTCLIFEVLLPDKSSVSKRPREAGCPSVRADLPRRVRRRIEFARAQRLFAKNPSRFSDSLLSPTNLAKDSNPFNSDFQTFWETVMSLPRDAGRTPQFASNPIDESLNSKLMSPITSDEVGKSFPRKGSAPGPDLASVGELRRISNFELAKFFNIFLLCRQIPDRFCRARTVFLPKKRDATEPGDFRPISLTPIPARLFSKVLARRLAPTVRLDPEQRGFIPSDGIAQNTFLLDFVLRHSKEKTKRTFVASLDLRKAFDSVSHEAVFSALKAQAVDHRFVELIQSIYAKSSTSFAPFPGHRFSPTCGVKQGDPLSSILFNMVVDQLIKKLKGPVGLDIDGTTMSISAYADDILLFASSAVGLQHLLNEAAEFLETCNLFVNCSKSFTISILADAKSKKTKVDSATPFYIKNESLRILKTNDSFKYLGVNFSAKGLLAEDCCPTLKDYLTKLKSAPLKPQQRLWILKNTLLPKLFHLLVLSSVTAGKLAKLDSVTRAFVRGALFLPNDCPNSFIHASVADGGLGVLSFRVSVPLWRRSRLGGLGAVMSGGSLGGTAGGYLQRLTDRVISIQISDNPNAFFRQKLYNTVDGAALASSFKVKDQNLWVQSRNKFLSGRDYVNLLKTKIACLPTASRCARGRPAKDKYCRAGCPRKETLNHISQACPRTHGKRIMRHEAVANYVKRACENRGYEVVTEPLYNTAVGNRKPDIIAKKSDKVLVIDAQVVGDAVDLDRANDRKISYYRDNLELDQQIQSKYGTRTHDISYLGVTLNIRGVWSAKSASDLVNKFKVLSRTDVPVVSTRVLIGTFASFTMFSRSTARATRD

SEQ ID NO: 20185 - protein, 1194 aa, Lasioglossum lativentre
MGLATLTRLLFSLRDKHIMEVINSEASEAVGAMVPEVPPAAESNANGLGVADDVIIVPGTSQAVCHPTNWQGNNTTQHVTRNTKILEHTSCTIRVDDANYLLCPKCKDLGQSLAFQKANKLSDHFTLVHPEVRTSWECASCSRSFGTAHGWAIHQSKCRGPQVVNKYQYQCDLCSSSFASKIGLSQHERHEHPALRNSKRMAAATNNIREEEKIRPSKWSEDEVRILKELDARYRNDPSVKQINKLIATFIPNKTLKQISDKRRLIIIHVDEVDCDPPLIDTYSVSIDTQTTSTTPPDITTPTQQQEDTAYKTVLQQSITSAICPGNWAEILGQIKQCAMVLEHQNGDETLDKIAMQIASQLCLTKPQNQNAKKQRKDNIKNKKQDTAPGRSNEKGKKRKVSKKEKERQFQFAKCQDIYAKCPKRLADMVASNDLTLFEPTQPPLKADVEKLYDELWGQPGPEISVASSMPEPTIDVSTIFRPFTAADVKIKVDKIAGSSAPGLDKVKKHHLRTPGADIVLAAYYNLLILKEHYPDEWRRNKTVLIPKPGKDKADVKNWRPLTISSMLARVLSGLLDMRIRSCIIQHPRQKGFTPTNGCYANVTALNAGIEAAKVMGGVFMIADIEKAFDTVPHTAIETALLRKGLPHAVARYILGMQTNCTTVIKTRDGDAAIEMRRGVKQGDPLSPLLFNLCIEPVLEELDETEGIQVGQARISGLVFADDVVTLSKNEEGAKRQLEILHNYLSRLGMKLSINKCLTFQFVSGNKTFYVKDPKLSLGRQQVQTVAPEEAFKYLGVKLSPWQGLLNGFENQIFDDMIRRVRQLPLRPLQKIELLKTYLIPRYMYCLIVKPPCQGILKMIDTTIRKHAKEILHISQSTTTKFLYAPMRSGGLGLLEVEKQVLIAALRNGLKAIATDDDVMKEVMQRESVEKKLRKYAASLRLNWPITLEDVDQFKARLKNNRILDWANDPAQGQGVLEFRNDPISNAWLRQHNLLLPSRIADAIRLRTNTAGNRTTLSRYTANIETKCRRCGERSETLGHILGLCISTKDARIHRHNEIKDLIKNRLCAKYHVIDEPSISAAGELFKPDLVVNANEGGALILDVSVRYEKGDYLKMAHDEKVCKYARIMPQVRQMLGQQKAKVIPIIVGSRGVLPSATKNELKLLGLPKKDLKTISMIALRSSTEIYNKFIDYG

SEQ ID NO: 20186 - protein, 1263 aa, Lasioglossum lativentre
MSLLMTFFCTSLCRRTASMLNQLLRYIEQAYACPDECAVDAPMWAIQLCPPKPLGAQLIMMSDNDNGASEAGGITVPEVPSAAEYNANWLGEAGDVRIAPDTSQAAGLPANWQGSQLRTRSQTQTLLTSTKILEHEDCTIQISEMGMPRCPKCSSMGQSRAFMNAKKLAEHCDITHPELRMHWQCASCLRIFGKIHGWTIHKGRCKGPQPSVALMHQCTECSLSFSSKNGLSQHERHQHPMLRNQKRIQELTSGTREKTNKPTPLWSEEEIRILQELDSKYKNDPTIKQINRLIAQRLPGKTAKQIAHKRCGLYGIRESENIDNTLQTHSSQQSDDVLESQFSEAWVAPDAPSSMELARESHQADDDQLYKVALQDAIFSTECPTAWAAILVNIKEAANTDEQREEVMDTILGEITSKMLASRPVVGSRRGDQRNRPTGRTRVTNKGQQQQQQSNNNNKQSGRPLGNRARRRQFQYAKCQSLYEKCPKRLADMVASNDLTLFEATHPPPKTDVERLYGELWGQPGPELVELASSQQATSAIKEKDIFRPFTTVDVNLRIMKIAGASAPGMDGIKKSHLGIVGARAVLAAYFNLLILKEYYPAMWRRNRTVLIPKPGKDKNDVKNWRPLTISSLLARIFSGLMDARLRSFIAQHPRQKGFAPVNGCFANITALNAAIEAAKINSGVCVVTDIEKAFDTVPHTAIKLALLRKGLPSSVVSYICNMQTNCTTVIKTKDGDTAIEMRRGVKQGDPLSPLLFNLCIEPLIAMLNDTTDGIEVGQVKVSALAFADDLVTLAADSRTAQKQLECINNYLSKMGMKLSVSKCSAFHIVAGKRTWCIKNPDLKLADERVRAVQPGEAFSYLGTKIGPWQGLLSDFEHQAFVDMIRRLRKLPLRPMQKIDMLRTYLIPRYMYSLIVKPPCLGVLRMIDTTIRTQVKEILHISQSVTTNFLYTPTKSGGLGIHEIEKQVLIAALRNGLKALACTDRVMLEVMQRESVEKNLKKYAAALRLNWPVSLDDVDRYKARLKKNRLTEWAKDPAQGQGVMEFEDDPVSNIWLRRHGMLLPSRIADAIRLRTNTAGNRTTLSRYTPNLDTKCRRCGEERETLGHILGLCVSTKRSRIQRHNEIKNLISDRLSAKYMVLDEPTFRCATEMFKPDLVINANEEGALILDVTVRYEKGDFLKLAHDEKVGKYARIIPIVRQTLNLSKARVVPIVVGSRGALPATTKQELMKLGIHRNDWITISMIALRSSIEMYNKFIDYGNE

SEQ ID NO: 20187 - protein, 1213 aa, Megachile rotundata
MFYAVIKRKGFILFAATDRIVLKHPHFPLIGPKSMFMNSDDQVSEAGDILDPVVSSAAELIANMQGVAGGVTLVPDTSQAAGLPANGQGNPPMLLRSLRRNRILERTDHTIKVINAAPILCPKCKDRDQSIMFLKPKQLSDHCDKYHKELRTHWQCGTCEKIFDKVHGLIVHAPKCKGPQVVVSLPFQCNQCALSFASKSGLSQHERHQHPITRNEKRIEALAGESSRDVRPSTVWTEDETKLLIELDAKYKDDPNIKHINKLISQFLPGKTAKQISDKRRYLRESNLRINDDNIILTSADDTQNTVFTNEQFQDIWIVPTAERSDDALNETRHSDNDASYKTTLKEAITAAVCPDDWPEIWQQIIEAANSEMLQPETLESITTNITTKLLTKKSAEENDNGPNSKRRNLRGKKGNSRRMGRRAKQRQFQFAKCQDLYNKCPKRIADMVASNDLSLFDSTLPPSRVEVERLYDELWGQAGPELSFDSQAGCAIQTASIFKPITEAEVERKIGKIPGSSASGLDKIKKCHLRGKDVYIVLASFYNLLLFKQYYPDKWRCNRTILIPKPGKEKNDVRNWRPLTISSMLARIFSGLLDTRLRAYITQHQRQKGFVPVNGCYANVTALNAGIEAAKANGGVFIVTDIEKAFDSVPHSAIKLALERKGLPPTVVLYIMDMLSNCTTVIRTRDGDAAVEIRRGVKQGDPLSPLLFNLCIEPLLSVLNESTDGIKIGMTAVAVLAFADDLVTLAIDAAAAQRQLVIINTFLEKLGMKLAINKCSAFQIIAKNKTWCVNDPELYLNGQKLKAVQPDEAFTYLGTKVSPWQGLLSGFEHKAFDDMLRRVRCLPLRPLQKIELIRTYLIPRYMYCLIAKPPCQGVLKMIDTTIRTHVKEILHISQSVTSKFLYTPVKSGGLGIQEVEKQVLIAALRNGIKTLANSDPVLQEVMRRESIENQLKKYAAALRLNWPLTLDDVDRYKIRLKKSRITEWAKDIAQGEGVMEFKDDPISNKWLKQHDILLPSRVADAIRLRTNTAGNRSTLSRYTPNMDVTCRRCGDGRETLGHILGLCTFTKSARIKRHNEIKDLLKECLSAKHEVLDEPTISCSGELFKPDLVVKTNEEGVFILDVTVRYEKGRYLDLAHNEKIKKYACIMPILRQRFNQTKARVIPIVIGSRGALPNVTKLELQRLKIKKKDWLTISLIALRSSIEMYNKFLDYG

SEQ ID NO: 20188 - protein, 1179 aa, Lasioglossum lativentre
MNMYDLEASEAADTMDPEVSDAAEYNANWLGVAGGVTVVPGTSQTAGHPANRQGNQDESSQRPTGCVKILERVDHTIIVSETERLKCPKCVEQGQCLTFLKAKRLSDHCDEMHPQLRILWECAACGKSFNKVHGWIVHNTRCRGQQQTPVVLPHKCEQCTLSFGSKSGLSQHERHEHPSLRNAKRIREATSSATVRVRPQSKWTEEETAILTRLDALYSADPSIKHINKIIAQALPGKTIKQISDKRSYMRGLTKGSTHPNTPRPVSPAIQSEESGTPMSPIDATIVAPSSPMDDLSYMEGLRQAIESSKCSSAWAGELNKIKQCAASEETLMDEINDIIKLIVNKLLLGKAPTGAGRNKNKNKNRAANLDKNMNAKKGESTRCRMSKKTKERQYQFAKCQNLYEKCPKRLADMVVSNDLSLFDTASPPSKSEVERLYGELWGDPGPEISQGNRTAPVIGASEIFIPFTAMEVNAKVSKIPSTSAPGLDKIKKCHLYNEEIHIILAAYYNLLILKHYYPKDWRNNRTVLIPKHGKDKTNVKNWRPLTINSMLARILSGLIDSRLRRVIVQYPRQKGFVPTNGCFANVTALNASIEAAKVMGGVCNIADIEKAFDTIPHDAISAALRRKGMPNPVVQYIKSMQQNCTTIIKTRDGNTAIEIRRGVKQGDPLSPLLFNLCIEPLLETLNESTEGIQIGRNKIAALGFADDLVMLAVNEKVAQEQLTITYNFLNKIGMRLSISKCSAFQIIGDNKTWHVKDPKLKLGNESVRCLGPEHAFSYLGTIISPWQGLLNGFELRAFEDMIMRVRKLPLRPLQKIELLKIYLIPRYMYNLIIRPPAQGVLKMIDTTIRTQIKKILHISQSVTSKFLYAPMKSGGLGIQEIEKLVLIAALRNGLKAMADDDEVMQEVMQRQSIEGRLKKYAGALRLNWPTTLEDVDRYKARLKANRIFEWANEPAQGQGVLEFKDDNVSNIWLRRHNMLLPSRVADAIRLRTNTAGNRSTLSRYTPNLNTQCRRCNDRKETLGHILGLCISTKNSRIQRHNEIKNLIRNRLSSKYEVLDEPTITVSGEMFKPDLVVNANEAGVLILDVTVRYEKGDYLREAHDEKVAKYARLLPETRKMFSQTKSRVVPIVVGSRGAMPSTTRSELRLMGLPRKDWVTISMIALRSSIEMYNKFIDYG

SEQ ID NO: 20189 - protein, 1179 aa, Lasioglossum lativentre
MNMYDLEASEAADTMDPEVSDAAEYNANWLGVAGGVTVVPGTSQTAGHPANRQGNQDESSQRPTGCVKILERVDHTIIVSETERLKCPKCVEQGQCLTFLKAKRLSDHCDEMHPQLRILWECAACGKSFNKVHGWIVHNTRCRGQQQTPVVLPHKCEQCTLSFGSKSGLSQHERHEHPSLRNAKRIREATSSATVRVRPQSKWTEEETAILTRLDALYSADPSIKHINKIIAQALPGKTIKQISDKRSYMRGLTKGSTHPNTPRPVSPAIQSEESGTPMSPIDATIVAPSSPMDDLSYMEGLRQAIESSKCSSAWAGELNKIKQCAASEETLMDEINDIIKLIVNKLLLGKAPTGAGRNKNKNKNRAANLDKNMNAKKGESTRCRMSKKTKERQYQFAKCQNLYEKCPKRLADMVVSNDLSLFDTASPPSKSEVERLYGELWGDPGPEISQGNRTAPVIGASEIFIPFTAMEVNAKVSKIPSTSAPGLDKIKKCHLYNEEIHIILAADYNLLILKHYYPKDWRNNRTVLIPKHGKDKTNVKNWRPLTINSMLARILSGLIDSRLRRVIVQYPRQKGFVPTKGCFANVTALNASIEAAKVMGGVCNIADIEKAFDTIPHDAISAALRRKGMPNPVVQYIKSMQQNCTTIIKTRDGNTAIEIRRGVKQGDPLSPLLFNLCIEPLLETLNESTEGIQIGRNKIAALGFADDLVMLAVNEKVAQEQLTITYNFLNKIGMRLSISKCSAFQIIGDNKTWHVKDPKLKLGNESVRSLGPEQAFSYLGTIISPWQGLLNGFELRAFEDMIMRVRKLPLRPLQKIELLKIYLIPRYMYNLIIRPPAQGVLKMIDTTIRTQIKKILHISQSVTSKFLYAPMKSGGLGIQEIEKLVLIAALRNGLKAMADDDEVMQEVMQRQSIEGRLKKYAGALRLNWPTTLEDVDRYKARLKANRIFEWANEPAQGQGVLEFKDDNVSNIWLRRHNMLLPSRVADAIRLRTNTAGNRSTLSRYTPNLNTQCRRCNDRKETLGHILGLCISTKNSRIQRHNEIKNLIRNRLSSKYEVLDEPTITVSGEMFKPDLVVNANEAGVLILDVTVRYEKGDYLREAHDEKVAKYARLLPETRKMFSQTKSRVVPIVVGSRGAMPSTTKSELRLMGLPRKDWVTISMIALRSSIEMYNKFIDYG

SEQ ID NO: 20190 - protein, 923 aa, Lasioglossum lativentre
MNNTDIPVGIKDIHGKMCDVWKSSFSDLTDLSEKIDIFISNILTPYLLYESDIETKHRNKTKNNKARCAKNNTEQHAKNSNNNRTKNTNNINNNNKNSNNNNNKNSNNNKKSNNNKNSNNNNRNSNTNERKRFFYARCQEIYKECPKRLAEMAVNGDTSLLGPPIQPPPADEIRKLYHNLWETPGPNIANDSRNITPHTLTDVFPPITMEEIEKRISKMRAKAACGPDGLQKEHLCKPGLAVLLATLYNILLYSNHYPECWKINRTTLIPKVGKDLNKISNWRPITISSILSRVFSAIIDTRLRTFIIQNMRQKGFTSEDGCRHNISLFNEAITQCKHNNGGMFTVVDVSKAFDSIPHSALTRALAKKGVPKLIINLILKMYENCTTDIKAKNKETVKIKMLRGVKQGDPLSPLLFNLCMEPLLDTLEEKFEGVNVNQTTKISVLAFADDIVLLGKDLPEAQEQLVQVNRYLDNLGMRISADKSSCFQIVTGKDTWYISDANLKSNNGEIIPNVEPDDIFKYLGANIGPWKGLYRGVLVPEIIKVIKRVRKLGLKPQQKLELLTTHILPRFIYGLLVNPPCDAVLKLLDNEIRQQVKEILHLIPSTATGFFYTPKGNGGLGLPKFEHIIKLSVLKTSIKMKNSTDPAVALIFNETMEKRIKAIANSLRINWPATIEDIDSAKKRLRRDNITQWLNLTSQGHGVRDFMGDRIGNSWLTNGNILKPSRFIDAIRLRTNTFGTRVALARANKSNDVQCRRCHAQPETLGHILGLCVHTKKLRIKRHDEIKNFLADKLAKIDTNQVLVEPSIRVGDALYKPDLIINKERRSLIVDITVRYENRDYLKQACEGKIDKYRNCLRQLLRSKNLMEGKVLPIVVGSRGAIPSFTRTNLRELGIPKKDIQTIALMALRSSIEMSNIFLDYEK

SEQ ID NO: 20191 - protein, 1216 aa, Lasioglossum lativentre
MASNNIASDATSPCPGNVVAETSAQEGIHVDNLADTTDMRIEPHIAIIYIPFEGNDIKCPFCERMQKNFAFINPSDLEKHFKLHHLLEEVQWACVKCNKFYPKLHSTRCHYGKCKGPLMDSGQKQFQCESCSMSFDTQRGLSTHERHAHPKLRNEKRQLKQNVVEPSRNARGLHKKVWTDSEIELLKELDIKYSNNKYPNVQINKHITTKTLKQISDKRKQLRLCNRALAANSLGTQASEVNTAYTSPLSSSSSTNEESADADERLDWTADSENYNEWHRILFEVININININMNNTDIPVGIKDIHGKMCDVWKSSFSDLTDLSEKIDIFISNILTPYLLYESDIETKHRNKTKNNKARCAKNNTEQHAKNSNNNRTKNTNNINNNNKNSNNNNNKNSNNNKKSNNNKNSNNNNRNSNTNERKRFFYARCQEIYKECPKRLAEMAVNGDTSLLGPPIQPPPADEIRKLYHNLWETPGPNIANDSRNITPHTLTDVFPPITMEEIEKRISKMRAKAACGPDGLQKEHLCKPGLAVLLATLYNILLYSNHYPECWKINRTTLIPKVGKDLNKISNWRPITISSILSRVFSAIIDTRLRTFIIQNMRQKGFTSEDGCRHNISLFNEAITQCKHNNGGMFTVVDVSKAFDSIPHSALTRALAKKGVPKLIINLILKMYENCTTDIKAKNKETVKIKMLRGVKQGDPLSPLLFNLCMEPLLDTLEEKFEGVNVNQTTKISVLAFADDIVLLGKDLPEAQEQLVQVNRYLDNLGMRISADKSSCFQIVTGKDTWYISDANLKSNNGEIIPNVEPDDIFKYLGANIGPWKGLYRGVLVPEIIKVIKRVRKLGLKPQQKLELLTTHILPRFIYGLLVNPPCDAVLKLLDNEIRQQVKEILHLIPSTATGFFYTPKGNGGLGLPKFEHIIKLSVLKTSIKMKNSTDPAVALIFNETMEKRIKAIANSLRINWPATIEDIDSAKKRLRRDNITQWLNLTSQGHGVRDFMGDRIGNSWLTNGNILKPSRFIDAIRLRTNTFGTRVALARANKSNDVQCRRCHAQPETLGHILGLCVHTKKLRIKRHDEIKNFLADKLAKIDTNQVLVEPSIRVGDALYKPDLIINKERRSLIVDITVRYENRDYLKQACEGKIDKYRNCLRQLLRSKNLMEGKVLPIVVGSRGAIPSFTRTNLRELGIPKKDIQTIALMALRSSIEMSNIFLDYEK

SEQ ID NO: 20192 - protein, 1078 aa, Pteromalus puparum
MFPRWASSRRVEHLASDCKVMSCPSRGPAEHSTRMREWLRTTSRGLWGCQPPSLNFTGPITRSQTNRNINSEPTGSAVPVPQSRSSNSTQPARTVEHRCEFPGCDRSFTTKTGLGVHYRKTHTEWYMGRQNTQPVKARWTPEEESLMARKEAQLALVGEVFMNQALDRAFPERSYDSIKSHRREVRYKQLVQEYLRELRTINEEDAPVEEAQEDLTSDLIACVGSLPEMEFDTHNARNLRNICSRIRTLSKQALLEEVTLYLKSIFPAPVERPASDGQQAPAISRRKKRREDYAKTQDLYRKNRSLCLRQILKDVTTNVDLPKDQVEGFWRNVMESEDHETPGVEVSQIQDLKAVWRPIVSEDIKRALPDLGTSPGPDGVKSRTMRAVPMGIWLRVFNIFLICGKIPSYLLESRTTLIPKKEAPQSPGEYRPIAVSSVIARTFHKILANRMSVLVQLDERQKAFRNLDGCSESTYRLDTILRYHHLRHKSAFLAILDMMKAFDSVTHEALYDTLESAGAPSQFIEYIRYTYQNSSTRISYNNWKSELIYPRKGVKQGDPLSPILFNMIIDRMLRRLPDEVGVVVEGYSTNALAYADDLILMASTQRGLQEIINIANQFLGSCGLKVNVGKCMTVAIRNVPHQKKTVIDPRTTFTCGNRNLPAVKCLDDWKYLGIPFTPEGRMTTDPKEKLTDMLTKIKKAPLKPQQRMFALRTMIIPSLYHLLALGNVRISVLRKLDKIVRNNVKQWLDLPHDVPSAYIHANVNDGGLGIPSYRWTIPLLRYKRLTSLPDYSENLPPHMMLAQEVKKTKERLRDGEYILVNEDLRNRWAKLLYQTADGKGLERSEEVLTQHSWITDGNRFLSGRDYNNLVKLRINALPVRSRTTRGRIRDRRCRAGCLESETLNHVLQRCPRTHGARIQRHNAIVSYVVRSLVKEEFQVEEEPHFDTTEGLRKPDLVATRGKLGLIIDAQVVSEQADLSRAHQKKVSYYKGLAEQVRTRYNVKDVATTSITMSCRGIWGGKSSSDLLRLGVIKRRDLKIMSTRVLVGGLNIFGVFNKSTSTAEGARRRAQVFERRGVG

SEQ ID NO: 20193 - protein, 1309 aa, Conopomorpha cramerella
MSHSSKDVVHVATATDIAPTFVEKKSRKKWSDEENEFIWRTYLIITKLETNTSHYLDSLHTHFISNFPNVQVSKQRLGDQRRAIVRNKLIKQEKLDSIRQNVTEFLDIGSHLPQPLQENKIKSSRMQWSKEINEDIMRIYYTITEGETNKTAYRKQLYRQFIEKYPELSHLSEQRIADHRRAIVSNKYLTTSILNQLKIDAYKQTQIFERIENVETTAQNNTISKDYTPNITDQEEHREETQNQTILGEFNQEFTTIATPYNHSECDHLTEEMLRDDSIDATFMQALEYFSCLEPNQRPYIPKQHSSKKLASIVNYLNTVTLPETIKNDTSFNMIQTIIYCAAWTTAKENGSKLTIPHVERSYEPQKIFTPKWQIRLETKIANLRKKIAHLIQYRNGNRSRTIVKSVKHIFQFYSQHSKHEVHNTELDHYFDTLTQKLTAAATRLKRYRACTLRKTHNNIFKTNEKQFYRTLKNPTNNRSKLDSGISNETLHEFWANIWEQPKTQHWQAEWIQDEQRRNSSIETMDFESVPIDTFLDVLKNLQNWKAPGSDRIHSYWYKKLSYTHSYLHKYLNIFIQDPTLMPEYLTTGITYMLPKDPDDTKNPAKYRPITCLQIFYKLITACITQTIYKHIENNKILAEEQKGCRKYSRGCKEQLIIDSIVIQQIKKNKSDLFTMYIDYKKAYDSVPHTWLLQVLNIYKINPTIINFLKVISKTWKTFLQAKSSPTEAIRILRGIFQGDALSPLWFCLALNPLSNILKTAQIGHILHYTSEQLLPKTYLLSHLMYMDDIKLYANAEEDLYELARLTEAFSNDICMEFGIDKCRINSIKSGKQYAHTHTLESGKEVEPLLEGDVYKYLGYNQSNGIHQKDTKASLTKEFKKRISTILKTRLNARNVTKAINTYAIPVLTYSFGVIRWSKTDLTNLQRLINTTMTKNRTHHPRSCVQRQTLPRADGGRGFIDLKNLHNSQVTNLRDYFSSKSNSELHTAITQADKGLTPLNLSDRQKQGNEHITEKTQKIMDWTQKTLHGRHRQDLCQPHVDIVASNAWLRHGQLFPETEGFMVATQDQVIETKNYQKHIIKIPNMTDDLCRLCKSSPETIQHITGACRAITQTDYKHRHDQVANIIHQKLAHKYKLLTDSPLPYYKYTPKTVIDNNSFKMYYDRAIITDRTIHHNRPDITLLDKIKKTALLIDIAVPNTHNIQNTISEKLSKYVDLKDEITRMWGLKKVTIVPIVMSTTGVVPKQLHQAIRALDLHPSTYITLQKAIILNTCRIVRKFTQNTHTHTHHRNCHPLIVLTWLRPVTTKSPV

SEQ ID NO: 20194 - protein, 1343 aa, Conopomorpha cramerella
METRSMKKRLGPLPGDRRGTPGADAGCHSMRTVGGEELNRRALVGVQPEITTAEESPSHSIFSSPWSSPHSYSQISSPSSSPISHSSKDVVQVASATDIAPTFVAKQSRKKWSDEENEFIWRTYLIITKLETNTLHYLDSLHTQFMDNFPHVQVSKQRLGDQRRAIIRNKLIKQEKLDSIRQNVTELLCTRSHLPQPSQQYKSSRMHWSKEINEDIMRIYYTITEGETNKTAYRKQLYEQFIEKYPQLSHLSEQRIADQRRAIVCNKYLTTSTLSQLKTDAYKQTQSAGRLENVQPETTAQNNTISYDCNPNNSEQGGHREDTENQVILEELTTISTPENFSESGQMTEVLRDESIDATFMQALEYFSCIEPTRRPYIPKQHSSKKLGYIVNYLNTVTLPETIKGDTSFNMVQTIIYCAAWTTAKENGSKLTIPHVEIFYEPQKIFTPKWQSRLETKIANLRKKIAHLLQYKNGNRSRTIVKSVKNIFRFYSQHSKHECQNTELDHYLDTLSQKLTAAATRLKRYKVCTLRKTQNNIFKTNEKQFYRNLKNPTNNSNKFDGGINNETLHGFWANIWEQPKTQHWQAEWIQDEQHRNRAIETMEFESVPIDMFLEALKNFQNWKAPGSDRIHSFWYKKLSYTHPYLHKYLNKFIQDPTLMPEYLTTGITYMLPKDPNDIKNPAKYRPITCLQIFYKLITACITQTIYKHVEDNKILSEEQKGCRKYSRGCKEQLIIDSIVIQQSKKNKSDLYTMYIDYKKAYDSVPHTWLLQILDIYKINPTIINFLKVISQTWKTFLQANSSPTEPIRILRGIFQGDALSPLWFCLALNPLSNILKGAQIGHNLHYTSEQLLPKTHLLSHLMYMDDIKLYANVEEDLYELARLTEAFSKDICMEFGIDKCRINSIKAGKQYAHTHILESGQEVEPLLEGDVYKYLGYNQSNGIHQKDIKISLTKEFKKRISTILRTRLNARNITKAINTYAIPVLTYSFGIIRWSKTDLINLQRIINTTMTKNRSHHPRSCVQRQILPRADGGRGFIDLRNLHNSQITNLRYYFSSKTNSKLHMAITQADKGLTPLNLANRQTQENEFITEKTQKITDWSQKSLHGRHRQDLCQPHVDIVASNAWLRHGQLFPETEGFMVAIQDQVIETKNYQKHIIKIPNMTDDLCRLCKSSPETIQHITGACRAITQTDYKHRHDQVANIIHQKLAHRYNLLTDAPLPYYKYTPKTVIDNNHFKMYYDRAIITDRTIHHNRPDITLLNKDKKTALLIDIAVPNTHNIQNTISEKLSKYVDLKDEITRMWGLKKVTIVPIVMSTTGVVPKQLHQAIRALELHPSTYITSGGP

SEQ ID NO: 20195 - protein, 1270 aa, Conopomorpha cramerella
METRSMKKRLGPLPGDRRGTPGADAGCHSMRTVGGEELNRRALVGVQPEIITAEESPSHSIFSSPWSSPHSYSQISSPSSSPMSHSSKDVVHVATATDIAPTFVEKKSRKKWSDEENEFIWRTYLIITKLETNTSHYLDSLHTHFISNFPNVQVSKQRLGDQRRAIVRNKLIKQEKLDSIRQNVTEFLDIGSHLPQPLQENKSSRMQWSKEINEDIMRIYYTITEGETNKTAYRKQLYRQFIEKYPELSHLSEQRIADHRRAIVSNKYLTTSILNQLKIDAYKQTQIFERIENVETTAQNNTISKDYTPNITDQEEHREETQNQTILGEFNQEFTTIATPYNHSECDHLTEEMLRDDSIDATFMQALEYFSCLEPNQRPYIPKQHSSKKLASIVNYLNTVTLPETIKNDTSFNMIQTIIYCAAWTTAKENGSKLTIPHVERSYEPQKIFTPKWQIRLETKIANLRKKIAHLIQYRNGNRSRTIVKSVKHIFQFYSQHSKHEVHNTELDHYFDTLTQKLTAAATRLKRYRACTLRKTHNNIFKTNEKQFYRTLKNPTNNRNKLDSGISNETLHEFWANIWEQPKTQHWQAEWIQDEQRRNSSIETMDFESVPIDIFLDVLKNLQNWKAPGSDRIHSYWYKKLSYTHSYLHKYLNIFIQDPTLMPEYLTTGITYMLPKDPDDTKNPAKYRPITCLQIFYKLITACITQTIYKHIENNKILAEEQKGCRKYSRGCKEQLIIDSIVIQQSKKNKSDLFTMYIDYKKAYDSVPHTWLLQVLNIYKINPTIINFLKVISKTWKTFLQANSSPTEPIRILRGIFQGDALSPLWFCLALNPLSNILKTAQIGHILHYTSEQLLPKTYLLSHLMYMDDIKLYANAEEDLYELARLTEAFSNDICMEFGIDKCRINSIKSGKQYAHTHTLESGKEVEPLLEGDVYKYLGYNQSNGIHQKDTKASLTKEFKKRISTILKTRLNARNVTKAINTYAIPVLTYSFGVIRWSKTDLTNLQRLINTTMTKNRTHHPRSCVQRQTLPRADGGRGFIDLKNLHNSQVTNLRDYFSSKSNSELHTAITQADKGLTPLNLSDRQKQGNEHITEKTQKITDWTQKTLHGRHRQDLCQPHVDIVASNAWLRHGQLFPETEGFMVAIQDQVIETKNYQKHIIKIPNMTDDLCRLCKSSPETIQHITGACRAITQSDYKHRHDQVANIIHQKLAHKYKLLTDSPLPYYKYTPKTVIDNNSFKMYYDRAIITDRTITITDLTSLFSIKLRKQRF

SEQ ID NO: 20196 - protein, 1087 aa, Coilia nasus
MNNSNGQTTTSKECLCGKICKNEKGLKIHQTRMKCKERLQALQCTGLEPGETEEEPGPEAPHRAQSLQVVQTVLSNRQSEKRRIRWPKASKTAEWQKFDEDVDKVLEATAKGDVERRLHTMTTIIMSMAAERFGVEEERVAKQPYFKNQRAVKIHNIRTELKALKKQHKAAREDERAPLVELHLMLRKRLLILRRAEQHRRRRRERARKRAAFINNPFGFMKELLGQKRSGRLASSKEEIDQHLHDTFSDPTQDQELGQCKAVIRPPEPAEAFDLREPLLKEIQEVVRRARSRSAPGPSGTSYKVYKHCPKLLHRLWKILRLIWRRGRTAQQWRFAEGVWIPKEEDSKTISQFRIISLLSVEGKIFFSIVAKRLTKFFLKNGYIDTSVQKGGISGIPGCLEHTGVVTQLLREARENRGDLVVLWLDLANAYGSMPHKLVLETLERHHVPAAVRELILDYYGDFSLRVSAGSITSKWHRLEVGIITGCTISVVLFALAMNMLVKSAEPECRGPKSKSGIRQPPIRAFMDDLTVTTESVPGGRWILTGLERLMGWARMSFKPTKSRSLVLKKGRVADKFRFSISGTPIPSISEKPIKSLGKFFDSSLKDSASIKNTCEELEGWLKVVDKTGLPGKFKAWIYQHGILPRILWPLLLYEFPITTISDLERRVSRYLRRWLGLPRSLSNIALYGNTCKLTLPLKSIEEEFKVLRAREVLQFRESADPKVSGAGVAVRTGRKWRAEAAVEQAESRLRHRVLGGTVARGRMGLGTVASPRFDKVRGKERRQLVQNEVRAVVEEERSSRAVGMRQQGAWTRWEQVAERKISWTDLWQAEPHRIKFLVQAVYDVLPSPSNLHRWGLVDTPACPLCQRKGTLEHILSCCPKALGDGRYRWRHDQVLKTIAESIYSGITSGRRSKPTKKAINFVRAGEKLSTRPRATSGLLNTAQDWQLSVDLGSQLKFPQHVVKTTLRPDIVLVSEATKNVVMLELTVPWEERMEEAFERKREKYDGLVSDCHRQGWKARCLPVEVGCRGFAGQSLCRAYTALGITGERRRRAIRNSTEAAEKASRWLWIKRADPWINAAGAQAEAS

SEQ ID NO: 20197 - protein, 1057 aa, Collichthys lucidus
MVYELKERLQALQYTGLEPGKTEEEPGPEAPHRAQSLQVVQTVLSNRQSEKRRIRWPQASKTAEWQKFDEDVDKVLEATAKGDVERRLNTMTTIIMSMAAERFGVEEERVAKQPYFKNQRAVKIHNIRTELKALKKQHKAAREDERAPLVELHLMLRKRLLILRRAEQHRRRRRERARKRAAFINNPFGFMKELLGQKRSGRLACSKEEIDQHLHDTFSDPTRDQELGQSKAVIRPPEPAEAFDLREPLLKEIQEVVRRARSRSAPGPSGTSYKVYKHCPKLLHRLWKILRLIWRRGRTAQQWRFAEGVWIPKEEDSKTISQFRIISLLSVEGKIFFSILAKRLTEFFLKNGYIDTSVQKGGISGVPGCLEHTGVVTQLLREARENKGNLVVLWLDLANAYGSMPHKLVLETLERHHVPAAVRELILDYYGDFSLRVSAGSITSKWHRLEVGIITGCTISVVLFALAMNMLVKSAEPECRGPMSRSGIRQPPIRAFMDDLTVTTESVPGGRWILTGLERLMGWARMSFKPTKSRSLVLKKGRVADKFRFSISGTPIPSISEKPIKSLGKFFDSSLKDSASIKNTCEELEGWLKVVDKTGLPGKFKAWIYQHGILPRILWPLLLYEFPITTISDLERRVSRYLRRWLGLPRSLSNIALYGNTCKLTLPLKSIEEEFKVLRAREVLQFRESADPKVSGAGVAVRTGRKWRAEAAVEQAESRLRHRVLVGTVARGRMGLGTVASPRFDKVRGKERRQLVQNEVRAVVEEERSSRAVGMRQQGAWTRWEQVAERKISWTDLWQAEPHRIKFLVQAVYDVLPSPSNLHCWGLVDTPACPLCQRKGTLEHILSCCPKALGDGRYRWRHDQVLKTIAESIYSGITSCRRSKPTKRAINFVRAGEKLSTRQRTTSGLLNTAQDWQLSVDLGSQLKFPQHVVKTTLRPDIVLVSEATKNVVMLELTVPWEERMEEAFERKRGKYDGLVSDCHRQGWKARCLPVEVGCRGFAGQSLCRAYTALGITGERRRRAIRNNTEAAEKASRWLWIKRADPWINAAGAQAEAS

SEQ ID NO: 20198 - protein, 958 aa, Larimichthys crocea
MTTIIMSMAAERFGVEEERVAKQPYFKNQRAVKIHNIRTELKALKKRHKAAREDERAPLVELHLMLRKRLLILCRAEQHRRRRRERARKRATFINNPFGFMKELLGQKRSGRQHLHDTFSDPTRDQELGQCKAVIRPPEPAEAFDLREPLLKEIQEVVRRARSRSAPGPSGTSYKVYKHCPKLLHRLWKILRLIWRRGRTAQQWRFAEGVWIPKEEDSKTISQFRIISLLSVEGKIFFSIVAKRLTEFFLKNGYIDTSVQKGGISGVPGCLEHTGVVTQLLREARENKGDLVVLWLDLANAYGSMPHKLVLETLERHHVPAAVRELILDYYGDFSLRVSAGSITSKWHRLEVGIITGCTISVVLFALAMNMLVKSAEPECRGPKSKSGIRQPPIRAFMDDLTVTTESVPGGRWILTGLERLMGWARMSFKPTKSRSLVLKKGRVADKFRFSISGTPIPSISEKPIKSLGKFFDSSLKDSASIKNTCEELEGWLKVVDKTGLPGKFKAWIYQHGILPRILWPLLLYEFPITTISDLERRVSRYLRRWLGLPRSLSNIALYGNTCKLTLPLKSIEEEFKVLRAREVLQFRESADPKVSGAGVAVRTGRKWRAEAAVEQAESRLRHRVLVGTVARGRMGLGTVASPRFDKVRGKERRQLVQNEVRAVVEEERSSRAVGMRQQGAWTRWEQVAERKISWTDLWQAEPHRIKFLVQAVYDVLPSPSNLHCWGLVDTPACPLCQRKGTLEHILSCCPKALGDGRYRWRHDQVLKTIAESIYSGITSCRRSKPTKKAINFVRAGEKLSTRPRATSGLLNTAQDWQLSVDLGSQLKFPQHVVKTTLRPDIVLVSEATKNVVMLELTVPWEERMEEAFERKREKYDGLVSDCHRQGWKARCLPVEVGCRGFAGQSLCRAYTALGITGERRRRAIRNNTEAAEKASRWLWIKRADPWINAAGAQAEAS

SEQ ID NO: 20199 - protein, 955 aa, Collichthys lucidus
MKCKERLQALQCTGLEPGETEQEPGPEAPHRAQRLQVVQTVLTNRQSEKRRIRWPQASKTAEWQKFDEDVDKVLEATAKGDVERRLYTMTTIIMSMAAERFGFEEERVAKQPYFKNQRAVKIHNIRTELKALKKQHKAAQEDERAPLVELLILRRAEQHRRRRRERARKRATFINNPSGFIKELLGQKRSGRLACSKEEIDQHLHDTFSDPTRDQELGQCKAVIRPPEPAEAFDLREPLLKEIQEVVRRARSRSAPGPSGTSYKVYKHCPKLLHRLWKILRLIWRRGRTTQQWRFAEGVWIPKEEDSKTISQFRIISLLSVEGKIFFSIVAKRLTEFFLKNGYIDTSVQKARISGVPGCLEHTGVVTQLLREARENKGNLVVLWLDLANAYGSMPHKLVLETLKRHHVPAAVRELILDYYGDFSLRVSAGSITSKWHRLEVGIITGCTISVVLFTLAMNMLVKSAEPECRGPMSRSGIRQPPIRAFMDDLTVTTESVPGGRWILTGLERLMGWARMSFKPTKSRSLVLKKGRVADKFRFSISGTPIPSISEKPIKSLGKFFDSSLKDSASIKNTCEGWLKVVDKTGLPGKFKAWIYQHGILPRILWPLLLYEFPITTISDLERRVSRYLRRWLGLPRSLSNIALYGNTCKLTLPLKSIEEEFKVLRAREVLQFRESADPKVSGAGVAVRTGRKWRAEAAVEQAESRLRHRVLVGTVARGRMGLGTVASPHFDKVRGKERRQLVQNEVRTVVEEERSSRAVGMRQQGAWKRWEKVAERKISWTDLWQAEPHRIKFLVQAVYDVLPSPSNLHCWGLVDTPACPLCQRKGTLEHILSCCPKALGDGRYRWRHDQVLKTIAESIYSGITSCRRSKPTKKAINFVRAGEKLSTRQRATSGLLNTAQDWQLSVDLGSQLKFPQHVVKTTLRPDIVLVSEATKNVVMLELTVPWEERMEEDL

SEQ ID NO: 20200 - protein, 964 aa, Planiliza haematocheilus
MVLEAPAKGDVERRLQTMTTIIVSMAAERFGVEQERAAKEPYTKNQRAAKIHHIRKELRALKKQHKAADQEERAALAELSAILRRKIQVLRRAEQHRRRRRERARKRAAFINNPFSFMKGLLGQKRSGRLACSKEEVDEYLQGTFSDPIRDQDLGQCKAVITPSEPTDTFDLREPLLSEVQEVVRKARSRSAPGPSGTSYKVYKHCPKLLNRLWRLLRVIWRKGKTARQWRFAEGVWIPKEEDSKNISQFRIISLLSVEGKIFFSIVAKRLADFLLKNRYIDTSVQKGGIPGVPGCLEHTGVVTQLLREARESKGNLVVLWLDLANAYGSMPHKLVFETLERHHVPAKVRDIILEYYGDFRLRVSAGSRTSDWHRLEKGIIKGCTISVILFALAMNMLVKSAEPECRGPKSKSGIRQPPIRAFMDDLTVTTESVPGGRWLLTGLEGLMTWARMSFKPSKSRSLVLKKGRVVEKFQFSISGTPIPSISEKPIKSLGKFFDSSLRDKAFIKNTCEELDGWLMRVDKTGLPGKFKAWIYQHGILPRILWPLLLYEFPITTISDLERRVSHYLRRWLGLPRSLSNIALYGNTCKLTLPLKSIEEEFKVLRAREVLQLRESADPKVSGAGVAVRTGRKWTAETAVDQAESRLRHKDLVGTVSRGRAGLGITPSTRFNKARGRERRQLVQEEVRAMVEEERSSRAVGMSKQGAWTRWEQVAEKKISWTELWQAEPHRIKFLVQAVYDVLPSPSNLHCWGLVDSPACPLCQRRGTLEYILSCCPEALGEGRYRWRHDQVLKTIADSICSGIAMCRGTKPVKKSINFLRAGEKPAASKGTPGLLFTAQDWQLSVDLGSQLKFPQNVVQTTLRPDIVLVSAATKNIIMLELTVPWEERMEEAFERKRAKCDSLVNDCHKQGWKTRCLPVEVGCRGFAGQSLYRAYTALGITGGRRRRAIFNNTEAAEKASRWL

SEQ ID NO: 20201 - protein, 1087 aa, Planiliza haematocheilus
MLTNHSNGETLTIRECLCGKICKNEKGLKIHLGKMKCKERLQASQCTDQGSGETEEEPGQEAPHSARSLQVVSAVPLSRQSETRRIRWPQASKTAEWQKFDLDVDMVLEATAKGDVERRLQTMTTIIVSMAAERFGVEQERAAKEPYTKNQRAAKIHHIRKELRALKKQHKAADQEERAALAELSAILRRKIQVLRRAEQHRRRRRERARKRAAFINNPFSFMKGLLGQKRSGRLACSKEEVDEYLQGTFSDPIRDQDLGQCKAVITPSEPTDTFDLREPLLSEVQEVVRKARSRSAPGPSGTSYKVYKHCPKLLNRLWRLLRVIWRKGKTARQWRFAEGVWIPKEEDSKNISQFRIISLLSVEGKIFFSIVAKRLADFLLKNRYTDTSVQKGGIPGVPGCLEHTGVVTQLLREARESKGNLVVLWLDLANAYGSMPHKLVFETLERHHVPAKVRDIILEYYGDFRLRVSAGSRTSDWHRLEKGIITGCTISVILFALAMNMLVKSAEPECRGPKSKSGIRQPPIRAFMDDLTVTTESVPGGRWLLTGLEGLMTWARMSFKPSKSRSLVLKKGRVVEKFQFSISGTPIPSISEKPIKSLGKFFDSSLRDKASIKNTCEELDGWLMRVDKTGLPGKFKAWIYQHGILPRILWPLLLYEFPITTISDLERRVSRYLRRWLGLPRSLSNIALYGNTCKLTLPLKSIEEEFKVLRAREVLQLRESADPKVSGAGVAVRTGRKWTAETAVDQAESRLRHKDLVGTVSRGRAGLGITPSTRFNKARGRERRQLVQEEVRAMVEEERSSRAVGMSKQGAWTRWEQVAEKKISWTELWQAEPHRIKFLVQAVYDVLPSPSNLHCWGLVDSPACPLCQRRGTLEHILSCCPEALGEGRYRWRHDQVLKTIADSICSGIAMCRRTKPVKKSINFLRAGEKPAASKGTPGLLFTAQDWQLSVDLGSQLKFPQNVVQTTLRPDIVLVSEATKNIIMLELTVPWEERMEEAFERKRAKYDSLVNDCHKQGWKARCLPVEVGCRGFAGQSLYRAYTALGITGGRRRRAIFNNTEAAEKASRWLWIKRGDPWTSAARAQVEA

SEQ ID NO: 20202 - protein, 1055 aa, Collichthys lucidus
MKCKERLQALQCTGLEPGKTEEEPGPEAPHRAQSLQVVQTVLSNRQSEKRRIRWPQASKTAEWQKFDEDVDKVLEATAKGDVERRLNTMTTIIMSMAAERFGVEEERVAKQPYFKNQRAVKIHNIRTELKALKKQHKAAREDERAPLVELHLMLRKRLLILRRAEQHRRRRRERARKRAAFINNPYGFMKELLGQKRSGRLACSKEEIDQHLHDTFSDPTRDQELGQSKAVIRPPEPAEAFDLREPLLKEIQEVVRRARSRSAPGPSGTSYKVYKHCPKLLHRLWKILRLIWRRGRTAQQWRFAEGVWIPKEEDSKTISQFRIISLLSVEGKIFFSILAKRLTEFFLKNGYIDTSVQKGGISGVPGCLEHTGVVTQLLREARENKGNLVVLWLDLANAYGSMPHKLVLETLERHHVPAAVRELILDYYSDFSLRVSAGSITSKWHRLEVGIITGCTISVVLFALAMNMLVKSAEPECRGPMSRSGIRQPPIRAFMDDLTVTTESVPGGRWILTGLERLMGWARMSFKPTKSRSLVLKKGRVADKFRFSISGTPIPSISEKPIKSLGKFFDSSLKDSASIKNTCEELEGWLKVVDKTGLPGKFKAWIYQHGILPRILWPLLLYEFPITTISDLERRVSRYLRRWLGLPRSLSNIALYGNTCKLTLPLKSIEEEFKVLRAREVLQFRESADPKVSGAGVAVRTGRKWRAEAAVEQAESRLRHRVLVGTVARGRMGLGTVASPRFDKVRGKERRQLVQNEVRAVVEEERSSRAVGMRQQGAWTRWEQVAERKISWTDLWQAEPHRIKFLVQAVYDVLPSPSNLHCWGLVDTPAYPLCQRKGTLKHILSCCPKALGDGRYRWRHDQVLKTIAESIYSGITSCRRSKPTKRAINFVRAGEKLSTRQRATSGLLNTAQDWQLSVDLGSQLKFPQHVVKTTLRPDIVLVSEATKNFVMLELTVPWEERMEEAFERKRGKYDGLVSDCHRQGWKARCLPVEVGCRGFAGQSLCRAYTALGITGERRRRAIRNNIEAAEKASRWLWIKRADPWINAAGAQAEAS

SEQ ID NO: 20203 - protein, 1087 aa, Collichthys lucidus
MNNSNGQTLTSKECLCGKICKNEKGLKIHQTRMKCKERLQALQCTGLEPGKTEEEPGPEAPHRAQSLQVVQTVLSNRQSEKRRIRWPQASKTAEWQKFDEDVDKVLEATAKGDVERRLNTMTTIIMSMAAERFGVEEERVAKQPYFKNQRAVKIHNIRTELKALKKQHKAAREDERAPLVELHLMLRKRLQILRRAEQHRRRRRERARKRAAFINNPFGFMKELLGQKRSGRLACSKEEIDQHLHDTFSDPTRDQELGQSKAVIRPPEPAEAFDLREPLLKEIQEVVRRARSRSAPGPSGTSYKVYKHCPKLLHRLWKILRLIWRRGRTAQQWRFAEGVWIPKEEDSKTISQFRIISLLSVEGKIFFSILAKRLTEFFLKNGYIDTSVQKGGISGVPGCLEHTGVVTQLLREARENKGNLVVLWLDLANAYGSMPHKLVLETLERHHVPAAVRELILDYYGDFSLRVSAGSITSKWHRLEVGIITGCTISVVLFALAMNMLVKSAEPECRGPMSRSGIRQPPIRAFMDDLTVTTESVPGGRWILTGLERLMGWARMSFKPTKSRSLVLKKGRVADKFRFSISGTPIPSISEKPIKSLGKFFDSSLKDSASIKNTCEELEGWLKVVDKTGLPGKFKAWIYQHGILPRILWPLLLYEFSITTISDLERRVSRYLRRWLGLPRSLSNIALYGNTCKLTLPLKSIEEEFKVLRAREVLQFRESADPKVSGAGVAVRTGRKWRAEAAVEQAESRLRHRVLVGTVARGRMGLGTVASPRFDKVRGKERRQLVQNEVRAVVEEERSSRAVGMRQQGAWTRWEQVAERKISWTDLWQAEPHRIKFLVQAVYDVLPSPSNLHCWGLVDTPACPLCQRKGTLEHILSCCPKALGDGRYRWRHDQVLKTIAESIYSGITSCRRSKPTKRAINFVRAGEKLSTRQRTTSGLLNTAQDWQLSVDLGSQLKFPQHVVKTTLRPDIVLVSEATKNVVMLELTVPWEERMEEAFERKRGKYDGLVSDCHRQGWKARCLPVEVGCRGFAGQSLCRAYTALGITGERRRRAIRNNTEAAEKASRWLWIKRADPWINAAGAQAEAS

SEQ ID NO: 20204 - protein, 1087 aa, Coilia nasus
MNNSNGQTTTSKECLCGKICKNEKGLKIHQTRMKCKERLQALQCTGLEPGETEEEPGPEAPHRAQSLQVVQTVLSNRQSEKRRIRWPQASKTAEWQKFDEDVDKVLEATAKGDVERRLHTMTTIIMSMAAERFGVEEERVAKQPYFKNQRAVKIHNIRTELKALKKQHKAAREDERAPLVELHLMLRKRLLILRRAEQHRRRRRERARKRAAFINNPFGFMKELLGQKRSGRLASSKEEIDQHLHDTFSDPTQDQELGQCKAVIRPPEPAEAFHLREPLLKEIQEVVRRARSRSAPGPSGTSYKVYKHCPKLLHRLWKILRLIWRRGRTAQQWRFAEGVWIPKEEDSKTISQFRIISLLSVEGKIFFSIVAKRLTEFFLKNGYIDTSVQKGGISGVPGCLEHTGVVTQLLREARENRGDLVVLWLDLANAYGSMPHKLVLETLERHHVPAAVRELILDYYGDFSLRVSAGSITSKWHRLEVGIITGCTISVVLFALAMNMLVKSAEPECRGPKSKSGIRQPPIRAFMDDLTVTTESVPGGRWILTGLERLMGWARMSFKPTKSRSSVLKKGRVADKFRFSISGTPIPSISEKPIKSLGKFFDSSLKDSASIKNTCEELEGWLKVVDKTGLPGKFKAWIYQHGILPRILWPLLLYEFPITTISDLERRVSRYLRRWLGLPRSLSNIALYGNTCKLTLPLKSIEEEFKVLRAREVLQFRESADPKVSGAGVAVRTGRKWRAEAAVEQAESRLRHRVLVGTVARGRMGLGTVASPRFDKVLGKERRQLVQNEVRAVVEEERSSRAVGMRQQGAWTRWEQVAERKISWTDLWQAEPHRIKFLVQAVYDVLPSPSNLHRWGLVDTPACPLCQRKGTLEHILSCCPKALGDGRYRWRHDQVLKTIAESIYSGITSGRRSKPTKKAINFVRAGEKLRTRPRATSGLLNTAQDWQLSVDLGSQLKFPQHVVKTTLRPDIVLVSEATKNVVMLELTVPWEERMEEAFERKREKYDGLVSDCHRQGWKARCLPVEVGCRGFAGQSLCRAYTALGITGERRRRAIRNNTEAAEKASRWLWIKRADPWINAAGAQAEAS

SEQ ID NO: 20205 - protein, 1019 aa, Mugilogobius chulae
MRCREKLKAPQCTDSQSGETEEELGQEAPHSTLSLQVKQSTPPCKSPMTEKIKWPKASQLNEWQRFDEDVELVLESVAKGDVDKRLQTMTTVVMTLAAERFGTEEKQVKQPYVKNNRATKIHNIRQELKALKKQYKTSQDEEKGPLEELRAMLRKRLLTLRRAEYHRRRRRERSRKRSAFITNPFQFTKQLLGQKRSGRLTCSKEQMEEHLRTTYSDPMREVDLGNCDVLITPAEPTEPLNLREPLFKEVQQIVRKARAGAAPGPSGTTYNIYKRCPCLLKRLWKILKVIWRRGKVPSQWRQANGVWIPKEENSENINQFRMISLLSVEGKIFFSILASRLTEYFLKNKYIDTSVQKGGIPGVPGCLEHTGVVSQLLREARENKGDLVVLWLDLANAYGSIPHKLVERALQAHHVPESIRKLIMDYYDSFHVRVSTGQITSDWCRLEVGIITGCTISVILFSLAMNMLVKSTEPECRGPKSRSGIRQPPIRAFMDDLTVTTESVPGARWILKGLEKVMGWARMSFKPAKSRSLVLKKGKVWEKFRFSIENILIPSITEQPIKSLGKIFDATLKDKVPIKSTCEECEQWLKTVDKTGLPGRFKAWIYQHGILPRILWPLLLYEFPISIITTMERTVSRFLRRWLGLPKSISNIALYGNTCKLKLPFKSIEEEFKVMRAREVLQYRESSDPKVAGAKVAVRTGRKWRAEEAVEEAEGRLRHKMVMGAVAKGKAGLGLLNVPRFDKAQGKERRHLIQEEIRAEAEEERKVRAITMKQQGAWTKWEQAKVRKVTWNDLWKTHPHNIKFLIGAVYDVLPSPCNLHRWGLVEKPSCLLCGRIGTLEHILSSCPRALADGRYRWRHDQVLRSVAENIYGAINNSRKEGTSKSTSFFVKEGETIKQNGTQKALLCSARDWRMEADLDKQLKFPPHIAETMLRPDIVLWSNSSKQVLMIELTVPWEERMEEANERKRDKYEELKSNCQNRGWRAKCWPVEVGCRGFVGKSLCKAYTALGLVGKKKSKP

SEQ ID NO: 20206 - protein, 890 aa, Amblyraja radiata
MTLRRAEWYRRRRKERARKRASFIANPFGFTKQLLGQKRSGSLACSKEEIDRHIQTTYSDPVRQQELGQCNILIKTPPPIKEFDSREPLLKEVQDVVRRARSGSAPGPSGVPYRVYKNCPLLLKWLWKILKVIWRRGKVAQQWRFAEGVWNPKEEDSKKIDQFRIISLLSVEGKIFFSIVTRRLTNFLSSNGYIDSSVQNGGLSGVPGYLEHMGVVTQLIREARENKGDLTVLSLDLANAYGSIPHKLIQTVMAKHHVPGQVADLILDYYNLFSMRVSSGSVTSEWHRLEVGIITGCTTSVILVALAMNMIVKSAESECWGPRTKSGMRQPPIRAFMDDLTVTTESVPGGRWILQGLEKLIGWARMRFKPGKSRSLVLKKGKVMDRFRFNIEGTPIPTVSERPVKSLGKVFNSSLKDTASVQATCQKLESWLRAVDRSGLPGKFKAWIYQHGILPRILWPLLVYEVPKSIVERLERKVSSFLRRWLGLPRSLSSIALYGNNTKLQLPLKSLEEEFKVTRAREVMMYRDSSDPKVAQAGVEVKTGRKWRAGEAVLQAESRILVGAVTRGRAGLGIFPSPQFDKAKGKERRRLVQEEVRAVVEEERCTRVVGLRQQGAWTRWEQAMDRKVTWTELWQAEPQRIKFLVQAVYDVLPSPSNLFIWGKAESPDCPQCSGKGTLEHILSSCPKALGQGRYTWRHDQVLKPIAEAISMGISSCRRERPTTQMITFVKAGVQLPRTTAARNQSGILATAQDWQLSVDLVKQLKFPQHIATTTLRPDILLVSEATKNIVLLELTVPWEDRLEEAHERKMAKYEELVIDCRKQGWKARYMPIEVGCRGFAGQSLYKALSALGINGVARRRAIKNTTEAAEKASRWLWIRRGGLWGGANAT

SEQ ID NO: 20207 - protein, 1069 aa, Astyanax mexicanus
MRCLEEEQAPQRTGTQPDETQEEPGPEIPHRARNLQVPQPIPRDRLPETGVQTSGDLPERIQIKWPQACKTAVWQQFDEDANSVLDATAKGDADRRLQTMTTIIVRLAVERFGVVEKRIGGAPFTMNQRAAKIHRIRQELKSLKLQFKEASEEQRPPLVELRTILRKKLLTLRRAEWHRRRRKERTRKRASFIANPFGFTKQLLGQRRGGRLACSKEEIDRHIQTTYSDPARQQDLGQCNTLIQPPPPTKEFDGREPLLKEVQDVVKKARSSSAPGPSGVPYKVYKNCPLLLERLWKILKVIWRRGKVARQWRFAEGVWIPKEEVSKNIDQFRIISLLSVEGKIFFSILARRLTDFLSSNHYIDTSVQKGGIPGVPGCLEHTGVVTQLIREARENKGDLAVLWLDLANAYGSIPHKLVQTTLERHHVPGQVAELIMNYYDQFSMRVSTGSITSEWHRVEVGIITGCTISVILFVLAMNMLVKSAETQCRGPKTMTGVRQPPVRAFMDDLTITTESVPGSRWILQGLEELCGWARMRFKPEKSRSLVLKRGKVVDKFRFSIGGASIPTVSEKPVKSLGKEFNSSLKDSVSVQGTCQELESWLRAVDRSGLPGKFKAWIYQHGILPRVLWPLLVYEVPISIVEGLERKVSSFLRRWLGLPRSLSSIALYGRNTKLQLPLRSLEEEFKVTRAREVMMYRDSSDPKVAQAGVRVKTGRKWVADEAVLQAESRIRHRALVGAVTRGRAGLGTFSTPQYEKVKGKERHRLVQEEVRAEVEERRISRAVGLRQQGAWTRWEQAMDRKVTWSELWRAEPQRIKFLVQAVYDILPSPSNLSIWGKTESPNCPQCPGRGTLEHILSCCPVALGQGRYTWRHNQVLRPIAEAISMGISSSKRSHSTTQMIAFVKAGERLGKTTGARNPAGLLATAKDWQLSVDLEKQLKFPQHIVATTLRPDILLVSEETKNILLIELTVPWEDRLDEAHERKRTKYEELVIDCRKQGWKAKCMPIEVGCRGFAGQSLYKTLSALGITGMERRRAIKKIMEEAEKASRWLWIRRSDPWSSSKCHLNTSRV

SEQ ID NO: 20208 - protein, 1106 aa, Amblyraja radiata
MEKYPQRCQRGGEDEHLNWTDQRLMTNGNGQPTMIIKCRCGKVCKNSLKIHQTRMKCLEGQGVLQHTGILPGETQEEPGPESPHRARSLQVAQLVPRNSSPEKVRVRWPQACKTAVWHQFDEDINKVLEATAKGDVARRLRTMTTIIISLAVERFGEVEKKPARTPFTMNQRATKIHKIRQELKSLKKQYKEAREEQRPPLAELRTILRMKLMTLRGAEWHRRRRKERAGKRASFIANPFGFTKQLLGQKRSGSLACSKEEIDRHIQTTYSDPVRQQDLGQCNILIKPSPPIKEFDSKEPLLKEVQDVVKRARAGSAPGPSRVPYRVYKNCPLLLKRLWKILKVIWRRGKVAQQWRFAEGVWIPKEEDSKTIDQFRIISLLSVEGKIFFSIVARRLTNFLSSNGYIDSSVQKGGLSGVPGCLEHMGVVTQLIREARENKGDLTVLWLDLANAYGSIPHKLIQTVMAKHHVPGQVADLILDYYNQFSMRVSSGSVTSVWHRLEVGIITGCTISVILFALAMNMVVKSAEPECRGPRTKSGIRQPPIRAFMDDLTVTTESVPGGRWILQGLEKLIGWARMRFKPGKSRSLVLKKGKVMDRFRFSIEGSPIPTVSEKPVKSLGKVFNSSLKDTASVQATCQELESWLRAVDRSGLPGKFKAWIYQHGILPRILWPLLVYEVPISIVERLERKVSCFLRRWLGLPRSLSSIALYGNNTKLQLPLKSLEEEFKVTRAREVMMYRDSSDPKVAQAGVEVKTGRKWRAGEAVLQAESRIRHRVLVGAVTRGRAGLGIFPSPQFDKAKVKERRRLVQEEVRAVVEEERCTRAVGLRQQGAWTRWEQAMNRKVTWTEPWQAEPQRIKFLVQAVYDVLPSPSNLFIWGKAESPDCPQCSGKGMLEHILSCCPKSLGQGRYTWRHDQVLKPIAEVISMGISSCRRERPTTQMITFVKAGVQLPRTTAARNQSGILATAQDWQLSVDLVKQLKFPQHIATTTLRPDILLVSEATKNIVLLELTVPWEDRLEEAHERKMAKYEELVIDCRKQGWKARCMPIEVGCRGFAGQSLYKALNALGINGVARRRAIKNTTEAAEKASRWLWIRRGGPWGGANAT

SEQ ID NO: 20209 - protein, 1052 aa, Amblyraja radiata
MKCLEGQGVSQRTGILPGETQEEPGPESPHRARSLQVAQLVPRNSSPEKVRVRWPQACKTAVWHQFDEGVDKVLEATAKGDVDRGLRTMTTIIISLAVERLGEVEKKPARTPVTMNQRATKIHKIWQELKSLKKQYQEAREEQRPPLSELRTILRKKLMTLRRAEWHRRRRKERARKRASFIANPFGFTKQLLGQKHSGSLTCSKEANDRHIQTTYSDPVRQQELGQCNILIKPPPPIKEFDSREPLLKEVQDVVKRARAGSAPGPSGVPYRVYKNCPLLLKQLRKILKVIWRRGKVAHQWRFAEGVWIPKEEDSKMIDQFRITSLLSVEGKLFFNIMARRLTNFLSSNGYIDSSVQKGGLSGVPGCLEHTGVVTQLIREARENKGDLTVLWLDLANAYGSIPHKLIQTVMAKHHVPGQVADLILDYYNQFSMRVSSGSVTSEWHRLEVGIITGCTISVILVALAMNMIVKSAEPECRGPRTKSGMCQPPIRAFMDDLTVTTESVPGGRWILQGLEKLIGWARMRFKPGKSRSLVLKKGKVMDRFRFSIEGTPIPTVSEKPVKSLGKVFNSSLKDTASVQATCQELESWLRAVDWSGLPGKFKAWIYQHGILPRILWPLLVYKVPISIVERLERKVSSFLRRWLGLPRSLSSIALYGNNTKLQLPLKSLEEEFKVTRAREAMMYRDSSDPKVAQAGVEVKPGRKWRAGEAVLQAESRIRHRALVGAMTRGRAGLGIFPSPQFDKAKGKERHRLVQEEVRAVVEEERCTRAVGLRQQEAWTRWEQAMDRKVTWTELWQAKPQRIKFLVQAVYDVLPSPSNLFIWGKAESPDCPQCSGKGTLEHILSWCPKSLGQGRYTWRHDQVLKPIAEAISMGISSCRRERPTTQMITFVKARVQLPRTTAARNQSGILATAQDWQLSVDLVKQLKFPQHIATTTLRPDILLVSEATKNIVLLELTVPWEDRLEEAHERKMAKYEELVIDCRKQGWKARCMPIEVGCRGFAGQSLYKALNALGINGVARRRAIKNTTEAAEKASRWLWIRRGGPWGGAIAT

SEQ ID NO: 20210 - protein, 1133 aa, Astyanax mexicanus
MEKYPQGCPRGGEDEHPNRTDLRITNTGNEQRFTSNGKGQLTTSKCRCGKVCKNSRGLKIHQTQMRCLEEEQAPQRTGTQPDETQEEPGPEIPHRARNLQVPQPIPRNRLPETGEQASGDLPERIQIKWPQACKTAVWQQFDEDANSVLDATAKGDADRRLQTMTTIIVRLAVERFGVVEKRIGGAPFTMNQRAAKIHRIRQELKSLKLQFKEASEEQRPPLVELRTILRKKLLTLRRAEWHRRRRKERTRKRASFIANPFGFTKQLLGQRRGGRLACSKEEIDRHIQTTYSDPARQQDLGQCNTLIQPPPPTKEFDGREPLLKEVQDVVKKARSSSAPGPSGVPYKVYKNCPLLLKRLWKILKVIWRRGKVARQWRFAEGVWIPKEEVSKNIDQFRIISLLSVEGKIFFSILARRLTDFLSSNHYIDTSVQKGGISGVPGCLEHTGVVTQLIREARENKGDLAVLWLDLANAYGSIPHKLVQTTLERHHVPGQVAELIMDYYDQFSMRVSTGSITSEWHRVEVGIITGCTISVILFALAMNMLVKSAETQCRGPKTMTGVRQPPVRAFMDDLTITTESVPGSRWILQGLEELCGWARMRFKPEKSRSLVLKRGKVVDKFRFSIGGASIPTVSEKPVKSLGKEFNSSLKDSVSVQGTCQELESWLRAVDRSGLPGKFKAWIYQHGILPRVLWPLLVYEVPISIVEGLERKVSSFLRRWLGLPRSLSSIALYGRNTKLQLPLRSLEEEFKVTRAREVMMYRDSSDPKVAQAGVRVKTGRKWVADEAVLQAESRIRHRALVGAVTRGRAGLGTFPTPQYEKVKGKERCRLVQEEVRAEVEERRISRAVGLRQQGAWTRWEQAMDRKVTWSELWRAEPQRIKFLVQAVYDILPSPSNLSIWGKTESPNCPQCPGRGTLEHILSCCPVALGQGRYTWRHNQVLRPIAEAISMGISSSKRSHSTTQMIAFVNAGERLGKTTGARNPAGLLATAKDWQLSVDLEKQLKFPQHIVATTLRPDILLVSEETKNILLIELTVPWEDRLDEAHERKRTKYEELVIDCRKQGWKAKCMPIEVGCRGFAGQSLYKTLSALGITGMERRRAIKKIMEEAEKASRWLWIRRSDPWSSSKCHLNTSRV

SEQ ID NO: 20211 - protein, 956 aa, Amblyraja radiata
MRTMTTIIISLAVERFGKVEKKPARTSFTMNQRATKIHKIRQELKTLKKQYKEAREEQRPPFAELQTILRKKVMTLRRAEWRASFIANPFGFTKQLLGQKRSGSLACSKEEIDRHIQTTYSDPIRQQELGQCNILIKPPPPIKEFDSREPLLKEVQDVVKRARAGSAPGPSGVPYRLYKNCPLLLKRLWKILKVIWRRGKVVQQWRFAEGVWIPKEEDSKTIDQFRIISLLSVEGNIFFSIVARRLTNFLSSNGYIDSSVQKGGLSGVPGCLEHTGVVTQLIREARENKGDLTVLWLDLANAYGSIPHKLIQTVMAKHHVPGQVADLILDYYNQFSTRVSSGSVTSEWHRLEVGIITGCTISVILFALAMNMIVKSAEPECRGPRTKSGMRQPPIRAFMDVLTVTTESVPGSRWILQGLEKLIGWARMRFKPGKSRSLVLKKGKVMDRFRFSIEGSPIPTVSEKPVKSLGKVFNSSLKDTASVQATCQELESWLRAVDQSGLPCKFKAWIYQHGILPRILWPLLVYEVPISIVERLERKVSSFLRRWLGLTRSLSSIALYGNNTKLQLPLKSLEEEFKVTRAREVMMYRDSSDPKVAQAAVEVKTGRKWRAGEAVLQAESRIRHRVLVGAVTRGRAGLGIFPSPQFDKAKGKERCRLVQEEVRAVVEEERCTRAVGLRQQGAWTRWEQAMDRKVTWTELWQAEPQRIKFLVQAVYDVLPSPSDLFIWGKAESPDCPQCSGKGTLEHILSRCPKSLGQGRYTWRHDQVLKPIAEAISMGISSCRQERPTTQMITFVKAGVQLPRTTAARNQSGILATAQDWQLSVHLVKQLKFPQHIATTTLRPDILLVSEATKNIVLLELTVPWEDRLEEAHERKMAKYEELVIDCRKQGWKARCMPIEVGCRGFAGQSLYKALNALGINGVARRRAIKNTTESAEKASRWLWIRREGPWGGANAT

SEQ ID NO: 20212 - protein, 1055 aa, Coilia nasus
MKCKERLQALQCTGLEPGETEEEPGPEAPHRAQSLQVVQTVLSNRQSEKRRIRWPQASKTAEWQKFDEDVDKVLEATAKGDVERRLHTMTTIIMSMAAERFGVEEERVAKQPYFKNQRAVKIHNIRTELKALKKQHKAAREDERAPLVELHLMLRKRLLILRRAEQHRRRRRERARKRAAFINNPFGFMKELLGQKRSGRLASSKEEIDQHLHDTFSDPTRDQELGQCKAVIRPPEPAEAFDLREPLLKEIQEVVRRARSRSAPGPSGTSYKVYKHCPKLLHRLWKILRLIWRRGRTAQQWRFAEGVWIPKEEDSKTISQFRIISLLSVEGKIFFSIVAKRLTEFFLKNGYIDTSVQKGGISGVPGCLEHTGVVTQLLREARENRGDLVVLWLDLANAYGSMPHKLVLETLERHHVPAAVRELILDYYGDFSLRVSAGSITSKWHRLEVGIITGCTISVVLFALAMNMLVKSAEPECRGPKSKSGIRQPPIRAFMDDLTVTTESVPGGRWILTGLERLMGWARMSFKPTKSRSLVLKKGRVADKFRFSISGTPIPSISEKPIKSLGKFFDSSLKDSASIKNTCEELEGWLKVVDKTGLPGKFKAWIYQHGILPRILWPLLLYEFPITTISDLERRVSRYLRRWLGLPRSLSNIALYGNTCKLTLPLKSIEEEFKVLRAREVLQFRESADPKVSGAGVAVRTGRKWRAEAAVEQAESRLRHRVLVGTVARGRMGLGTVASPRFDKVRGKERRQLVQNEVRAVVEEERSSRAVGMRQQGAWTRWEQVAERKISWTDLWQAEPHRIKFLVQAVYDVLPSPSNLHRWGLVDTPACPLCQRKGTLEHILSCCPKALGDGRYRWCHDQVLKTIAESIYSGITSGRRSKPTKKAINFVRAGEKLSTRPRATSGLLNTAQDWQLSVDLGSQLKFPQHVVKTTLRPDIVLVSEATKNVVMLELTVPWEERMEEAFERKREKYDGLVSDCHRQGWKARCLPVEVGCRGFAGQSLCRAYTALGITGERRRRAIRNSTEAAEKASRWLWIKRADPWINAAGAQAEAS

SEQ ID NO: 20213 - protein, 1196 aa, Chromis chromis
MCPEASVDVLSQLAPLMKISDDQERLGDNHEKCGDYWRVSDSSERRQPGQNGLATQSVSSVRRTPNKATMNQMEGYPQGCPRGGEDEHPNRMDITVSDLGKEDTTMSKQCACGKICKNNRGLKIHQARMKCLAKAGAAQRTGVQPGETEEEPGPESPHSAQSLHVLQTNSPNTESERRRIKWPAANMTSLWKQFDDDVHKILEATMKGGAERKLQAMTTIIVSIAAERFGEEEKKSSRTPYTKNQRAVRIHNIRQEMKALKSQYKEASEEERIGLAQLMNFLRKKIRVLRRAEWHRRRRRERARKRAAFIANPFKFTKVLLGQKRSGRLVCSKDEIDHHLRQTYSDPEREQELGECNTLIDPPEPEAQFNMSELQLKEVREVVRKARASSAPGPSSTSYKVYKHCPRLLLRLWKIMQVFWRRGKIPDQWKVAEGVWIPKEENSTLIDQFRIISLLCVEAKIFFSVVSNRLCTYLAKNIYIDTSVQKGGVSGMPGCLEHTGVVTQLIREARENKGNLSVLWLDLANAYGSIPHQLVQLTLAKYHVPSRIRDLITDYYSNFRMRVFSGATTSSWHRVETGIITGCTISVTLFSLAMNMLIKSAEPECRGPRTNSNQRQPPIRAFMDDLTVTTESVPGCRWILKGLEKLVEWARMSFKPAKSRSLVLRKGKVEDRFRFNIAGTAIPSITEKPVKSLGKVFDSSLRDTTSIQSTCTELEGWLRAVDKSGLPGKFKAWVYQHGILPRILWPLLVYAVPISTVETLERRVSNHLRRWLGLPKSLSSIALYGHQNKLQLPFKSLEEEFKVTRTREVVQYRDSSDPKVANAGIQVRTGRKWRAEEAVQEAEARLRHRRLVGVVTRGRAGLGSFPSPQVNIKTGKERRHLVQEEVRAAVEEARTSKAVGLKQQGAWTRWENAVERKVTWAEIWKAEPHRIKFLIQAVYDVLPSPSNLHIWGKTETPACPLCHKRGTLEHILSSCAKALGEGRYRWRHDQVLKTIAEVISTGVEWARRHRPSKQTIAFVRAGEQPKPGKRTSGILTSATDWQLLVDLGQQLKFPNHIVATTLRPDIVLMSESTKQVMLLELTVPWEDRLEEAFERKLSKYSELVSGCQQAGWRARCLPVEVGCRGFAAPSLVRAFSQLGIEGERKRRAIRCTTEAAERASRWLWLKRGEPWGHGSKPSGHKLGSDQPQLGHLEEGV

SEQ ID NO: 20214 - protein, 1196 aa, Chromis chromis
MCPEASVDVLSQLAPLMKISDDQERLGDNHEKCGDYWRVSDSSERRQPGQNGLATQSVSSVRRTPNKATMNQMEGYPQGCPRGGEDEHPNRMDITVSDLGKEDTTMSKQCACGKICKNNRGLKIHQARMKCLAKAGAAQRTGVQPGETEEEPGPESPHSAQSLHVLQTNSPNTESERRRIKWPAANMTSLWKQFDDDVHKILEATMKGGAERKLQAMTTIIVSIAAERFGEEEKKSSRTPYTKNQRAVRIHNIRQEMKALKSQYKEASEEERIGLAQLMNFLRKKIRVLRRAEWHRRRRRERARKRAAFIANPFKFTKVLLGQKRSGRLVCSKDEIDHHLRQTYSDPEREQELGECNTLIDPPEPEAQFNMSELQLKEVREVVRKARASSAPGPSSTSYKVYKHCPRLLLRLWKIMQVFWRRGKIPDQWKVAEGVWIPKEENSTLIDQFRIISLLCVEAKIFFSVVSNRLCTYLAKNIYIDTSVQKGGVSGMPGCLEHTGVVTQLIREARENKGNLSVLWLDLANAYGSIPHQLVQLTLAKYHVPSRIRDLITDYYSNFRMRVFSGATTSSWHRVETGIITGCTISVTLFSLAMNMLIKSAEPECRGPRTNSNQRQPPIRAFMDDLTVTTESVPGCRWILKGLEKLVEWARMSFKPAKSRSLVLRKGKVEDRFRFNIAGTAIPSITEKPVKSLGKVFDSSLRDTTSIQSTCTELEGWLRAVDKSGLPGKFKAWVYQHGILPRILWPLLVYAVPISTVETLERRVSNHLRRWLGLPKSLSSIALYGHQNKLQLPFKSLEEEFKVTRTREVVQYRDSSDPKVANAGIQVRTGRKWRAEEAVQEAEARLRHRRLVGVVTRGRAGLGSFPSPQVNIKTGKERRHLVQEEVRAAVEEARTSKAVGLKQQGAWTRWENAVERKVTWAEIWKAEPHRIKFLIQAVYDVLPSPSNLHIWGKTETPACPLCHKRGTLEHILSSCAKALGEGRYRWRHDQVLKTIAEVISTGVEWARRHRPSKQTIAFVRAGEQPKPGKRTSGILTSATDWQLLVDLGQQLKFPNHIVATTLRPDIVLMSESTKQVMLLELTVPWEDRLEEAFERKLSKYSELVSGCQQAGWRARCLPVEVGCRGFAARSLVRAFSQLGIEGERKRRAIRCTTEAAERASRWLWLKRGEPWGHGSKPSGHKLGSDQPQLGHLEEGV

SEQ ID NO: 20215 - protein, 1054 aa, Trachurus trachurus
MKCKERLQASQCTGLVPGETEEEPSREAPHRAQSLQVVRTVPSTRQSEKRRIRWPQASKTAEWQKFDEDADKVLEATAKGDVERRLQTMTTIIVSMAAERFGVEEERRPKQPYTKNQRAVKIHNIRKELKALKKQHKEASEEERGPLAELRHMLRKRLLVLRRAEQHRRRRRERARKRAAFINNPFGFVKELLGQRRSGRLVCSKEEVDQHLHSTFSDPSRHQELGQCKAVISPPEPAEAFDLREPLLKEVQEVVRKARSRSAPGPSGTPYKVYKHCPKLLHRLWKILKVIWRRGRTAQQWRFAEGVWIPKEEDSKNISQFRIISLLSVEGKIFFSIVAKRLAEFLLKNGYIDTSVQKGGIPGVPGCLEHTGVVTQLLREARENKGDLVVLWLDLANAYGSMPHKLVLEALERHHVPAAVRDLILDYYSDFSLRVSAGSTTSEWHRLEVGIITGCTISVILFALAMNMLVKSAEPECRGPKTKTGIRQPPIRAFMDDLTVTTESVPGGRWILTGLEKLIGWARMSFKPTKSRSLVLKKGRVADKFRFSIAGTPIPTISEKPIKSLGKFFDSSLRDTASIKSTCDELEGWLKDVDKSGLPGKFKAWIYQHGILPRVLWPLLLYEFPITTIADLERRVSRYLRRWLGLPRSLSGIALYGNTCKLTLPLKSIEEEFKVLRAREVLQLRESSDPKVSGAGVAVKTGRKWRAEAAVEQAESRLRHGVLVGTVARGRAGLGTTAPPRFDKARGKERRKLVQNEVRAAVEEERSSRAVGMRQQGAWTRWEQAMERKITWTDLWRSEPHRIKFLVQAVYDVLPSPSNLHCWGLADTPACPLCQKKGTLEHILSCCSKALGEGRYRWRHDQVLKTIAESICSAITTCRKARPMKYNINFIRAGEKPKTTSRATTGLLNTAQDWQLLVDLGSQLKFPQHVAKTTLRPDIVLVSEATKSIVLLELTVPWEERMEEAFERKRAKYDSLVSDCHSQGWKARCMPVEVGCRGFAGQSLCRAYTALGITGERRRRAINNSTEAAEKASRWLWIKRADPWSSAARAQAEA

SEQ ID NO: 20216 - protein, 1107 aa, Collichthys lucidus
MHLMEKYPQGCPRGGEDEQPRPTDTAVTDPGNGQTTMSKQCTCGKICKNIHGLKIHQARMKCPLGAEAAQRTGVTPGETQEEPGPESPHSAQNLQVLQTNPSSTKSDRRRIKWPAASMTSLWKQFDDDVDQILEAMAKGEADRKLQGMTTIIVSIAAERFGEEEKKSPGTSYSKNQRAVRIHNIRQEMKALKSQYKAAGQEERIGLAQLMCILRKKIRVLRRAEWHRRRRRERARKRAAFIANPFKFTKDLLGQKRSGKLASSQEDIDQHLKQTYSDPAREQELGECNNLIEPPEPEVQFDMSELQLKELREVVRKARASSAPGPSGTSYKVYKNCPKLLLRLWKILRVFWRRGRIPEQWRVAEGVWIPKEENSTQLDQFRIISLLCVEAKIFFSAVSKRLCTYLAKNTYIDTSVQKGGIPGMPGCLEHTGVVTQLIREARDNKGNLSVLWLDLANAFGSIPHKLVQLTLRKHHVPSMCTDLIADYYSNFRMRVSSGGTTSSWHKVEIGIITGCTISVTLFSLAMNMLTKSAEPECRGPLTNSRQRQPPIRAFMDDLTVMTESVPGCRWILKGLEKLVEWARMRFKPAKSRSMVLRKGKVEDKFRFNIAGTAIPTISEKSVKSLGKVFDCSLRDTTSIQSTCTELDGWLKSVDKSGLPGKFKAWVYQHGILPRILWPLLVYAVPISTVETLERKVSNHLRRWLGLPRSLSSIALYGNTNKLQLPFKSLEEEFKVTRAREVVQYRDSSDPKVAKAGIQVRTGRKWRAEEAVQEADARLRHRSLVGVVTRGRAGLGSFPTPQINTRGKEGRRLVQEEVRAAVEETRTCKAVGMKQQGAWTRWENVVERKVTWAELWKAEPHRIKFLIQAVYDVLPSPSNLHIWGLAETPACPLCSKRGTLEHILSCCTRALGDGRYRWRHDQVLKTIAEAISIGLEWAKQFRPSKKTIAFVRAGDKPTPARRTSSASILSSARDWQLLVDLEHQLKFPSHIAATTLRPDIVLVSESTKQAVLLELTVPWEDRLEEAFERKLSKYAGLVSDCQQAGWRARCFPVEVGCRGFAARSLARAFSSLGIEGERKRRAIRNTTDAAERASRWLWLKRGEPWSHGS

SEQ ID NO: 20217 - protein, 1125 aa, Sphaeramia orbicularis
MGWQPILLSPERGTPNQATMTSLERYPQGCQRGGEEEHPSRTDTVVTDPDNGHMTKSNQCMCGKVCKNIRGLKIHQAKMKCSEGAGATHRTGVQPGETQEGPGPESPHSARNLQVLSTNPLNIKSDRRRIKWPAANMKSLWNQFDNDVDQILEAMGKGEACQKLQAMTTTIVNVAAERFGEEEKKRPGTSYSKNQRATKIHNIRKEMKALKSQYKVVGEEERIGLAQLMHILRKKIIVLRRAEWHRRRRRERARRRAAFIANPFKFIKDLLGQKRNGRLTSSQEAIDQHLTQKYSDPERDQELGESSTIIDPPEPEVQFDMTELQLKEVREIVHKARASSASGPSGTSYKVYKNCPKLLLRLWKTLRVFWRKGKIPDQWRAAEGVWIPKEENSTQLDQFRIISLLCIESKIFFSAISKRLCTYLIKNTYIDTSVQKGGISGMPGCVEHTGVMSQLIREARENNGNLSVLWLDLADAFGSIPHKLIQLTLLKHHVPSRCRDIITDYYNNFRIRVSSGAVESSWHKVEIGIITGCTISVTLFTLAMNMLIKAAEPECRGPRMKSGQRQPPIRAFMDDLTVTTESIAGCRWILKGLEKQVEWARMHFKPAKSRSMVLRKGKVEDKFRFYIAGTAIPTITEKPIKTLGKVFDSSLKDRASIQSTCSELDGWLKSVDKSGLPGKFKAWVYQHGILPRILWPLLVYAIPISTVETLERKVSSHLRRCLGLPKSLSSIALYGHNNKLQLPFKSLEEEFKVTRAREVMQYRDSSDPKVANAGICVRTGRKWRAENAVLEAEARLHHRGLVGVVTRGRAGLGSFPTPELNTRGKARRHLIQEEVRATVEESRTCRAVGMKQQGAWTRWENVVERKVTWAEIWKAEPHRIKFLIQAVYDVLPSPSNLHSWGLAESPDCPMCSKKGTLEHILSCCSMALGEGRYRWRHDQVLKTIAEAISTGIERAKRSRPSKKTITFVRAGEQAIPARRPPAGILTTARDWQLLVDLERQLKFPRHIAATTLRPDIVILSEATKQAVLLELTVPWEDRIEEAFERKLSKYTGLISDCQQAGWKARCFPVEVGCRGFVAQSLARAFSNLGIEGESRRRAIRNATEAAERASRWLWLKRGKPWSHGS

SEQ ID NO: 20218 - protein, 1106 aa, Merluccius capensis
MKLKEKYPQGCPRGGEDEHLSRTDTTVTDPGNGQTTMTKQCTCGKVCKNIHGLKIHRARMKCPLGAEATQRTGVTPGETQEVPGPESPHSAQNLQVLQTNSSSIKSDRRRIKWPAASMNSIWQEFDDDVDQILEGMAKGEADKKLQVMTTTIVNIAAERFGEVEKKSSGTAYSMNKRAVRIHNIRQEMKALKSQYKAAGQEERTGLAQLMCILRKNIRVLRRAEWHRRRRRERARKRAAFIANPFKFTKDLLGQKRSGKLASSQEDIDQHLKQTYSDPAREQELGECNNLIEPPEPDVQFDMSELQLPEVREVVRKARASSAPGPSGTSYKVYKNCPKLLLRLCKILRVFWRRGRIPDQWRVAEGVWIPKEENSTQLDQFRIISLLCVEAKVFFSAVSKRLCTYLAKNTYIDTSVQKGGISGMSGCLEHTGVVTQLIREARENKGNLSVLWLDLANAYGSIPHTLVQLTLTKHHVPSRCRDLIADYYSNFRMRVSSGAITSSWHKVEIGIITGCTISVTLFSLAMNMLTKSAEPECRGPRTNSGQRQPPIRAFMDDLTVMTESVPGCRWILKGLEKLVEWARMRFKPIKSRSMVLRKGKVEDKFRFHISGTAIPTITEKPVKSLGKVFDCSLRDTTSIQSTCTELDGWLKSVDKSGLPGKFKAWVYQHGILPRILWPLLVYAVPISTVETLERRVSNHLRRWLGLPRSLSSIALYGNTNKLQLPFKSLEEEFKVTRAREVVQYRDASDPKVAKAGIQVRTGRKWRAEEAVQEADARLRQRCLVGVVTRGRAGLGSFPSPQMNTRGKERRRLVQEEVRAAVEETRTCKAVGMKQQGAWTRWENAVERKVTWAELWKAEPHRIKFLIQAVYDVLPSPSNLHTWGIAETPACPLCSKRGTLEHILSCCTRALGDGRYRWRHDQVLKTIAEAISTGLEWAKHVRPSKKSIAFVRAGKPTPVRRTSSAGILMSARDWQVLVDLEHQLKFPSHIVVTTLRPDIVLVSESTKQAVLLELTVPWEDRLEEAFERKLSKYAGLVSDCHQAGWRARCFPVEVGCRGFAARSLARAFSTLGIEGERKRRAIRSTTDAAERASRWLWLKRGEPWSHGS

SEQ ID NO: 20219 - protein, 1107 aa, Collichthys lucidus
MHLMEKYPQGCPRGGEDEQPRPTDTTVTDPGNGQTTMSKQCTCGKICKNIHGLKIHQARMKCPLGAEAAQRTGVTPGETQEEPGPESPHSAQNLQVLQTNPSSTKSDRRRIKWPAASMTSLWKQFDDDVDQILEAMAKGEADRKLQGMTTIIVSIAAERFGEEEKKSPGTSYSKNQRAVRIHNIRQEMKALKSQYKAAGQEERIGLAQLMCILRKKIRVLRRAEWHRRRRRERARKRAAFIANPFKFTKDLLGQKRSGKLASSQEDIDQHLKQTYSDPAREQELGECNNLIEPPEPEVQFDMSELQLKELREVVRKARASSAPGPSGTSYKVYKNCPKLLLRLWKILRVFWRRGRIPEQWRVAEGVWIPKEENSTQLDQFRIISLLCVEAKIFFSAVSKRLCTYLAKNTYIDTSVQKGGIPGMPGCLEHTGVVTQLIREARDNKGNLSVLWLDLANAFGSIPHKLVQLTLRKHHVPSMCTDLIADYYSNFRMRVSSGGTTSSWHKVEIGIITGCTISVTLFSLAMNMLTKSAEPECRGPLTNSRQRQPPIRAFMDDLTVMTESVPGCRWILKGLEKLVEWARMRFKPAKSRSMVLRKGKVEDKFRFNIAGTAIPTISEKSVKSLGKVFDCSLRDTTSIQSTCTELDGWLKSVDKSGLPGKFKAWVYQHGILPRILWPLLVYAVPISTVETLERKVSNHLRRWLGLPRSLSSIALYGNTNKLQLPFKSLEEEFKVTRAREVVQYRDSSDPKVAKAGIQVRTGRKWRAEEAVQEADARLRHRSLVGVVTRGRAGLGSFPTPQINTRGKEGRRLVQEEVRAAVEETRTCKAVGMKQQGAWTRWENVVERKVTWAELWKAEPHRIKFLIQAVYDVLPSPSNLHIWGLAETPACPLCSKRGTLEHILSCCTRALGDGRYRWRHDQVLKTIAEAISIGLEWAKQFRPSKKTIAFVRAGDKPTPARRTSSASILSSARDWQLLVDLEHQLKFPSHIAATTLRPDIVLVSESTKQAVLLELTVPWEDRLEEAFERKLSKYAGLVSDCQQAGWRARCFPVEVGCRGFAARSLARAFSSLGIEGERKRRAIRNTTDAAERASRWLWLKRGEPWSHGS

SEQ ID NO: 20220 - protein, 1044 aa, Gouania willdenowi
MKCSLGAEATQRTGSQPGETQEGPGLESPHSARNLQVLEAIPLSIKSDRRWIKWPAASMTSEWKKFDDDVDQILEATVKGEADRKLQGLTTIIVSIAAERFGEEEKKRSGTTYSKNQRAVRIHNIRKEMKVLKSHYKEAVDEDRSGLSQLMCILREKIRVLRRAEWHRRRCRERARKRAAFISNPFKFTKDLLGQKRSGKLASSQEEIDQHLKQMYSDPAREQELGECNILIDPPEPEVQYDTSELQLKEVRDVVRNARAGSAPGPSGTSYKVYKNCPKPLLRLWKVLRIFWRRGRIPDQWTVAEGVWIPKEENSTQLDQFRIISLLSVEAKIFFSTVSRRLSTYLEQNTYIDTSVQKGGLSGMPGCLEHTGVVTQLIREARENKGNLSVLWLDLANAFGSIPHKLVQLTLTKYHVPSKCRDLIADYYTNFRMRVSSGAITSHWHKVEIGIFTGCTISVTLFSLAMNMLIKSVEPECRGPLSKSRQRQPPIRAFMDDLTVMTESVSGCRWILKGLEKVMDWTRMRFKPAKSRSMVLRKGKVKDKFRFNITGTAIPTITEKPVKSLGKVFDSSLRDTTSIQLTCTALDGWLKSVGKSGLPGKFKAWVYQHGILPRILWPLLVYAVPISTVESLERRVSSHLRRWLGLPKCLSSLALYGNTNKLQLPFKSLEEEFKVTRAREVVQYRDSRDPKVAKAGIKVRTGRKWRAENAVQEAEARLRQRSLVGVVTRSRAGLGSFPTPQTNTSGKEGRRLFQEEVRAAVEESRTIKAVGMKQQGAWTRWENAVERKVTWAELWKAEPHRIKFLIQAVYDVLPSPSNLHTWGVAETSACSLCSKRETLEHILSCCTRALGDGRYHWRHDQVLKTISEVISEGIVYAKRARPSIAFVRAGEQPTPARRTSAGILTSAKDWQLLVDLEHQLKFPGHIAVTTLRPDIVLVSEASKQIVLLELTIPCEDRLEEAFERKLSKYAGLVSDCQRAGWRARCFPVEVGCRGFAARSLTRALSCLGIEGERRRRAIRSTTDAAERASRWLWLKRGEPGSHGS

SEQ ID NO: 20221 - protein, 1107 aa, Larimichthys polyactis
MNLMEKYPQGCPRGGEDEQPRLTDTTVTDPGNGQTTMSKQCTCGKICKNIHGLKIHQARMKCPLGVEAAQRTGVTPGETQEEPGPESPHSAQNLQVLQTNPSSIKSDRRRIKWPAASMTSLWKQFDDDVDQILEAMAKGEADRKLQGMTTIIVSIAAERFGEEEKKSPGTSYSKNQRAARIHNIRQEMKALKSQYKAAGQEERIGLAQLMCILRKNIRVLRRAEWHRRRRRERARKRAAFIANPFKFTKDLLGQKRSGKLASPQEDIDQYLKQTYSDPAREQELGECNNLIEPPEPEVQFDMSELQLKELREVVRKARASSAPGPSGTSYKVYKNCPKLLLRLWKILRVFWRRGRIPEQWRVAEGVWIPKEENSTQLDQFRIISLLCVEAKIFFSAVSKRLCTYLAKNTYIDTSVQKGGIPGMSGCLEHTGVVTQLIREARENKGNLSVLWLDLANAFGSIPHKLVQLTLRKHHVPSMCTDLIADYYSKFRMRVSSGGTTSSWHKVEIGIITGCTISVTLFSLAMNMLTKSAEPECRGPLTNSGQRQPPIRTFMDDLTVMTESVPGCRWILKGLEKLVKWARMRFKPAKSRSMVLRKGKVEDKFRFNITGTAIPTISEKPVKSLGKVFDCSLRDTTSIQSTCTELDGWLKSVDKSGLPGKFKAWVYQHGILPRILWPLLVYAVPISTVETLERKVSNHLRRWLGLPRSLSSIALYGNTNKLQLPFKSLEEEFKVTRAREVVQYRDSSDPKVAKAGIQVRTGRKWRAEEAVQQADARLRHRSLVGVVTRSRAGLGSFPTPQMNTRGKEGRRLVQEEVRAAVEETRTCKAVGMKQQGAWTRWENVVERKVTWAELWKAEPHRIKFLIQAVYDVLPSPSNLHIWGIAETPACPLCSKRGTLEHILSCCTRALGDGRYRWRHDQVLKTIAEAISIGLEWAKQFRPSKKTIAFVRAGDKPAPARRTSSASILSSARDWQLLVDLEHQLKFPSHIAVTTLRPDIVLVSESTKQAVLLELTVPWEDRLEEAFERKLSKYAGLVSDCQQAGWRARCFPVEVGCRGFAARSLARAFSSLGIEGERKRRAIRNTTDAAERASRWLWLKRGEPWSHGS

SEQ ID NO: 20222 - protein, 1107 aa, Larimichthys polyactis
MNLMEKYPQGCPRGGEDEQPRLTDTTVTDPGNGQTTMSKQCTCGKICKNIHGLKIHQARMKCPLGVEAAQRTGVTPGETQEEPGPESPHSAQNLQVLQTNPSSIKSDRRRIKWPAASMTSLWKQFDDDVDQILEAMAKGEADRKLQGMTTIIVSIAAERFGEEEKKSPGTSYSKNQRAARIHNIRLEMKALKSQYKAAGQEERIGLAQLMCILRKNIRVLRRAEWHRRRRRERARKRAAFIANPFKFTKDLLGQKRSGKLASSQEDIDQHLKQTYSDPAREQELGECNNLIEPPEPEVQFDMSELQLKELREVVRKARASSAPGPSGTSYKVYKNCPKLLLRLWKILRVFWRRGRIPEQWRVAEGVWIPKEENSTQLDQFRIISLLCVEAKIFFSAVSKRLCTYLAKNTYIDTSVQKGGIPGMSGCLEHTGVVTQLIREARENKGNLSVLWLDLANAFGSIPHKLVQLTLRKHHVPSMCTDLIADYYSNFSMRVSSGGTTSSWHKVEIGIITGCTISVTLFSLAMNMLTKSAEPECRGPLTNSGQRQPPIRAFMDDLTVMTESVPGCRWILKGLEKLVEWARMRFKPAKSRSMVLRKGKVEDKFRFNITGTAIPTISEKPVKSLGKVFDCSLRDTTSIQSTCTELDGWLKSVDKSGLPGKFKAWVYQHGILPRILWPLLVYAVPISTVETLERKGSNHLRRWLGLPRSLSSIALYGNTNKLQLPFKSLEEEFKVTRAREVVQYRDSSDPKVAKAGIQVRTGRKWRAEEAVQEADARLRHRSLVGVVTRSRAGLGSFPTPQMNTRGKEGRRLVQEEVRAAVEETRTCKAVGMKQQGAWTRWENVVERKVTWAELWKAEPHRIKFLIQAVYDVLPSPSNLHIWGIAETPACPLCSKRGTLEHILSCCTRALGDGRYRWRHDQVLKTIAEAISIGLEWAKQFRPSKKTIAFVRAGDKPTPARRTSSASILSSARDWQLLVDLEHQLKFPSHIAVTTLRPDIVLVSEFTKQAVLLELTVPWEDRLEEAFERKLSKYAGLVSDCQQAGWRARCFPVEVGCRGFAARFLARAFSSLGIEGERKRRAIRNTTDAAERASRWLWLKRGEPWSHGS

SEQ ID NO: 20223 - protein, 1048 aa, Larimichthys polyactis
MKCPLGVEAAQRTGVTPGETQEEPGPESPHSAQNLQVLQTNPSSIKSDRRRIKWPAASMTSLWKQFDDDVDQILEAMAKGEADRKLQGMTTIIVSIAAERFGEEEKKSPGTSYSKNQRAARIHNIRLEMKALKSQYKAAGQEERIGLAQLMCILRKNIRVLRRAEWHRRRRRERARKRAAFIANPFKFTKDLLGQKRSGKLASSQEDIGQHLKQTYSDPAREQELGECNNLIEPPEPEVQFDMSELQLKELREVVRKARASSAPGPSGTSYKVYKNCPKLLLRLWKILRVFWRRGRIPEQWRVAEGAWIPKEENSTQLDQFRIISLLCVEAKIFFSAVSKRLCTYLAKNTYIDTSVQKGGIPGMSGCLEHTGVVTQLIREARENKGNLSVLWLDLANAFGSIPHKLVQLTLRKYHVPSMCTDLIADYYSNFSMRVSSGGTTSSWHKVEIGIITGCTISVTLFSLAMNMLTKSAEPECRGPLTNSGQRQPPIRAFMDDLTVMTESVPGCRWILKGLEKLVEWARMRFKPAKSRSMVLRKGKVEDKFRFNITGTAIPTISEKPVKSLGKVFDCSLRDTTSIQSTCTELDGWLKSVDKSGLPGKFKAWVYQHGILPRILWPLLVYAVPISTVETLERKGSNHLRRWLGLPRSLSSIALYGNTNKLQLPFKSLEEEFKVTRAREVVQYRDSSDPKVAKAGIQVRTGRKWRAEEAVQEADARLRHRSLVGVVTRSRAGLGSFPTPQMNTRGKEGRRLVQEEVRAAVEETRTCKAVGMKQQGAWTRWENVVERKVTWAELWKAEPHRIKFLIQAVYDVLPSPSNLHIWGIAETPACPLCSKRGTLEHILSCCTRALGDGRYRWRHDQVLKTIAEAISIGLEWAKQFRPSKKTIAFVRAGDKPTPARRTSSASILSSARDWQLLVDLEHQLKFPSHIAVTTLRPDIVLVSEFTKQAVLLELTVPWEDRLEEAFERKLSKYAGLVSDCQQAGWRARCFPCGGWMQRICSPFLARAFSSLGIEGERKRRAIRNTTDAAERASRWLWLKRGEPWSHGS

SEQ ID NO: 20224 - protein, 920 aa, Collichthys lucidus
MKALKSQYKAAGQEERIGLAQLMCILQKNIRVLRRAEWHRRRRRERARKRAAFIANPFKFTKDLLGQKRSGKLASSQEDIDQHLKQTYSDPAREQELGECNNLIEPPEPEVQFDMSELQLKELREVVRKARASSAPGPSGTSYKVYKNCPKLLLRLWKILRVFWRRGRIPEQWRVAEGVWIPKEENSTQLDQFRIISLLCVEAKIFFSAVSKRLCTYLAKNTYIDTSVQKGGIPGMPGCLEHTGVVTQLIREARDNKGNLSVLWLDLANAFGSIPHKLVQLTLRKHHVPSMCTDLIADYYSNFRMRVSSGGTTSSWHKVEIGIITGCTISVTLFSLAMNMLTKSAEPECRGPLTNFRQRQPPIRAFMDDLTVMTESVPGCRWILKGLEKLVEWARMRFKPAKSRSMVLRKGKVEDKFRFNIAGTAIPTISEKSVKSLGKVFDCSLRDTTSIQSTCTELDGWLKSVDKSGLPGKFKAWVYQHGILPRILWPLLVYAVPISTVETLERKVSNHLRRWLGLPRSLSSIALYGNTNKLQLPFKSLEEEFKVTRAREVVQYRDSSDPKVAKAGIQVRTGRKWRAEEAVQEADARLRHRSLVGVVTRGRAGLGSFPTPQMNTRGKEGRRLVQEEVRAAVEEMRTCKAVGMKQQGAWTRWENVVERKVTWAELWKAEPHRIKFLIQAVYDVLPSPSNLHIWGLAETPACPLCSKRGTLEHILSCCTRALGDGRYRWRHDQVLKTIAEAISIGLEWAKQFRPSKKTIAFVRAGDKPTPARRTSSASILSSARDWQLLVDLEHQLKFPSHIAATTLRPDIVLVSESTKQAVLLELTVPWEDRLEEAFERKLSKYAGLVSNCQQAGWRARCFPVEVGCRGFAARSLARAFSSLGIEGERKRRAIRNTTDAAERASRWLWLKRGEPWSHGS

SEQ ID NO: 20225 - protein, 1072 aa, Sphaeramia orbicularis
MTKSNQCMCGKVCKNIRGLKIHQAKMKCLEGAGATHRTGVQPGETQKGPGPESPHSARNLQVLSTNPLNIKSDRRRIKWPAANMKSLWNQFDNDVDQILEAMGKGEASQKLQAMTTTIVNVAAERFGEEEKKRPGTSYSKNQRATKIHNIRKEMKALKSQYKVVGEEERIGLAQLMHILRKKIIVLRRAEWHRRRCRERARRRAAFIANPFKFIKDLLGQKRNGRLTSSQEAIDQHLTQKYIDPERDQELGESSTIIDPPEPEVQFDMTELQLKEVREIVHKARASSASGPSGTSYKVYKNCPKLLLRLWKTLRVFWRKGKIPDQWRAAEGVWIPKEENSTQLDQFRIISLLCVESKIFFSAISKRLCTYLIKNTYIDTSVQKGGISGMPGCVEHTGVVSQLIREARENNGNLSVLWLDLADAFGSIPHKLIQLTLLKHHVPSRCRDIITDYYNNFRIRVSSGAVESSWHKVEIGIITGCTISVTLFTLAMNMLIKAAEPECRGPRMKSGQRQPPIRAFMDDLTVTTESIAGCRWILKGLEKQVEWARMHFKPAKSRSMVLRKGKVEDKFRFYIAGTAIPTITEKPIKTLGKVFDSSLKDRASIQSTCSELDGWLKSVDKSGLPGKFKAWVYQHGILPRILWPLLVYAVPISTVETLERKVSSHLRRWLGLPKSLSSIALYGHNNKLQLPFKSLEEEFKVTRAREVMQYRDSSDPKVANTGICVRTGRKWRAENAVLEAEVRLHHRGLVGVVTRGRAGLGSFPTPELNTRGKARRHLIQEEVRATVEESRTCRAVGMKQQGAWTRWENVVERKVTWAEIWKAESHRIKFLIQAVYDVLPSPSNLHSWGLAESPDCPMCSKKGTLEHILSCCSMALGEGRYRWRHDQVLKTIAEAISTGIERAKRSRPSKKTIAFVRAGEQAIPARRPPAGILTTARDWQLLVDLERQLKFPRHIAATTLCPDIVILSEATKQAVLLELTVPWEDRIEEAFERKLSKYTGLISDCQQAGWKARCFPVEVGCRGFAAQSLARAFSNLGIEGESRRRAIRNATEAAERASRWLWLKRGKPWSHGS

SEQ ID NO: 20226 - protein, 920 aa, Myripristis murdjan
MKALKSQYKAAGQEERTGLAQLMCILRKNIRVLRRAEWHRRRRRERARKRAAFIANPFKFTKDLLGQKRSGKLASSQEDIDQHLKQTYSDPAREQELGECNILIDPPEPEVQFDMSELQLQEVREVVRKARASSAPGPSGTSYKVYKNCPKILLRLWKILRVFWRRGRIPEQWRVAEGVWIPKEENSTQLDQFRIISLLCVEAKVFFSTVSKRLCNYLAKNTYIDTSVQKGGISGMSGCMEHTGVVTQLIREARENKGNLSVLWLDLANAFGSIPHKLVQLTLMKHHVPSRCRDLIADYYSNFRMRVSSGALTSDWHKVEIGIITGCTISVTLFSLAMNMLTKSAEPECRGPRTNSGQRQPPIRAFMDDLTVTTESVPGCRWILKGLEKLVEWARMRFKPAKSRSMVLRKGKVEDKFRFTIKGTAIPTISEKPVKSLGKVFDSSLRDTTSVQSTCTELGGWLKSVDKSGLPGKFKAWVYQHGILPRILWPLLVYSVPISTVETLERKVSNHLRRWLGLPKSLSSIALYGNSNKLQLPFKSLEEEFKVTRAREVVQYRDSSDPKVAKAGIQVRTGRKWRAEDAVEEADARIRHRSLIGVVTRGRAGLGLSPTPQVNTRGKEGRRLVQDEVRAAVEETRTCKAVGMRQQGAWTRWENAVERKVTWAELWKAEPQRIQFLIQAVYDVLPSPSNLHTWGIAETPACPLCSKRGTLEHILSCCTRALADGRYRWRHDQVLKIIAEAISAGLAWAKQFQPSKKTIAFVRAGDEPTPARRTSSAGILSSARDWQLLVDLERQLKFPSHIAVTTLRPDIVLISESTKQAVLMELTVPWEDRLEEAFERKLSKYTGLVNDCQLAGWRARCFPVEVGCRGFAARSLARAFSSLGIDGERKRRAIRSTTEAAERASRWLWLKRGDPWSHGS

SEQ ID NO: 20227 - protein, 1107 aa, Liparis tanakae
MNLMEKYPQGCPRGGEDEHPSRTDTTVTDPGNGQTTMSKQCTCGKICKNIHGLKIHRARMKCPLEAVATQRTGVTPGETQEGPGPESPHSAQNLQVLQTNPLSIKSDRRRIKWPAASMTSLWKQFDDDVDQILEAMAKGEADRKLRSMTTIIVSIAAERFGEEEKKSPGTSYSKNQRAVRIHNIRQEMKALKSQYKAAGQEERIGLAQLMCILRKNIGVLRRAEWHRRRQRERARKRAAFIANPFKFTKDLLGQKRSGKLASSQEDIDQHLKQTYSDPAREQELGECNNLIEPPEPEVQFDMSELQLKEVREVVRKARASSAPGPSGTSYKVYKNCPKLLLRLWKILRVFWRRGRIPEQWRVAEGVWIPKEENSTQLDQFRIISLLCVEAKVFFSAVSKRLCTYLAKNTYIDTSVQKGGIPGMSGCLEHTGVVTQLIREARENKGNLSVLWLDLANAFGSIPHKLVQLTLRKHHVPSRCRDLIADYYSNFRMRVSTGAITSSWHKVEIGIITGCTISVTLFSLAMNMLTKSAEPECRGPRTNSGQRQPPIRAFMDDLTVMTESVPGCRWILKGLEKLVEWARMRFKPAKSRSMVLKKGKVEDKFRFNITGTAIPTITEKPVKSLGKVFDCSLRDTKSIQSTCTELDGWLKSVDKSGLPGKFKAWVYQHGILPRILWPLLVYAVPISTVETLERKVSKHLRRWLGLPRSLSSIALYGNTNKLRLPFKSLEEEFKVTRAREVVQYRDSCDPKVAKAGIQVRTGRKWRAEEAVQEADARLHHRSLVGVVTRGRAGLGSFPTPKMNTRGKEGRRLVQEEVRAAVEETRTCKAVGMKQQGAWTRWENAIERKVTWAELWKAEPHRIKFLIQAVYDVLPSPSNLHIWGIAETPACPLCSKRGTLEHILSCCTRALGDGRYRWRHDQVLKIIAEAISAGMAWAKQFRPSKKTITFVRAGDKPTSARRTSSAGILTSARDWQLLVDLEHQLKFPSHIAVTTLRPDIVLVSESTKQVVLLELTVPWEDRLEEAFERKLSKYAGLVSDCQQAGWRARCFPVEVGCRGFAARSLARAFSSLGIEGERKRRAIRSTTDAAERASRWLWLKRGDPWSHGS

SEQ ID NO: 20228 - protein, 1003 aa, Mugilogobius chulae
MKFEKRRIKWPAANMSSQWSQFDSDVDQILEATGKGDVDKKLLSLTTMIVNIGAERFGQEERKEPSIGGHPMNKREIKIHNIRQEMKSLRRQYKYAGEYERLGLAHLMSIQRKKIGILRRAEWHRRRRRERSRKRAAFISDPFRFTKQLLGQKRNGKLECSQEELDHYLDDVYSDPTREQDLGECKILIEPPPPTVPYDVSELRLSEVSEVIKKARAGSAPGPSGTCYKVYKNCPKLLTRLWKILRVIWRRGRIPEFWKAAEGVLIPKEENSKKIDQFRIISLLCVEAKIFFSAVSRRLCSFLGKNNFVDTSVQKGGVPGVSGCLEHTGVVTQLIREARENKGNLSVLWLDLENAYGSIPHKLVQLTLTKHHVPQRVIDLVTDYYSNFRIRVSSGAVTSSWHNLELGIITGCTISVMLFSLAMNMIVKSAEPECRGPKSKSGQRQPPIRAFMDDLTVTTESVSGCRWILQGLQKLVKWARMSFKPAKSRSMVLRKGNIDSKFQFSIAGTAIPTISEKPVKSLGKVFDSSLKDTESIKVTIASLDTWLKAVDRSGLPGKFKAWIYQHGVLPRILWPLLIYEVPITTIETLERKISSHLRRWLGLPKSLSSIALYGRSNKLQLPLKSLEEEYKVSKTRVVLQYKDSEDSMVSNAGIEVKTGRKWRAEEAVQQAESRLHFSKLVGAVTRGRAGLGSIPAPKIPSKRKEKRCQVQSEVRAVLEERRTCKAVGMSKQGAWARWENAIQRRVTWNELWKAEPHRIKFLIQAVYDVLPSPSNLHNWGKIESPACVLCSKIGSLEHILSCCPKALGEGRYRWRHDQVLKAIAEAIAGGVEKARHSQIARKNIHFVKAGEVRKTTTPQSRAGILNTAKDWKLLVDLEKQLKFPSHITKTSLRPDIVLFSDSTKQVVMLELTVPWEDRLEEAFERKLTKYEQLTESCQGAGWKARCLPIEVGCRGFVAQSLSRAFSTLGIEGRGKRIALRKATEAAEKSSRWLWLKEGNHGAG

SEQ ID NO: 20229 - protein, 963 aa, Neogobius melanostomus
MTTIISSLAQERFGAEEKRLIQTTYTMNQRAAKIHRIRQELKSLKKQHKEAREEQRPPLEELRAVLRKRLMTLRRAEWHRRRRKERSRKRASFIANPFGFTKELLGQKRDGKLLCSKEEIDYHLHSTYSDPLREEELGQCNILVDPPPPTKEFDSREPLLKEVQEVVRKARSSSAPGPSGIPYKVYKNCPLLLRRLWKIIRVIWRRGKVAQQWRFAEGVWIPKEKDAKKIDQFRIISLLSVEGKIFFSIVARRLTNFLLNNNYIDTSVQKGGIAGVPGCLEHTGVVTQLIREAREHKGDLTILWLDLANAYGSIPHKLVQTTMTKHHVPHHVADLILDYYNQFRMRVSAGGVTSDWHKLEVGIITGCTISVILFALAMNMIVKSAEPECRGPQSRGGVRQPPIRAFMDDLTVTTESVPGGRWILQGLEKLIRWARMAFKPAKSRSLVLKKGKVTDRFHFSIQGAKIPSLSEQPVKSLGKVFDSSLRDSASVQSTCQELDSWLRSTDRSGLPGKFKAWIYQHGILPRILWPLLVYEVPISTVETLERKVSSCLRRWLGLPRSLSNIALYGNTTMLRLPLKSLEEEFKVTRAREVLMYRDSSDPKVAQAGVMVKTGRKWSAQAAVLDAQARLQHKELVGVVARGRAGLGMFPTPSRHKERKGKEKRHQVQEEVRAAVEEGRMSRAAGMGQQGAWTRWEQAMDRKVTWTELWQSEPHRITFLIRAVYDVLPSPANLCLWGKAETPTCHLCQARGTLAHILSSCPTALGQGRYTWRHNQVLKSIADIISKEIGKGGRGSNTTRSIAFVRAGEQPQAGRKAPAGILAAAKDWKLSVDLEKQLKFPQHIVSTTLRPDILLVSESTKNIIIMELTVPWEDRLGEAHERKMTKYEHLVTDCRAQGWKARCMPIEVGCRGFVGRSLHKAFTALGIAGTTRSRAIKNITDAAEKASRWLWIRRGEPWGQASAT

SEQ ID NO: 20230 - protein, 1113 aa, Hirundichthys speculiger
MEKYPQGSPRGGEDENPNLTDPRLPTNGDGQTITTAVSRCGKICKNSRGLKIHQTRMKCLREENMSQRTDTTSDETQEEPGQEEPHSAQSLHVAAPVPPSLPLVKVRIKWPQACKTTVWKQFDEDVDKVLEASAKGEVDRRLQAMTTIIISLAQERFGAEEKRPARTTYTMNRRAAEIHKIRQELKSLKKQHKNASEEQRPPLAELRAVLRKRLMTLRRAEGHRRRRKERSRKRASFIANPFGFTKQLLGQKRNGNLDCSKEEIDQHLHNTYSDPSREDDLGQCDILVDPPPPVKDFDTREPLLIEVKDVVKKARASSAPGPSGVPYKVYKNCPLLLRRLWRILRVIWRRGKVAQQWRFAEGVWIPKEKDSKKIDQFRIISLLSVEGKIFFSIVARRLADFLSSNNYIDTSVQKGGIAEVPGCLEHTGVVTQLIREAREKKGDLAVLWLDLANAYGSIPHKLVQTTMTKYHVPHHVADLILDYYDQFRMRVTAGEVTSEWHKLEVGIITGCTISVTLFALAMNMIVKSAEPECRGPRTQSGTRQPPIRAFMDDLTVTTESVPGCRWILQGLEKLIRWVRMGFKPAKSRSLVVKKGKVMDRFRFNIEGSVIPSISEKPVKSLGKVFDSSLKDSSSVLLTCQELDSWLRSVDRSGLPGKFKAWIYQHGILPRILWPLLVYEVPISTVESLERKVSTFLRRWLGLPRSLSNIALYGNTTKLRLPLKSLEEEFKVTRTREVLMYRDSRDPKVAQAGVVVKTGRKWSAQAAVVDAEARLRHRDLVGVVAHSRAGLGMFPTPPRHRECKGKEKRRQIQEEVRTAVEDGRTSRAAGLGQQGAWTRWEHAIDRRVTWTDLWQSEPHRISFLIRAVYDVLPSPANLFTWGKVETPNCHLCSARGTLEHILSSCPKALGQGRYTWRHNQVLKPIAEAISKGISSSRVCSTTSTIAFVKAGAQPRAGCKKASAGILATAQDWQLSVDLERQLRFPQHIVSTTLRPDILLVSENTKNIIIMELTVPWEDRLGEAHERKRTKYEQLVIDCRAQGWKARCMPIEVGSRGFVGHSLHKALSALGITGTARSRAIKNITEAAEKASRWLWIRESRTMGISGCYLYTSPV

SEQ ID NO: 20231 - protein, 1052 aa, Neogobius melanostomus
MKCLENEYVSQRTDATSDETQEEPSQEAPHSAQSLRVPLTVHPNLLPQAKVQIKWPQACKTAVWRQFDEDVDKVLEATVKGDVDRRLQAMTTIISSLAQERFGAEEKRLIQTTYTMNQRAAKIHRIRQELKSLKKQHKEAREEQRPPLEELRAVLRKRLMTLRRAEWHRRRRKERSRKRASFIANPFGFTKELLGQKRDGKLLCSKEEIDYHLHSTYSDPLREEELGQCNILVDPPPPTKEFDSREPLLKEVQEVVRKARSSSAPGPSGIPYKVYKNCPLLLRRLWKIIRVIWRRGKVAQQWRFAEGVWIPKEKDAKKIDQFRIISLLSVEGKIFFSIVARRLTNFLLNNNYIDTSVQKGGIAGVPGCLEHTGVVTQLIREAREHKGDLTILWLDLANAYGSIPHKLVQTTMTKHHVPHHVADLILDYYNQFRMRVSAGGVTSDWHKLEVGIITGCTISVILFALAMNMIVKSAEPECRGPQSRGGVRQPPIRAFMDDLTVTTESVPGGRWILQGLEKLIRWARMAFKPAKSRSLVLKKGKVTDRFHFSIQGAKIPSLSEQPVKSLGKVFDSSLRDSASVQSTCQELDSWLRSTDRSGLPGKFKAWIYQHGILPRILWPLLVYEVPISTVETLERKVSSCLRRWLGLPRSLSNIALYGNTTMLRLPLKSLEEEFKVTRAREVLMYRDSSDPKVAQAGVMVKTGRKWSAQAAVLDAQARLQHKELVGVVARGRAGLGMFPTPSRHKERKGKEKRHQVQEEVRAAVEEGRMSRAAGMGQQGAWTRWEQAMDRKVTWTELWQSEPHRITFLIRAVYDVLPSPANLCLWGKAETPTCHLCQARGTLAHILSSCPTALGQGRYTWRHNQVLKSIADIISKEIGKGGRGSNTTRSIAFVRAGEQPQAGRKAPAGILAAAKDWKLSVDLEKQLKFPQHIVSTTLRPDILLVSESTKNIIIMELTVPWEDRLGEAHERKMTKYEHLVTDCRAQGWKARCMPIEVGCRGFVGRSLHKAFTALGIAGTTRSRAIKNITDAAEKASRWLWIRRGEPWGQASAT

SEQ ID NO: 20232 - protein, 1104 aa, Symphodus melops
MEKYPQGCPRGGEDEHPIRTDTTAFDQGNGQTDLRKQCECGKICKNQRGLKIHQARMKCLGVKGPAQRTGVRPGETQEEPGPELPHRAQNLQVPETLPPCIKSERRWIKWPAACKSSQWSQFDDDVDQILEATGKGDVDKKLQALTTIIVSMGAERFGEEDKEKKRAPEAHNKNKREVKIHNIRQEMKSLRKRHKQAEEEERQGLAHLLSILRKKIRVLRRAEWHRKRRRERARKRSAFISNPFGFAKQLLGQKRNGKLECSQEDLDNYLQQMYSDPAREQELGECDTLIEPPQPTESFDLAELQLKEVREVIKKARARSAPGPSGTSYKVYKHCPKLLVRLWKILRVIWRRGRIPELWKVAEGVPIPKEENSKQIDQFRIISLLCVEAKIFFSVVSNRLCVYLAKNSFLDTSVQKGGVPGISGCLEHTGVVTQLIREARENRGNLAVLWLDLANAYGSMPHKLVELTLEKHHVPGRVRDLVADYYTNFRIRVSTGVTTSSWHKIQLGIITGCTISVILFSLAMNMLVKSAEPECRGPKTKSAQRQPPIRAYMDDLTVTTDSVPGCRWILQGLQKLVEWARMCFKPSKSRSMVLRKGKVDDKFRFIISGTAIPSITEKPVKSLGKMFDSSLRDTASIKTTCAELDSWLKAVERSGLPGKFKAWLYQHGILPRILWPLLVYEVPLSTVETLERKVSSHLRRWLGLPKSLSSIALYGNSNKLQLPFKSLEEEFKVTKTRAVLQYRDSRDPKVSNAGVEVKTGRKWCAKKTVQQAESRLHFNRLVGAVTRGRAGLGSVPTKSAPKGTEKRQQVQEEVRAGLDEERSCRAVGMGKQGAWLRWESAIQRRVTWAELWKAEPQRIKFLVQAVYDVLPSPANLHTWGIVESPACALCSKHGSLEHIMSSCAKALGEGRYRWRHDHVLKSIAEAISGGVERARRSHPVKKTIAFVRAGEKGTPKARTSAGVLSSANDWQMLVDLEQQLKFPSQIVNTSLRPDIVLFSDSTKQVIMLELTVPWEDRLEEAFERKLTKYEGLVSSCRQAGWKARCLPVEVGCRGFTARSLSKAFSILGIVGRGKEVALRKTTEAAEKASRWLWLKRGEPWGKSS

SEQ ID NO: 20233 - protein, 994 aa, Neogobius melanostomus
MWPAASKSLQWSQFDDDVDQILEATGKGDVDKKLQVLTTIIISIGAERFGEEEKNRAPAAHNKNKREVKIHNIRQEMKSLRKQHKQAGEEERRGLAHLMSILRKKIRVLRRAEWHRKRRRERARKQSAFISNPFGFAKQLLGQKRNGKLECSQEDLDNYLQQMYSDPAREQELGEFDTLIEPPQPTESFDLAELQLKEVREVIKKARARSAPGPSGTSYKVYKHCPKLLVRLWKILRVIWRRGKIPELWRVAEGVPIPKEENSKQIDQFRIISLLCVEAKIFFSVVSNRLCVYLAKNRFLDTSVQKVGVPGISGCLEHTGVVTQLIREARENQGNLAVLWLDLANAYGSMPHKLVELTLEKHHVPGRVRDLVADYYTNFRMRVSTGVTTSSWHRIQLGIITGCTISVILFSLAMNMLVKSAEPECRGPKTKSAQRQPPIRAYMDDLTVTTDSVPGCRWILQGLQKLVKWARMCFKPSKSRSMVLRKGKVDDKFRFSISGTAIPSITEKPVKSLGKMFDSTLRDTVSIKTTCAELDSWLKAVERSGLPGKFKAWLYQHGILPRILWPLLVYEVPLSTVETLERKVSSHLRRWLGLPKSLSSIALYGNSNKLQLPLKSLEEEFKVTKNRAVLQYRDSRDPKVANAGVEVKSGRKWSAEKTVQQAESRLHFNKLVGAVTRGRAGLGSVPTKRAPKGTEKRQQVQEEVRAGLEEERSCRAVEMGKQGAWLRWESAIQRRVTWTELWKAEPQRIKFLVQAVYDVLPSPANLHTWGLVESPACTLCFKHGSLEHILSSCAKALGEGRYRWRHDQVLKSIAEAIFGGVERARRSHPVKKTIAFVRAGEKGIPKARTSAGVLSPANDWQMLVDWQQQLKFPSQIVKTSLRPDIVLFSESTKQVIMLELTVPWEDRLEEAFERKLTKYEGLVSSCKQAGWKARCLPIEVGCRGFTAKSLSKAFSVLGIVGRGKDVALRKTTEAAEKASRWLWLKRGEPWGTSS

SEQ ID NO: 20234 - protein, 953 aa, Hydra viridissima
MRSVGVHMRYCKGEEEETEKRFVCANCSFGSDSLSGLQVHRQRKHPVEWNESLPEKTTFAWSDRELRELAEKEISLPPVRAVNLALFEEQGDARTLYAIQKIRQGSRYKGILQEMRLQNARGGADHAGADGDGANQEHSDSGLTASVPITIGNILIDVGVDEEVEINISTDENFVDAPVLPADIRSSTPEEAIIPELEEVQQMYVDKLEVIPRLDTTPKRLTEEVFSLEAYGRIRIGEVKDALRASKKDSAAGPDGLLLRDVLKVSPLLLCNIFNKWYLHGIPVEENRCRTILLYKSGDRHLASNYRPVTIGNMLNRLYAKIWERRIRKNLRHHVRQKAFVPVDGCFENVKTIQYILQSYRKRRLEHNVVFIDLAKAFDTVLYESIEKALCRKGVPSGVVKVVQSLYVGAVTNISVGKTKTRDIHINSGVKQGCPLSPLLFNLVLDELAERLEASGCGLELNGHVVSSLAFADDFVLLAKDAVEMNALLRVCGTFFGEKGLSVNPEKCQSLRVLPVNGKGKRSMKVLTRPHRWWKVNNTDVEIPSMSYDQLGKYLGVAIDPTGRVMLPTEEWKSWLTRLARCRLKPEQKVKTLRDVVCSRMNYVLRMSDSGICELRRWTRLVRNWVKDILHLPTWCSSDWMHLRVGLGIPDFSKGIVIQRLRASEKMALSEDGVVRVVGAGLAQKNGILWNRAGLQGIDLAAARKCCEVRRADNLGKTTNGSALKTIAVSNSVSRAWMMDTNLKSGNKILIWKAMSGSIPTKINQSRGIPNQALKKCRKCGITAETDCHILAGCHTSGDAFSWRHNLLCNKLAKELRLSGGPSRRVWRERACLANGRHYKPDIVVKDDSVITIIDMTCPYERSADYLGLREDEKVTKYEPLKRDLTWTREIEGSCDDTVERVEVIGIAIGAIGTITSRTLRKLKQLKVAKIARSLQMIASDCSARVIRGHLSR

SEQ ID NO: 20235 - protein, 1156 aa, Hydra viridissima
MSNKNISDKPSVGKGGITVNKQTAGADGTDACVVIHPGAKGVWSCPVCLMKFTIGKELRVHLAQIHKLALGGIRYRCNKCPYEGDVQLSVGTHLRYCKGVAVEEKKQFACASCNFSSDTFSGLQVHRQRKHVVEWNEQLKEKTEFAWTDRELRELAVKEVTIPFSVVNTETFAVLGIATRTQEAVRKIRYTDRYKSILAEIRAQVNEVEEEARQASDESQITLLVNTGRGAELHPAVINITDDIELVTEVVEVEMVTSNSTNEDYSINAPVEPAVIEADLGRQDAKLYLASLRQSDCTNAADQWTFAYSRGEVDWCKTKSRLFRISRFARGLRQPQRVGNWEFPEGFKPSRNLRKWRKYSYLQSCFRSKKKETVSKILDGTFKDAPGEEEIRPELEEVQRVYVDRLEKKTRLDTTRSVQMDERFDLVSYGRITIREVQDAISASKKDASGGPDGLLLQDVKKASPRQLCIIFNMWYLHGIPVEENRCRTILLHKGGEKHLTSNYRPVTIGNMLNRVYAKIWDRRIRKNLQFHVRQKAFVPLDGCFENVKTIQSILQSYRKRRLEHNVVFVDLAKAFDTILHDSIEKALLRKGIPRSVVKVVDSLYAGAVTSITVGKTKTRPICINSGVKQGCPLSPLLFNLVIDELAERLEATGCGLELGGHIISSMAFADDYVLLAKDSVEMNVLMNVCNTFFEEKGLAVNPAKCQSLRVLPVKGKRSMKVLTRTHRWWKIKDQDVEIPSMTYESVGKYLGIMIDPAGKIALPIEEWKLWLTRLRECKLKPDQKVSVLKEIVCARTNYILRMSGCGICELRRWSRFVRGWVKSIIHFPAWCNSEWMHSSKGLGIPDVVSGIAIQRMRAAEKMAKSTDGVVRVVGARIVQTTRVLWKRAGLAGIELDAARKFCEVKRVNKIGNQTNGGALKTIAESSVNRHWLLEKNIRPGNKILVWKAMAGVIPTKINLSRGKADQTLKKCRCCGLTAETDGHILSGCPTSRDAYSKRHNLLCDKLARELKLKGGPSRRVWRERMCLSRDGRSYKPDIVVKDDGVITVIDMACPYEKSERYLSHCEEAKVAKYEPLKLDRSWTQEIEGNHGRSADKVEVVGIAVGAVGTIIRKTQRILSKLKLAKVGRPLQIIACNESAKIIRRHLSGSRLINLR

SEQ ID NO: 20236 - protein, 1126 aa, Bombus breviceps
MSNNDKASEATPLGLGGAVADLSAPEGTNDDGLATSLDNVKILVPLAGDQIACPICENREIHLYFMTLQDLDSHIKEHHIETPVQCGCAKCIKSFPKLHGAQCHIPKCRNLTDNPEGQFRCGACPRSFGSQRGLSTHERHAHPAVRNIKRRGTDPPSDTASGRAWKAEEIALLKELDITYRDHRFPNIEISKILTTKTAEQIRYKRKALKITNLEGDLQEEIFTTEGGCDLVEPFVESVSHEICVNSETTVHEWKQSLANEIERQAEVPPILRDAYTKLKEIWDQGKENFNELTSRIDDYIEKILYGALTDKNKRAKDRPPKRNINKSSQKANRNQKRRYSYARCQEIFRECPSKLAEAITNNNLAYLEPVKAPPDAVAVKQLYEALWGRTGPTNLEYLRKEASELPLSEFFEPITIEEIGEKIRKIKNKTAAGPDGLQKENLSTPGLPVILAKLFNILWYSSYFPTAWKVNRTTLIPKANKDTNMVENWRPITIGPILGRMFSSILDGRIRRGIVQNIRQKGFTAENGCKINIDLMNAALNYCKRNQGGVFTIVDISKAFDTIPHEAIELCLARKGIPAPIANIIKNMYNGCKTTVKAKNDTRVEIEILRGVKQGDPLSPLLFNLCLEPLLDEIERSTRGMKINEHNKVSVLAFADDIVLLGEDEREAQRQMDELHGYLDRLGMKISPEKSQAFQVKTKKDTWFVQDPYLTAKGIKIPGVDPDQAFRYLGAKIGPWKGVHCGIIVPEILSMVRRVRKLPLKPCQKIELLTKYIYPRYIYNLLINPPSDSVLKLLDSEVRQEIKAILHLTPSTATGFFYAPRNYGGLGLPRYEHIVKLGTLKSAINIKNSKDPAAASLIGGEEDTKLKKIANSLRINWPATLDDIEKAKKRLKGQHIKEWAELKSQGQGVPDFAKEKIGNVWLREYHLLKPSRFIDALRMRTNTFGTRTALARANKNMDITCRRCQAQPETLGHILGLCQFTKGLRIKRHDEVKNFMAEKLRERNEVFVEPTITVRGNRYKPDLVIKNEERLLVVDVTVRYENRDYLLKASKEKTDKYLPCLNHLKAKFGLEKGKTAPIVLGSRGAITTETKENLIEMGFSKSDIKTIVINVLRSSIEIGNIFLDG

SEQ ID NO: 20237 - protein, 1129 aa, Bombus hypnorum
MNRNIKASDAAPLSPGGVVADLSAPEGTQGDNTGASPDMILVPLMGNEVACPICERREIHLLFMNLSDLDRHFNEHHVEVPIKWVCRECRRCFHKLHGVRCHIPKCSGSTQASEGRFGCGVCSMRFESQRGLSTHERHAHPAVRNIKRRGTDPPSVASGRAWKAEEVALLKELDAIYRDHRFPNIEISKILTTKTAEQIRHKRKTLRNIETEGNLQEEASTTEGGCDLVEPFGVTESQERIVNNDEMVREWHQSLINEIEKPAEVPPVLREVHALLCKIWEDRNSNREALKTELEKFLVEDLNRALRDKTEKPQGNKVSSQNRKRTRPAKRSKKVLRNYKKKYTYARCQELYNECPRKLAEAIINNDTSCLEPAKQPPEANEIRRLYNGLWGRTGPTNIEIFEESESELPLSDYFGPITVGEVEDKIKKLRKKSAAGLDGLTKENLLIPGLSAILAKFFNMQWFSSYFPTSWKENRTTLIPKPNKSSSNVENWRPITISSILSRMFSSILDGRLRSGITQNVRQKGFTSESGCKLNIELMNAALDHCKRNQGGVFTIVDISKAFDTIPHAALRPCLARKGVPAPIIDMIVGMYVKVKTIIKGKDDMGVEIDILRGVKQGDPLSPLLFNLCLEPLIESISEKTGGININDRNKIPVLAFADDIVLLGGDRREAQRQMDELHRYLETLGMNISIDKSQTFQIVTKKDTWFVDDPRIKVGSRSIPQVNPEEAFRYLGAKIGPWKGVHCGIAVPEILSMVRRVRKLALKPCQKIELLTKFIFPRFIYQLLVNPPGDGVLKLMDSEVRQEIKAILHLVPSTATGFFYAPKNFGGLGLPRFEHIIKLGTLRSALKMKGSADPAAASLIDEGADKKLKRIANSLRINWPATFEDIEKASKRLKGEHVRQWAELRSQGQGVADFAKEKLGNIWLKEHNLLKPSRFIDALRFRTNTFGTRTTLARTKRDMDVTCRRCQAQPETLGHILGLCQFTKGLRIKRHDEAKTFLANKLRESNEVFVEPSINVRGSLYKPDLVIKNEERILIVDVTVRYENKDYLQRAFKEKVDKYRSCLSLLKSTYGRAEGSILPVVLGSRGAIPTRTREILEELGLNKSEIKTIVMNVLRSSIEMANIFLDG

SEQ ID NO: 20238 - protein, 1004 aa, Bombus soroeensis
MGDKVICPVCEKKKIHNYFMNLTDLDRHLNEHHTDSPINWGCYKCRRCFLKLHGVRCHIPKCSENTQTSEGRYRCDACPMSFGSQRGLSTHERHAHPAIRNIKRRGTDPPEQSGRWTADEVALLRELDTKYKNYKYPNVEISKILTTKTAEQIRSKRKTLKTASTDGDPQEGGQEAEGGCDLAEPFMASAEYTNAEMVLEWKQSLIKEIEKLAEVPPILRDIYSQLMNNWEQYNSNKETLTGKLDEFQNSLYGALKGKIEKTLIKKSSHKNKNKKSRRNYRKKFSFARCQEIFTECPKKLADAIINNDSAAGPDGLIKENLQKPGLPVVLAKYFNMLLYSSHFPTAWKENRTTLIPKPNKDLSMVENWRPITIGSVLGRLFSSILDGRLRGGITQNIRQKGFTSESGCKINIDLFKTALDHCKRTKGGVFTIVDISKAFDTIPHSAIGPCLARKGVPTPIIDLIINMYKNVKTKIKAKDQIGVDINILRGVKQGDPLSPLIFNLCLEPLIESINSNTGGVNISERHKIPVLAFADDIVLLGENQREAQRQVDELLKYLDDLGMNVSIEKCRTFQVITKKDTWYISDPDIKMKDLKVPGIDPDEVFRYLGAKMGPWKGVHCGIAVPEILSMVRRVRKLPLKPGQKIELLIKYIFPRFIYHLLINPPGDVVLRLMDSEIRQEIKLILHLVPSTATGFFYAPKNFGGLGLPRFEHIIKIGTLRGALKMKDSIDPAAVSMLNEDTDRRLKRIANSLRINWPATLEDIEKANKRIKGEHIKQWAELQSQGQGVADFAKEKLGNVWLREYNLLKPSRFIDALIFRTNTFGTRTTLARANKNIDVMCRRCRAQPETLGHVLGLCQYTKGLRIKRHDEVKNLLANKLRETNEVFVEPTIKVGDSLYKPDLVIKNEERILVVDVTVRYENRDYLQRAHQEKVDKYRVCLNHLKSIYGQEKGAIMPVVLGSRGALPTKTKDILYGLGLNKSDIKTIIMNVLRSSIEMANIFLDG

SEQ ID NO: 20239 - protein, 1129 aa, Bombus hypnorum
MNRNIKASDAAPLSPGGVVADLSAPEGTQGDNTGASPDMILVPLMGNEIACPICERREIHLLFMNLSDLDRHFNEHHVEVPIKWVCRECRRCFHKLHGVRCHIPKCSGSTQASEGRFGCGVCSMRFESQRGLSTHERHAHPAVRNIKRRGTDPPSVASGRAWKAEEVALLKELDAIYRDHRFPNIEISKILTTKTAEQIRHKRKTLKNIETEGNLQEEASTTEGGCDLVEPFGVTESQERIVSNDEMVREWHQSLINEIEKPAEVPPVLREVHALLCKIWEDRNSNREALKTELEKFLVEDLNRALRDKTEKPQGNKVSSQNRKRTRPAKRSKKVLRNYKKKYTYARCQELYNECPRKLAEAIINNDTSCLEPAKQPPEANEIRRLYNGLWGRTGPTNIEIFEKSESELPLSDYFGPITVGEVEDKIKKLRKKSAAGLDGLTKENLLIPGLSAILAKFFNMLWFSSYFPTSWKENRTTLIPKPNKSSSNVENWRPITISSILSRMFSSILDGRLRSGITQNVRQKGFTSESGCKLNIELMNAALDHCKRNQGGVFTIVDISKAFDTIPHAALRPCLARKGVPAPIIDMIVGMYVKVKTIIKGKDDMGVEIDILRGVKQGDPLSPLLFNLCLEPLIESISEKTGGININDRNKIPVLAFADDIVLLGGDRREAQRQMDELHRYLETLGMNISIDKSQTFQIVTKKDTWFVDDPRIKVGSRSIPQVNPEEAFRYLGAKIGPWKGVHCGIAVPEILSMVRRVRKLALKPCQKIELLTKFIFPRFIYQLLVNPPGDGVLKLMDSEVRQEIKAILHLVPSTATGFFYAPKNFGGLGLPRFEHIIKLGTLRSALKMKGSADPAAASLIDEGADKKLKRIANSLRINWPATFEDIEKASKRLKGEHVRQWAELRSQGQGVADFAKEKLGNIWLKEHNLLKPSRFIDALRFRTNTFGTRTTLARTKRDMDVTCRRCQAQPETLGHILGLCQFTKGLRIKRHDEAKTFLANKLRESNEVFVEPSINVRGSLYKPDLVIKNEERILIVDVTVRYENKDYLQRAFKEKVDKYRSCLSLLKSTYGRAEGSILPVVLGSRGAIPTRTREILEELGLNKSEIKTIVMNVLRSSIEMANIFLDG

SEQ ID NO: 20240 - protein, 1129 aa, Bombus hypnorum
MNRNIKASDAAPLSPGGVVADLSAPEGTQGDNTGASPDMILVPLMGNEIACPICERREIHLLFMNLSDLDRHFNEHHVEVPIKWVCRECRRCFHKLHGVRCHIPKCSGSTQASEGRFGCGVCSMRFESQRGLSTHERHAHPAVRNIKRRGTDPPSVASGRAWKAEEVALLKELDAIYRDHRFPNIEISKILTTKTAEQIRHKRKTLRNIETEGNLQEEASTTEGGCDLVEPFGVTESQERIVNNDEMVREWHQSLINEIEKPAEVPPVLREVHALLCKIWEDRNSNREALKTELEKFLVEDLNRALRDKTEKPQGNKVSSQNRKRTRPAKRSKKVLRNYKKKYTYARCQELYNECPRKLAEAIINNDTSCLEPAKQPPEANEIRRLYNGLWGRTGPTNIEIFEKSESELPLSDYFGPITVGEVEDKIKKLRKKSAAGLDGLTKENLLIPGLSAILAKFFNMLWFSSYFPTSWKENRTTLIPKPNKSSSNVENWRPITISSILSRMFSSILDGRLRSGITQNVRQKGFTSESGCKLNIELMNAALDHCKRNQGGVFTIVDISKAFDTIPHAALRPCLARKGVPAPIIDMIVGMYVKVKTIIKGKDDMGVEIDILRGVKQGDPLSPLLFNLCLEPLIESISEKTGGININDRNKIPVLAFADDIVLLGGDRREAQRQMDELHRYLETLGMNISIDKSQTFQIVTKKDTWFVDDPRIKVGSRSIPQVNPEEAFRYLGAKIGPWKGVHCGIAVPEILSMVRRVRKLALKPCQKIELLTKFIFPRFIYQLLVNPPGDGVLKLMDSEVRQEIKAILHLVPSTATGFFYAPKNFGGLGLPRFEHIIKLGTLRSALKMKGSADPAAASLIDEGADKKLKRIANSLRINWPATFEDIEKASKRLKGEHVRQWAELRSQGQGVADFAKEKLGNIWLKEHNLLKPSRFIDALRFRTNTFGTRTTLARTKRDMDVTCRRCQAQPETLGHILGLCQFTKGLRIKRHDEAKTFLANKLRESNEVFVEPSINVRGSLYKPDLVIKNEERILIVDVTVRYENKDYLQRAFKEKVDKYRSCLSLLKSTYGRAEGSILPVVLGSRGAIPTRTREILEELGLNKSEIKTIVMNVLRSSIEMANIFLDG

SEQ ID NO: 20241 - protein, 1129 aa, Bombus hypnorum
MNRNIKASDAAPLSPGGVVADLSAPEGTQGDNTGASPDMILVPLMGNEIACPICERREIHLLFMNLSDLDRHFNEHHVEVPIKWVCRECRRCFHKLHGVRCHIPKCSGSTQASEGRFGCGVCSMRFESQRGLSTHERHAHPAVRNIKRRGTDPPSVASGRAWKAEEVALLKELDAIYRDHRFPNIEISKILTTKTAEQIRHKRKTLRNIETEGNLQEGASTTEGGCDLVEPFGVTESQERIVNNDEMVREWHQSLINEIEKPAEVPPVLREVHALLCKIWEDRNSNREALKTELEKFLVEDLNRALRDKTEKPQGNKVSSQNRKRTRPAKRSKKVLRNYKKKYTYARCQELYNECPRKLAEAIINNDTSCLEPAKQPPEANEIRRLYNGLWGRTGPTNIEIFEKSESELPLSDYFGPITVGEVEDKIKKLRKKSAAGLDGLTKENLLIPGLSAILAKFFNMLWFSSYFPTSWKENRTTLIPKPNKSSSNVENWRPITISSILSRMFSSILDGRLRSGITQNVRQKGFTSESGCKLNIELMNAALDHCKRNQGGVFTIVDISKAFDTIPHAALRPCLARKGVPAPIIDMIVGMYVKVKTIIKGKDDMGVEIDILRGVKQGDPLSPLLFNLCLEPLIESISEKTGGININDRNKIPVLAFADDIVLLGGDRTEAQRQMDELHRYLETLGMNISIDKSQTFQIVTKKDTWFVDDPRIKVSSRSIPQVNPEEAFRYLGAKIGPWKGVHCGIAVPEILSMVRRVRKLALKPCQKIELLTKFIFPRFIYQLLVNPPGDGVLKLMDSEVRQEIKAILHLVPSTATGFFYAPKNFGGLGLPRFEHIIKLGTLRSALKMKGSADPAAASLIDEGADKKLKRIANSLRINWPATFEDIEKASKRLKGEHVRQWAELRSQGQGVADFAKEKLGNIWLKEHNLLKPSRFIDALRFRTNTFGTRTTLARTKRDMDVTCRRCQAQPETLGHILGLCQFTKGLRIKRHDEAKTFLANKLRESNEVFVEPSINVRGSLYKPDLVIKNEERILIVDVTVRYENKDYLQRAFKEKVDKYRSCLSLLKSTYGRVEGSILPVVLGSRGAIPTRTREILEELGLNKSEIKTIVMNVLRSSIEMANIFLDG

SEQ ID NO: 20242 - protein, 1129 aa, Bombus hypnorum
MNRNIKASDAAPLSPGGVVADLSAPEGTQGDNTGASPDMILVPLMGNEIACPICERREIHLLFMNLSDLDRHFNEHHVEVPIKWVCRECRRCFHKLHGVRCHIPKCSGSTQASEGRFGCGVCSMRFESQRGLSTHERHAHPAVRNIKRRGTDPPSVASGRAWKAEEVALLKELDAIYRDHRFPNIEISKILTTKTAEQIRHKRKTLRNIETEGNLQEEASTTEGGCDLVEPFGVTESQERTVNNDEMVREWHQSLINEIEKPAEVPPVLREVHALLCKIWEDRNSNREALKTELEKFLVEDLNRALRDKTEKPQGNKVSSQNRKRTRPAKRSKKVLRNYKKKYTYARCQELYNECPRKLAEAIINNDTSCLEPAKQPPEANEIRRLYNGLWGRTGPTNIEIFEKSESELPLSDYFGPITVGEVEDKIKKLRKKSAAGLDGLTKENLLIPGLSAILAKFFNMLWFSSYFPTSWKENRTTLIPKPNKSSSNVENWRPITISSILSRMFSSILDGRLRSGITQNVRQKGFTSESGCKLNIELMNAALDHCKRNQGGVFTIVDISKAFDTIPHAALRPCLARKGVPAPIIDMIVEMYVKVKTIIKGKDDMGVEIDILRGVKQGDPLSPLLFNLCLEPLIESISEKTGGININDRNKIPVLAFADDIVLLGGDRREAQRQMDELHRYLETLGMNISIDKSQTFQIVTKKDTWFVDDPRIKVGSRSIPQVNPEEAFRYLGAKIGPWKGVHCGIAVPEILSMVRRVRKLALKPCQKIELLTKFIFPRFIYQLLVNPPGDGVLKLMDSEVRQEIKAILHLVPSTATGFFYAPKNFGGLGLPRFEHIIKLGTLRSALKMKGSADPAAASLIDEGADKKLKRIANSLRINWPATFEDIEKASKRLKGEHVKQWAELRSQGQGVADFAKEKLGNIWLKEHNLLKPSRFIDALRFRTNTFGTRTTLARTKRDMDVTCRRCQAQPETLGHILGLCQFTKGLRIKRHDEAKTFLANKLRESNEVFVEPSINVWGSLYKPDLVIKNEERILIVDVTVRYENKDYLQRAFKEKVDKYRSCLSLLKSTYGRAEGSILPVVLGSRGAIPTRTREILEELGLNKSEIKTIVMNVLRSSIEMANIFLDG

SEQ ID NO: 20243 - protein, 1129 aa, Bombus hypnorum
MNRNIKASDAAPLSPGGVVADLSAPEGTQGDNTGASPDMILVPLMGNEIACPICERREIHLLFMNLSDLDRHFNEHHVEVPIKWVCRECRRCFHKLHGVRCHIPKCRGSTQASEGRFGCGVCSMRFESQRGLSTHERHAHPAVRNIKRRGTDPPSVASGRAWKAEEVALLKELDAIYRDHRFPNIEISKILTTKTAEQIRHKRKTLRNIETEGNLQEGASTTEGGCDLVEPFGVTESQERIVNNDEMVREWHQSLINEIEKPAEVPPVLREVHALLCKIWEDRNSNREALKTELEKFLVEDLNRALRDKTEKPQGNKVSSQNRKRTRPAKRSKKVLRNYKKKYTYARCQELYNECPRKLAEAIINNDTSCLEPAKQPPEANEIRRLYNGLWGRTGPTNIEIFEKSESELPPSDYFGPITVGEVEDKIKKLRKKSAAGLDGLTKENLLIPGLSAILAKFFNMLWFSSYFPTSWKENRTTLIPKPNKSSSNVENWRPITISSILSRMFSSILDGRLRSGITQNVRQKGFTSESGCKLNIELMNAALDHCKRNQGGVFTIVDISKAFDTIPHAALRPCLARKGVPAPIIDMIVGMYVKVKTIIKGKDDMGVEIDILRGVKQGDPLSPLLFNLCLEPLIESISEKTGGININDRNKIPVLAFADDIVLLGGDRREAQRQMDELHRYLETLGMNISIDKSQTFQIVTKKDTWFVDDPRIKVGSRSIPQVNPEEAFRYLGAKIGPWKGVHCGIAVPEILSMVRRVRKLALKPCQKIELLTKFIFPRFIYQLLVNPPGDGVLKLMDSEVRQEIKAILHLVPSTATGFFYAPKNFGGLGLPRFEHIIKLGTLRSALKMKGSADPAAASLIDEGADKKLKRIANSLRINWPATFEDIEKASKRLKGEHVRQWAELRSQGQGVADFAKEKLGNIWLKEHNLLKPSRFIDALRFRTNTFGTRTTLARTKRDMDVTCRRCQAQPETLGHILGLCQFTKGLRIKRHDEAKTFLANKLRESNEVFVEPSINVRGSLYKPDLVIKNEERILIVDVTVRYENKDYLQRAFKEKVDKYRSCLSLLKSTYGRAEGSILPVVLGSRGAIPTRTREILEELGLNKSEIKTIVMNVLRSSIEMANIFLDG

SEQ ID NO: 20244 - protein, 1129 aa, Bombus hypnorum
MNRNIKASDAAPLSPGGVVADLSAPEGTQGDNTGASPDVILVPLMGNEIACPICERREIHLLFMNLSDLDRHFNEHHVEVPIKWVCRECRRCFHKLHGVRCHIPKCSGSTQASEGRFGCGVCSMRFESQRGLSTHERHAHPAVRNIKRRGTDPPSVASGRAWKAEEVALLKELDAIYRDHRFPNIEISKILTTKTAEQIRHKRKTLRNIETEGNLQEEASTTEGGCDLVEPFGVTESQERIVNNDEMVREWHQSLINEIEKPAEVPPVLREVHALLCKIWEDRNSNREALKTELEKFLVEDLNRALRDKTEKPQGNKVSSQNRKRTRPAKRSKKVLRNYKKKYTYARCQELYNECPRKLAEAIINNDTSCLEPAKQPPEANEIRRLYNGLWGRTGPTNIEIFEKSESELPLGDYFGPITVGEVEDKIKKLRKKSAAGLDGLTKENLLIPGLSAILAKFFNMLWFSSYFPTSWKENRTTLIPKPNKSSSNVENWRPITISSILSRMFSSILDGRLRSGITQNVRQKGFTSESGCKLNIELMNAALDHCKRNQGGVFTIVDISKAFDTIPHAALRPCLARKGVPAPIIDMIVGMYVKVKTIIKGKDDMGVEIDILRGVKQGDPLSPLLFNLCLEPLIESISEKTGGININDRNKIPVLAFADDIVLLGGDRREAQRQMDELHRYLETLGMNISIEKSQTFQIVTKKDTWFVDDPRIKIGSRSIPQVNPEEAFRYLGAKIGPWKGVHCGIAVPEILSMVRRVRKLALKPCQKIELLTKFIFPRFIYQLLVNPPGDGVLKLMDSEVRQEIKAILHLVPSTATGFFYAPKNFGGLGLPRFEHIIKLGTLRSALKMKGSADPAAASLIDEGADKKLKRIANSLRINWPATFEDIEKASKRLKGEHVRQWAELRSQGQGVADFAKEKLGNIWLKEHNLLKPSRFIDALRFRTNTFGTRTTLARTKRDMDVTCRRCQAQPETLGHILGLCQFTKGLRIKRHDEAKTFLANKLRESNEVFVEPSINVRGSLYKPDLVIKNEERILIVDVTVRYENKDYLQRAFKEKVDKYRSCLSLLKSTYGRAEGSILPVVLGSRGAIPTRTREILEELGLNKSEIKTIVMNVLRSSIEMANIFLDG

SEQ ID NO: 20245 - protein, 1129 aa, Bombus hypnorum
MNRNIKASDAAPLSPGGVVADLSAPEGTQGDNTGASPDMILVPLMGNEIACPICERREIHLLFMNLSDLDRHFNEHHVEVPIKWVCRECRRCFHKLHGVRCHIPKCSGSTQASEGRFGCGVCSMRFESQRGLSTHERHAHPAVRNIKRRGTDPPSVASGRAWKAEEVALLKELDAIYRDHRFPNIEISKILTTKTAEQIRHKRKTLRNIETEGNLQEEASTTEGGCDLVEPFGVTESQERIVNNDEMVREWHQSLINEIEKPAEVPPVLREVHALLCKIWEDRNSNREALKTELEKFLVEDLNRALRDKTEKPQGNKVSSQNRKRTRPAKRSKKVLRNYKKKYTYARCQELYNECPRKLAEAIINNDTSCLEPAKQPPEANEIRRLYNGLWGRTGPTNIEIFEESESELPLSDYFGPITVGEVEDKIKKLRKKSAAGLDGLTKENLLIPGLSAILAKFFNMLWFSSYFPTSWKENRTTLIPKPNKSSSNVENWRPITISSILSRMFSSILDGRLRSGITQNVRQKGFTSESGCKLNIELMNAALDHCKRNQGGVFTIVDISKAFDTIPHAALRPCLARKGVPAPIIDMIVGMYVKVKTIIKGKDDMGVEIDILRGVKQGDPLSPLLFNLCLEPLIESISEKTGGINISDRNKIPVLAFADDIVLLGGDRREAQRQMDELHRYLETLGMNISIDKSQTFQIVTKKDTWFVDDPRIKVGSRSIPQVNPEEAFRYLGAKIGPWKGVHCGIAVPEILSMVRRVRKLALKPCQKIELLTKFIFPRFIYQLLVNPPGDGVLKLMDSEVRQEIKAILHLVPSTATGFFYAPKNFGGLGLPRFEHIIKLGTLRSALKMKGSADPAAASLIDEGADKKLKRIANSLRINWPATFEDIEKASKRLKGEHVRQWAELRSQGQGVADFAKEKLGNIWLKEHNLLKPSRFIDALRFRTNTFGTRTTLARTKRDMDVTCRRCQAQPETLGHILGLCQFTKGLRIKRHNEAKTFLANKLRESNEVFVEPSINVRGSLYKPDLVIKNEERILIVDVTVRYENKDYLQRAFKEKVDKYRSCLSLLKSTYGRAEGSILPVVLGSRGAIPTRTREILEELGLNKSEIKTIVMNVLRSSIEMANIFLDG

SEQ ID NO: 20246 - protein, 1129 aa, Bombus hypnorum
MNRNIKASDAAPLSPGGVVADLSAPEGTQGDNTGASPDMILVPLMGNEIACPICERREIHLLFMNLSDLDRHFNEHHVEVPIKWVCRECRRCFHKLHGVRCHIPKCSGSTQASEGRFGCGVCSMRFESQRGLSTHERHAHPAVRNIKRRGTDPPSVASGRAWKAEEVALLKELDAIYRDHRFPNIEISKILTTKTAEQIRHKRKTLRNIETEGNLQEEASTTEGGCDLVEPFGVTESQERIVNNDEMVREWHQSLINEIEKPAEVPPVLREVHALLCKIWEDRNSNREALKTELEKFLVEDLNRALRDKTEKPQGNKVSSQNRKRTRPAKRSKKVLRNYKKKYTYARCQELYNECPRKLAEAIINNDTSCLEPAKQPPEANEIRRLYNGLWGRTGPTNIEIFEKSESELPLSDYFGPITVGEVEDKIKKLRKKSAAGLDGLTKENLLIPGLSAILAKFFNMLWFSSYFPTSWKENRTTLIPKPNKSSSNVENWRPITISSILSRMFSSILDGRLRSGITQNVRQKGFTSESGCKLNIELMNAALDHCKRNQGGVFTIVDISKAFDTIPHAALRPCLARKGVPAPIIDMIVGMYVKVKTIIKGKDDMGVEIDILRGVKQGDPLSPLLFNLCLEPLIESINEKTGGININDRNKIPVLAFADDIVLLGGDRREAQRQMDELHRYLETLGMNISIDKSQTFQIVTKKDTWFVDDPRIKVGSRSIPQVNPEEAFRYLGAKIGPWKGVHCGIAVPEILSMVRRVRKLALKPCQKIELLTKFIFPRFIYQLLVNPPGDGVLKLMDSEVRQEIKAILHLVPSTATGFFYAPKNFGGLGLPRFEHIIKLGTLRSALKMKGSADPAAASLIDEGADKKLKRIANSLRINWPATFEDIEKASKRLKGEHVRQWAELRSQGQGVADFAKEKLGNIWLKEHNLLKPSRFIDALRFRTNTFGTRTTLARTKRDMDVTCRRCQAQPETLGHILGLCQFTKGLRIKRHDEAKTFLANKLRESNEVFVEPSINVRGSLYKPDLVIKNEERILIVDVTVRYENKDYLQRAFKEKVDKYRSCLSLLKSTYGRAEGSILPVVLGSRGAIPTRTREILEELGLNKSEIKTIVMNVLRSSIEMANIFLDG

SEQ ID NO: 20247 - protein, 1129 aa, Bombus hypnorum
MNRHIEASDAAPLSPGGVVADLSAPEGTQGDNTGASPDMILVPLMGNEITCPICERREVHLLFMNLSDLDRHFNEHHVEVPIKWVCRECRRCFHKLHGVRCHIPKCSGSTQASEGRFGCGVCSMRFESQRGLSTHERHAHPAVRNSKRRGTDPPSVASGRAWKAEEVALLKELDAIYRDHRFPNIEISKILTTKTAEQIRHKRKTLRNIETEGNLQEEASTTEGGCDLVEPFVVIESQERIVNNDEMVREWHQSLINEIEIPAEVPPVLREVHALLCKIWEDRNSDREALKTKLDKFLIEDLNRALRDKREKHQGNQVSSQNRNRTRPAKRSKKVLRNYKKKYTYARCQELYNECPRKLAEAIINNDTSCLEPAKQPPEANEIRRLYNGLWGRTGPTNIEVFEKSESELPLSDYFGPITVEEVEDRIKKLRKKSAAGLDGLTKENLLIPGLSAILAKFFNMLWFSSYFPTSWKENRTTLIPKPNKSPSSVENWRPITISSILSRMFSSILDGRLRSGITQNIRQKGFTSESGCKLNIELMNAALDHCKRNQGGVFTIVDISKAFDTIPHAALRPCLARKGVPAPIIDIIVEMYVKVKTIIKGKDDMGVEIDILRGVKQGDPLSQLLFNLCLEPLIESISEKTGGININNRNKIPVLAFADDIVLLGGDRREAQRQMDELHRYLETLGMNISIDKSQTFQIITKKDTWFIEDPKIKVGSGSIPQVNPEEAFRYLGAKIGPWKGVHCGIAVPEILSMVRRVRKLALKPCQKIELLTKYIFPRFIYQLLVNPPGDGVLKLMDSEVRQEIKAILHLVPSTATGFFYAPKNFGGLGLPRFEHIIKLGTLRSALKMKGSADPAAASLIDEGTDKKLKRIANSLRINWPATFEDIEKASKRLKGEHVRQWAELRSQGQGVADFAKEKLGNIWLKEHNLLKPSRFIDALRFRTNTFGTRTTLARTKRDMDVTCRRCHAQPETLGHILGLCQFTKGLRIKRHDEAKTFLANKLRESNEVFVEPSINVRGSLYKPDLVIKNEERILIVDVTVRYENKDYLQRAFKEKVDKYRSCLSLLKSTYGRAEGSILPVVLGSRGAIPTRTREILEELGLNKSKIKTIVMNVLRSSIEMANIFLDG

SEQ ID NO: 20248 - protein, 1129 aa, Bombus hypnorum
MNRNIEASDAAPLSPGGVVADLSAPEGTQGDNTGASPDMILVPLMGNEIACPICERREIHLLFMNLSDLDRHFNEHHVEVPIKWVCRECRRCFHKLHGVRCHIPKCSGSTQANEGRFGCGVCSMRFESQRGLSTHERHAHPAVRNSKRRGTDPPSVASGRAWKAEEVALLKELDAIYRDHRFPNIEISKILTTKTAEQIRHKRKTLRNIETEGNLQEEASTTEGGCDLVEPFVVIESQERIVNNDEMVREWHQSLINEIEKPAEVPPVLREVHALLCKIWEDRNSNREALKTELEKFLVEDLNRALRDKTEKPQGNQVSSQNRKRTRPAKRSKKVLRNYKKKYTYARCQELYNECPRKLAEAIINNDTSCLEPAKQPPEANEIRRLYNGLWGRTGPTNIEIFEKSESELPLSDYFGPITVGEVEDKIKKLRKKSAAGLDGLTKENLLIPGLSAILAKFFNMLWFSSYFPTSWKENRTTLIPKPNKSSSSVENWRPITISSILSRMFSSILDGRLRSGITQNIRQKGFTSESGCKLNIELMNAALDHCKRNQGGVFTIVDISKAFDTIPHAALRPCLARKGVPAPIIDMIVEMYVKVKTIIKGKDDMGVEIDILRGVKQGDPLSPLLFNLCLEPLIESISEKTGGININNRNKIPVLAFADDIVLLGGDRREAQRQMDELHRYLETLGMNISIDKSQTFQIITKKDTWFVDDPRIKVGSRSIPQVNPEEAFRYLGAKIGPWKGVHCGIAVPEILSMVRRVRKLALKPCQKIELLTKYIFPRFIYQLLVNPPGDGVLKLMDSEVRQEIKAILHLVPSTATGFFYAPKNFGGLGLPRFEHIIKLGTLRSALKMKGSADPAAASLIDEGTDKKLKRIANSLRINWPATFEDIEKASKRLKGEHVRQWAELRSQGQGVADFAKEKLGNIWLKEHNLLKPSRFIDALRFRTNTFGTRTTLARTKRDMVVTCRRCHAQPETLGHILGLCQFTKGLRIKRHDEAKTFLANKLRESNEVFVEPSINVRGSLYKPDLVIKNEERILIVDVTVRYENKDYLQRAFKEKVDKYRSCLSLLKSTYGRAEGSILPVVLGSRGAIPTRTREILEELGLNKSEIKTIVMNVLRSSIEMANIFLDG

SEQ ID NO: 20249 - protein, 1129 aa, Bombus hypnorum
MNRNIKASDAAPLSPGGVVADLSAPEGTQGDNTGASPDMILVPLMGNEIACPICERREIHLLFMNLSDLDRHFNEHHVEVPIKWVCRECRRCFHKLHGVRCHIPKCSGSTQASEGRFGCGVCSMRFESQRGLSTHERHAHPAVRNIKRRGTDPPSVASGRAWKAEEVALLKELDAIYRDHRFPNIEISKILTTKTAEQIRHKRKTLRNIETEGNLQEEASTTEGGCDLVEPFGVTESQERIVNSDEMVREWHQSLINEIEKPAEVPPVLREVHALLCKIWEDRNSNREALKTELEKFLVEDLNRALRDKTEKPQGNKVSSQNRKRTRPAKRSKKVLRNYKKKYTYARCQELYNECPRKLAEAIINNDTSCLEPAKQPPEANEIRRLYNGLWGRTGPTNIEIFEKSESELSLSDYFGPITVGEVEDKIKKLRKKSAAGLDGLTKENLLIPGLSAILAKFFNMLWFSSYFPTSWKENRTTLIPKPNKSSSYVENWRPITISSILSRMFSSILDGRLRSGITQNVRQKGFTSESGCKLNIELMNAALDHCKRNQGGVFTIVDISKAFDTIPHAALRPCLARKGVPAPIIDMIVGMYVKVKTIIKGKDDMGVEIDILRGVKQGDPLSPLLFNLCLEPLIESISEKTGGININDRNKIPVLAFADDIVLLGGDRREAQRQMDELHRYLETLGMNISIDKSQTFQIVTKKDTWFVDDPRIKVGSRSIPQVNPEEAFRYLGAKIGPWKGVHCGIAVPEILSMVRRVRKLALKPCQKIELLTKFIFPRFIYQLLVNPPGDGVLKLMDSEVRQEIKAILHLVPSTATGFFYAPKNFGGLGLPRFEHIIKLGTLRSALKMKGSADPAAASLIDEGADKKLKRIANSLRINWPATFEDIEKASKRLKGEHVRQWAELRSQGQGVADFAKEKLGNIWLKEHNLLKPSRFIDALRFRTNTFGTRTTLARTKRDMDVTCRRCQAQPETLGHILGLCQFTKGLRIKRHDEAKTFLANKLRESNEVFVEPSINVRGSLYKPDLVIKNEERILIVDVTVRYENKDYLQRAFKEKVDKYRSCLSLLKSTYGRAEGSILPVVLGSRGAIPTRTREILEELGLNKSEIKTIVMNVLRSSIEMANIFLDG

SEQ ID NO: 20250 - protein, 1129 aa, Bombus hypnorum
MNRNIKASDAAPLSPGGVVADLSAPEGTQGDNTGASPDMILVPLMGNEIACPICERREIHLLFMNLSDLDRHFNEHHVEVPIKWVCRECRRCFHKLHGVRCHIPKCSGSTQASEGRFGCGVCSMRFESQRGLSTHERHAHPAVRNIKRRGTDPPSVASGRAWKAEEVALLKELDAIYRDHRFPNIEISKILTTKTAEQIRHKRKTLRNIETEGNLQEEASTTEGGCDLVEPFGVTESQERIVNSDEMVREWHQSLINEIEKPAEVPPVLREVHALLCKIWEDRNSNREALKTELEKFLVEDLNRALRDKTEKPQGNKVSSQNRKRTRPAKRSKKVLRNYKKKYTYARCQELYNECPRKLAEAIINNDTSCLEPAKQPPEANEIRRLYNGLWGRTGPTNIEIFEKSESELPLSDYFGPITVGEVEDKIKKLRKKSAAGLDGLTKENLLIPGLSAILAKFFNMLWFSSYFPTSWKENRTTLIPKPNKSSSNVENWRPITISSILSRMFSSILDGRLRSGITQNVRQKGFTSESGCKLNIELMNAALDHCKRNQGGVFTIVDISKAFDTIPHAALRPCLARKGVPAPIIDMIVGMYVKVKTIIKGKDDMGVEIDILRGVKQGDPLSPLLFNLCLEPLIESISEKTGGININDRNKIPVLAFADDIVLLGGDRREAQRQMDELHRYLETLGMNISIDKSQTFQIVTKKDTWFVDDPRIKVGSRSIPQVNPEEAFRYLGAKIGPWKGVHCGIAVPEILSMVRRVRKLALKPCQKIELLTKFIFPRFIYQLLVNPPGDGVLKLMDSEVRQEIKAILHLVPSTATGFFYAPKNFGGLGLPRFEHIIKLGTLRSALKMKGSADPAAASLIDEGADKKLKRIANSLRINWPATFEDIEKASKRLKGEHVRQWAELRSQGQGVADFAKEKLGNIWLKEHNLLKPSRFIDALRFRTNTFGTRTTLARTKRDMDVTCRRCQAQPETLGHILGLCQFTKGLRIKRHDEAKTFLANKLRESNEVFVEPSINVRGSLYKPDLVIKNEERILIVDVTVRYENKDYLQRAFKEKVDKYRSCLSLLKSTYGRAEGSILPVVLGSRGAIPTRTREILEELGLNKSEIKTIVMNVLRSSIEMANIFLDG

SEQ ID NO: 20251 - protein, 1129 aa, Bombus hypnorum
MNRNIKASDAAPLSPGGVVADLSAPEGTQGDNTGASPDMILVPLMGNEIACPICERREIHLLFMNLSDLDRHFNEHHVEVPIKWVCRECRRCFHKLHGVRCHIPKCSGSTQASEGRFGCGVCSMRFESQRGLSTHERHAHPAVRNIKRRGTDPPSVASGRAWKAEEVALLKELDAIYRDHRFPNIEISKILTTKTAEQIRHKRKTLRNIETEGNLQEEASTTEGGCDLVEPFGVTESQERIVNNDEMVREWHQSLINEIEKPAEVPPVLREVHALLCKIWEDRNSNREALKTELEKFLVEDLNRALRDKTEKPQGNKVSSQNRKRTRPAKRSKKVLRNYKKKYTYARCQELYNECPRKLAEAIINNDTSCLEPAKQPPEANEIRRLYNGLWGRTGPTNIEIFEKSESELPLSDYFGPITVGEVEDKIKKLRKKSAAGLDGLTKENLLIPGLSAILAKFFNMLWFSSYFPTSWKENRTTLIPKPNKSSSNVENWRPITISSILSRMFSSILDGRLRSGITQNVRQKGFTSESGCKLNIELMNAALDHCKRNQGGVFTIVDISKAFDTIPHAALRPCLARKGVPAPIIDMIVGMYVKVKTIIKGKDDMGVEIDILRGVKQGDPLSPLLFNLCLEPLIESISEKTGGININDRNKIPVLAFADDIVLLGGDRREAQRQMDELHRYLETLGMNISIDKSQTFQIVTKKDTWFVDDPRIKVGSRSIPQVNPEEAFRYLGAKIGPWKGVHCGIAVPEILSMVRRVRKLALKPCQKIELLTKFIFPRFIYQLLVNPPGDGVLKLMDSEVRQEIKAILHLVPSTATGFFYAPKNFGGLGLPRFEHIIKLGTLRSALKMKGSADPAAASLIDEGADKKLKRIANSLRINWPATFVDIEKASKRLKGEHVRQWAELRSQGQGVADFAKEKLGNIWLKEHNLLKPSRFIDALRFRTNTFGTRTTLARTKRDMDVTCRRCQAQPETLGHILGLCQFTKGLRIKRHDEAKTFLANKLRESNEVFVEPSINVRGSLYKPDLVIKNEERILIVDVTVRYENKDYLQRAFKEKVDKYRSCLSLLKSTYGRAEGSILPVVLGSRGAIPTRTREILEELGLNKSEIKTIVMNVLRSSIEMANIFLDG

SEQ ID NO: 20252 - protein, 1430 aa, Levipalatum texanum
MPPKATRGAATRGGRSGTTTRTTTATTGDDDEDEEFLPPSLSSSSGKIQRVSVPIAPVLTCETCSSSHQIRREYIRIEGLVKHLKSYHDVLPLYFCHGCGFEESLRKVRSHQKDCPLCSTPPAPGPVAISKRTGLPLNGSPPVRRQMRPRMPPTTTRGTRGSKGNQLPGRSRSRSPTSPRSTKPSPSPPTRTSPPPQVQAPSTSGRSSPSPRPPPSPCPVPSARASPRTSPRPSITPADSRSPPPPRRPALVRTRRLTVSPIPLRTTVAPSFSPSLSPIASLPPSPTLSEKLVLLGRLRSRDEDVDMDESTGRVSIADEGRLSIGDTTAEDDPMGADLNDSRIAAPAALEDGSIPSPTSSILTPMRPVVDHSVDHDQTPLSNIVGNQLAPDPSPDRSSLSGPLVFGGAAPNGGVTNTEAVIPAVYLAQEAKRRKDPRESPPIDSPIPPGRKKIRRREKAKSSGSSEDTVSIAVTARGGPSQKNTKRPPVPRPPRPPAPRRSPVARAPTATQSRWESRFLLCNSPGELDAAMEEWYEEIRAATPPDPSKRPPNPNSNKRKDPRKKTPLPRDQEAIRIQSLYRTDRPRAMRDIMDEQSPGCPVPLHDITTFFTNVHAQPGPSSGPVPLPTPPPPATSDPLLAEITAKEIWERLARTSDTSPGADGIRYPELKRADPGGIIMAALFRTSALLSYTPSSWKESTTILLLKKSSPTDLANYRPISLLPCLAKVYYSVLANRLTQWATGTGRLTRGQKGFLPYRCCAEHGFLLRSIIEDASRSQKKNASIAFLDLRNAFGSLSHESLIESLRWLGLSPSSIEVIERTLDGASTKFKTGLGTTNSIPIRSGVPQGSPLSPILFNLGIESLLRAAMGADPQGYPLHGHFIPPLAYADDIALVSSSSTGLAAQLKEVSSMATWAGLRFHPLKSASLTTKGKKTVPVPHLVQGNPIPSLGPGDHYQYLGVPVGTSIFPSGEKALEKMTSMVQRIDSSLLAPWQKADAVRTFVLSQLPFHLSHGHVPKAPLIRFDKELKRVAKRWLFLPQRASVEPLYISPGKGGLGFLPMALLADIATVSHGASLLHSLDPVVADLAHRSARETAGIRAKRLITTKECAQYLEGDCSPPFGTTTMDVSSTWSRLRLSTSRLKAKLPSLGWYSDPSGHLFASLSGSPLFLRGVQSRLTDAARTVLLKSLCAKPDQGKTYRATGVDWRVTNNFMVGGQYVAFGDWRFVHRARLNVLPLNASRPYARTTSDQRCRRCGYENQTLPHVLGHCNPHQVRVRERHDKVIARLLKGAKINPEHLRLDKRIPGSTSALRPDIVIYDEIGKTCQLIDIACPFANGPGALETAAEEKLTKYKPLADELKSRGFSVEIAAVIVGALGEWWTGNSKAINLLRIPHRFAQVMCRLASTDVLCHSRCLYASHVSGMDVLPVRSS

SEQ ID NO: 20253 - protein, 847 aa, Dufourea novaeangliae
MATLTSSEFPSQKLSRICRSTSVWQRDRIFEDLELYLREIFPSTQTNGKLASKIKPNISTNKRQARRAEYARTQRSWKRNPCNCLRAILKGKTLVEPPPKEVMFQFWRTIMTTRANTAPKSEAKRSVISDLWKPIVKEEIRISFPELTTCPGPDGVTARQLKAVPLEILSRIFNLFLLCGKLPNHLLKARTTLIPKKDRATNPEDCRPITVQSIITRAFHKVLARRLTNLIDLDPRQKAFLPKDGCAENIFDLDMILRHHRQNFKPLFMASMDIAKAFDLVSHNTINDTLHIMGLPSPMIDYIMDSYKSCTTRLKCGNEESDDIHPTCGVKQGDPLSPIIFNMVIDRLIRLIPPEVGVEVGGSHYNAFAFADDLIFVATTPNGLQLTIDVVSEFLAQCGLRVNATKSFTVSIKNVPHMKKSVVDRKTKFNCLGQCLPAIQREDEWKYLGVPFTPEGRTTTHPETQLEEALNKLTKAPLKPQQRLFVLRVIVLPGMYHLLTLGNTTLSRLKKLDSMARAAVRKWLNLPHDTVNAYFHANVRDGGLSIPSMRWLMPLHRRERIQKLIKPDQPTDAYLSLELQRTIRRLTQNRLDIDNSDKLQKRWARLLHSSVDGKGLRESNKVPQQHQWVVEGSRFLSGRDFVNTMKLRINAMPTRSRLSRGRLNNRMCRGGCNAVETLNHVLQQCHRTHKARIERHDAIVAYVKRALQKSHQQIDIEPRFETAQGLRKPDLIAKQGNTALVFDAQMIGEHMDLNTAHGNKTEKYKPLTDSIKSRYAVDSVSFKTATLSYRGVWSASSANDLINRSIIKKKELKIISTRVLVGGLNSFWRFNRTTSSVRHLASRTGIG

SEQ ID NO: 20254 - protein, 884 aa, Andrena haemorrhoa
MENDSQGQDQPDLPESNEEPLALNVTSQISPINEYFAKLEPLNITEFQADHLNRICSSTSAWPLCRIFEELEIYLLETFPPTTKQRISGSEPEPVLTKRKARRAEYAKTQRAWTKNPSNCLRFILKGKSMANPPAKEDMVNFWRTTMTNGTNESPENETRRPVIWELWRPISPGEIKGSFPELSTSPGPDGLTSRQLRAVPLPILARVFNLFILSGKLPKHLLKARTTLIPKKDGTLKPEDYRPITVQSTMTRTFHKILARRLTQMVDLDQRQKAFVPTDGCAENIFDLDMILKYHRQNFKPLYMASTDIAKAFDSVSHKTIRDTLHIMGLPNPMVEYIMDSYERSSTILTCGDWESDEIRPTCGVKQGDPLSPILFNMVIDRLLSLIPPEIGVDVGGDHYNALAFADDLIFMATTPNGLQITINTMADFLSKCGLQINAAKSFTVSIRNVPHVKKSVVDGKVKFTCLGRTLPALKREDEWRYLGVPFTPEGRTIASPEIQLKEALDKLTKAPLKPQQRLFGLRTMVLPGLYHLLTLGGTTLSRLKKVDIMTRTAVRKWLNLPHDVVNAYFHANVKDGGLSMPAMRWLMPLHRRKRLLKRVREGQPTDPYLSLEIQRTIRRLTEHGNDMDTLDKLEKRWAELLHSSIDGKGLRESRKVPQQHKWVTEGNRFFSGKDFINAIKLRANALPTRSRTSRGRRSNRQCRAGCNAVETTYHVLQQCYRTHKARIERHNAVVSYLKRALGKTWKRVEEEPRFETPEGIRKPDLVAIKGTAAMVIDAQVVSEHLDLAVAHENKVEKYRPLESAIKDRYVVQDVFFTSATLSYRGVWSVESVNDLIGKKVLKKSELKIVSTRVLVGGLSSFWRFNRMTTAVRRTALQRTGVG

SEQ ID NO: 20255 - protein, 746 aa, Ancistrocerus nigricornis
MVRFWSTVMTSGVNESPGNDTRRPMIPSIWEPIEKGEIEKAFPEQSTSPGPDGITARQLRAVPLEILHRIFNLFMLCGKLPKHLLVARTTLIPKKEGAQSPDEFRPITVQSVITRTFHKILARRLVDKIDLDRRQKAFLPVDGCAENIFDLDLLLKYHRQYFKTMYVASMDIAKAFDAVSHKTIRDTLVVMGIPSPMVSYVMDTYKRGTTTLTCGTWESDSIIPTCGVKQGDPLSPMVFNMVIDRLLRALPPEIGVDVGGTHYNAFAFADDLIFVAATPGGLQRSIDIAADYLAQCGLNISATKSFTVAIRNVPHKKKSVVDGKAKFTCRGRQLPALRREDEWKYLGVPFTPEGRTTVQPENRLSEALEKLSSAPLKPQQRLFALRVIVLPGLYHLLTLGNTTLSRLKKVDITVRAAVRKWLNLPHDTTNAYFHANVKDGGLSIPSMRWLMPLHRRARLQRLVRVGQPADPYLALEIQRATRRLTENRQDVGTEERLEKRWAQVLHSSVDGKGLRESRQVPQQHQWLTNGSRFLSGRDFVNAAKLRINAMPTKSRTARGRRKDRLCRAGCNAVETLYHVIQQCHRTHRARLERHNAVIKYVKRALGKVSDIVFEEPHFQTTEGLRKPDLIAKAGDTALVLDAQVVSEHLDLTTAHKNKIEKYRPLDGAIREKYNVRHVTFLSATLSYRGVWSAASANELTERSILKKSELRVISARVLVGGLNSFWRFNRTTNTNGRNARPRRGVG

SEQ ID NO: 20256 - protein, 1017 aa, Andrena haemorrhoa
MNNQSVGGPSGLTGPTSDSEAAGPSNAETFKCRNPECDRSFPTTRGRGVHEQRAHKNWYDEKQIDNIDSKKAPWSAEEAALLARQEARLVLEGNTKFINLGLKPYFPNRTLESIKGQRRYPRHKDKVLQILREMENDSQGQDQPDLPESNEEPLALNVTSQISPINEYFAKLEPLNITEFQADHLNRICSSTSAWPLCRIFEELEIYLLETFPPTTKQRISGSEPEPVLTKRKARRAEYAKTQRAWTKNPSNCLRFILKGKSMANPPAKEDMVNFWRTTMTNGTNESPENETRRPVIWELWRPISPGEIKGSFPELSTSPGPDGLTSRQLRAVPLPILARVFNLFILSGKLPKHLLKARTTLIPKKDGTLKPEDYRPITVQSTMTRTFHKILARRLTQMVDLDQRQKAFVPTDGCAENIFDLDMILKYHRQNFKPLYMASTDIAKAFDSVSHKTIRDTLHIMGLPNPMVEYIMDSYERSSTILTCGDWESDEIRPTCGVKQGDPLSPILFNMVIDRLLSLIPPEIGVDVGGDHYNALAFADDLIFMATTPNGLQITINTMADFLSKCGLQINAAKSFTVSIRNVPHVKKSVVDGKVKFTCLGRTLPALKREDEWRYLGVPFTPEGRTIASPEIQLKEALDKLTKAPLKPQQRLFGLRTMVLPGLYHLLTLGGTTLSRLKKVDIMTRTAVRKWLNLPHDVVNAYFHANVKDGGLSMPAMRWLMPLHRRKRLLKRVREGQPTDPYLSLEIQRTIRRLTEHGNDMDTLDKLEKRWAELLHSSIDGKGLRESRKVPQQHKWVTEGNRFFSGKDFINAIKLRANALPTRSRTSRGRRSNRQCRAGCNAVETTYHVLQQCYRTHKARIERHNAVVSYLKRALGKTWKRVEEEPRFETPEGIRKPDLVAIKGTAAMVIDAQVVSEHLDLAVAHENKVEKYRPLESAIKDRYVVQDVFFTSATLSYRGVWSVESVNDLIGKKVLKKSELKIVSTRVLVGGLSSFWRFNRMTTAVRRTALQRTGVG

SEQ ID NO: 20257 - protein, 915 aa, Ancistrocerus nigricornis
MPFFPNRTLEAIKGQRKYQRHKDRVLQLLGELEEENLAANHRRQEGEHRRTPEQRALVSPHRELLSKLEPLDGSDYEIEHLNRICSNASVWAEDRIFEELEAYLTKIFPTTARRKGHARPSAPEPNVSKRKARRIEYARTQRAWSKNPCKLLRAILKNKEASQTPAKDGMVQFWRTVMTSGTNESPECGPRRHEILTLWEPIETGEIEKSFPELSTSPGPDGISARQLRAVPLEIMRRIFNIFMLCGKLPKRLLTGKTTLIPKKEGAQSPEEFRPITVQSVITRAFHKILARRLLEKVDLDNRQKAFLPRDGCAENIFDLDLLLKYHRQYFKTMFMASMDIAKAFDAVSHKTIRDTLEVMGVPGPMISYIMDTYERGITTLACGNWESEAITPTCGVKQGDPLSPMVFNMVIDRLLRTLPPEIGVDVGGNHFSAFAFADDLIFVAATPEGLQRVINTASDFLAQCGLNISATKSFTVALRNVPHLKKSVVDGKARFTCRGKQLPALKREDEWKYLGVPFTPEGRTTVHPERQLKEMLDKLSCAPLKPQQRLFALRIMILPGLYHLLTLGSTTLSRLKKIDVMVRTAVRKWLNLPHDTTNAYFHANVKDGGLSIPSMRWLMPLHRRARLHRLVRVGQPADPYLALEIQRATRRLTEGRHDISSQDLLEKRWAHMLHSSIDGKGLKESRQVPQQHLWITDGNRLLSGRDFVNAAKLRINALPTKSRTARGRRKDRLCRAGCNAVETLNHVLQQCHRTHRARIERHNAVVAYVKRALKKVSDEVMEEPFFQTQDGLRKPDLIAKAGDTALLLDAQVVSEHLDLATAHRTKTDKYRTLEDAIKVRYNVQRVSFLSATLSYRGVWSAASAKELTDRSILKKKELKLISTRVLIGGLSSFWRFNRTTSMARGNAMPRRGVG

SEQ ID NO: 20258 - protein, 950 aa, Ancistrocerus nigricornis
MIDNKKAQWSKEESALLARQEATLAFQGTRFMNQALLPYSPNRTLEAIKGQRKTPRHKERVLQLLNELEEEEGEAVGNHEPQNSPSSENTNEASRSAELLRKMEPLTGSEYQVKDLNRICSNAATWSVDRISEELEAYLLTIFLPKSKRRARAKNVEPEPTRTKREARRIEYAKTQRAWRKNPCNCLRTILKSKASAKTPSKQDMVQFWRTIMTNGTDESPSCESRRPECPDLWRPVETGEIEQAFPELSTCPGPDGVTSRQLRAVPLPVLNRIFNLFLLCGKLPRHLLVARTTLIPKKDGAEAPGDFRPITVQSVITRTFHKVLARRINDQIALDTRQRAFLPIDGCSENIFDLDLVLRYHRQNFKTMYMASMDIAKAFDAVSHKTIKDTLIVMGMPRPMVRYVMDTYERGTTTLTCGDWESERIKPTCGVKQGDPLSPSIFNMVIDRLLRRLPPEIGVDVGGSHFNAFAFADDLILIAATPKGLQMAIDTAADFLAQCGLLINATKSCTVAIRNVPHLKKSVVDGKMKFSCRGKQLPALKREDEWRYLGVPFSPEGRTMAKPEVQLKEALNKLSSAPLKPQQRMFALRVMVLPGLYHLLTLGNTTLSRLNKIDKMSRAAVRKWLNLPHDVPNAYIHACVKDGGLSIPSVRWLMPLHRRVRLKRLVREGAPTDQFLTLEIQRATRRLIENQVDVGTVALLEKRWAQLLHSSCDGKGLKESRKVPQQHQWLVEGNRFLSGKDFVNASKLRINAMPTRSRTARGRVKDRLCRAGCNAVETLNHVLQHCHRTHRARIERHNAIVAYLKRALGKTADQVEEEPHFLTPEGLRKPDLIAKTGNAALLVEVQVVSEQIDLATAHRNKVEKYRPLENAIKERYGAQHVAFTAATLSYRGVWSESSATQLIERGILKRSETKIISTRVLVGGLHSFWRFNRTTATAGRNARPRRGEG

SEQ ID NO: 20259 - protein, 918 aa, Andrena haemorrhoa
MNQALQPLFPNRTLESLKGQRKYQRHKDQVAQFLRELEEERQRLDHPTDPVSQEIPQDTDSMASFKELFARLEPLDIVEFQADHLNRICQGVATWSVKKISEELEMYLLNTFPLKTDRKEASPRGPERTLTNRQARRAEYARTQRSWTRNPCKCLKEILDHKAPEQTPPKEDMVQFWRTAMTAGTDESPESEPRRPVIQELWKPIDPVEIKKSFPELSTAPGPDGLTSRQLRAVPLQVTARVLNLFMLCGRLPRHLLRARTTLIPKKDGILGPQDYRPITVQSVLTRTFHKVLAKRLTDMVLLDPRQKAFLPKDGCAENIFDLDMILKYHRQQFKPLFMASTDIAKAFDSVSHNSIRDTLLTMGVPDPMVEYVMNAYQRSVTTLASGDWESDDIRPTCGVKQGDPLSPVMFNMVIDRLLRRIPPEIGVDVGGNHFNAFAFADDLVLVATTPNGLQQTINVATDFLASCGLKINAAKSFTVAIRNVPHEKKSVVDGSQKFTCAGRILQALRREDEWRYLGVPFSPEGRTNVQPEIQLKKAVEILTKAPLKPQQRLFALRVMVLPGLYHLLALGNTTLSKLKKVDLIARAAVRKWLCLPHDVLNAYIHANVKDGGLSVPSMRWLMPLHRRKRLQKLVREGQPTDPYLSREIQLTIRRLTDHNLDLDNARKIEQRWAKLLHTSYDGKGLRESRNVPQQHQWITEGNRLLSGKDYINATKLRINAMPTRSRTTRGRGQSRQCRAGCNAVETLNHVLQQCDRTHKARIDRHNAVASYIKRALEKSYQQVDEEPRFVTPEGVRKPDLIAKRGEMALVVDAQVVSEHTNLDEAHAAKVGKYQPLTQAIRERYDVVGVHITSATLNYRGVWSVSSANELNTKGVLKRTELKIISTRVLVGGLNAVWRFNRTTRTVRRNVAQRTGVG

SEQ ID NO: 20260 - protein, 950 aa, Ancistrocerus nigricornis
MIDNKKAQWSKEESALLARQEATLAFQGTRFMNQALLPYFPNRTLEAIKGQRKTPRHKERVLQLLNELEEEEGEAVGNHEPQNSPSSENTNEASRSAELLRKMEPLTGSEYQVKDLNRICSNAATWSVDRISEELEAYLLTIFLPKSKRRARAKNVEPEPTRTKREARRIEYAKTQRAWRKNPCNCLRTILKSKASAKTPSKQDMVQFWRTIMTNGTDESPSCESRRPECPDLWRPVETGEIEQAFPELSTCPGPDGVTSRQLRAVPLPVLNRIFNLFLLCGKLPRHLLVARTTLIPKKDGAEAPGDFRPITVQSVITRTFHKVLARRINDQIALDTRQRAFLPIDGCSENIFDLDLVLRYHRQNFKTMYMASMDIAKAFDAVSHKTIKDTLIVMGMPRPMVRYVMDTYERGTTTLTCGDWESERIKPTCGVKQGDPLSPSIFNMVIDRLLRRLPPEIGVDVGGSHFNAFAFADDLILIAATPKGLQMAIDTAADFLAQCGLLINATKSCTVAIRNVPHLKKSVVDGKMKFSCRGKQLPALKREDEWRYLGVPFSPEGRTMAKPEVQLKEALNKLSSAPLKPQQRMFALRVMVLPGLYHLLTLGNTTLSRLNKIDKMSRAAVRKWLNLPHDVPNAYIHACVKDGGLSIPSVRWLMPLHRRVRLKRLVREGAPTDQFLTLEIQRATRRLIENQVDVGTVALLEKRWAQLLHSSCDGKGLKESRKVPQQHQWLVEGNRFLSGRDFVNAAKLRINAMPTRSRTARGRVKDRLCRAGCNAVETLNHVLQHCHRTHRARIERHNAIVAYLKRALGKTADQVEEEHHFLTPEGLRKPDLIAKTGNAALLVEVQVVSEQIDLATAHRNKVEKYRPLENAIKERYGAQHVAFTAATLSYRGVWSESSATQLIERGILKRSETKIISTRVLVGGLHSFWRFNRTTATAGRNARPRRGEG

SEQ ID NO: 20261 - protein, 1014 aa, Andrena haemorrhoa
MTRTNVGGPSGFSGPTPALELEGRSEAEEFACRHPDCERTFPTSRGRGVHEQRAHKNWHDERQVDNIVNKKAPWSAEESALLARQEARLTLDGHKFMNQALQPLFPNRTLESLKGQRKYQRHKDQVAQFLRELEEERQRLDHPTDPVSQEIPQDTDSMASFKELFARLEPLDIVEFQADHLNRICQGVATWSVKKISEELEMYLLNTFPLKTDRKEASPRGPERTLTNRQARRAEYARTQRSWTRNPCKCLKEILDHKAPEQTPPKEDMVQFWRTAMTAGTDESPESEPRRPVIQELWKPIDPVEIKKSFPELSTAPGPDGLTSRQLRAVPLQVTARVLNLFMLCGRLPRHLLRARTTLIPKKDGILGPQDYRPITVQSVLTRTFHKVLAKRLTDMVLLDPRQKAFLPKDGCAENIFDLDMILKYHRQQFKPLFMASTDIAKAFDSVSHNSIRDTLLTMGVPDPMVEYVMNAYQRSVTTLASGDWESDDIRPTCGVKQGDPLSPVMFNMVIDRLLRRIPPEIGVNAGGNHFNAFAFADDLVLVATTPNGLQQTINVATDFLASCGLKINAAKSFTVAIRNVPHEKKSVVDGSQKFTCAGRILQALRREDEWRYLGVPFSPEGRTNVQPEIQLKKAVEILTKAPLKPQQRLFALRVMVLPGLYHLLALGNTTLSKLKKVDLIARAAVRKWLCLPHDVLNAYIHANVKDGGLSVPSMRWLMPLHRRKRLQKLVREGQPTDPYLSREIQLTIRRLTDHNLDLDNARKIEQRWAKLLHTSYDGKGLRESRNVPQQHQWITEGNRLLSGKDYINATKLRINAMPTRSRTTRGRGQSRQCRAGCNAVETLNHVLQQCDRTHKARIDRHNAVASYIKRALEKSYQQVDEEPRFVTPEGVRKPDLIAKRGEMALVVDAQVVSEHTNLDEAHAAKVGKYQPLTQAIRERYDVVGVHITSATLNYRGVWSVSSANELNTKGVLKRTELKIISTRVLVGGLNAVWRFNRTTRTVRRNVAQRTGVG

SEQ ID NO: 20262 - protein, 919 aa, Ampulex compressa
MNQALQPYFPNRTLEAIKGQRRYAKHKEKVLLIINELRDETGEDRRREPARDEQSTRSSEEQVPTLGEVLRQLTPLEGADYQSWRLNRLCANSCLWDIKRISEELEIYLLAIFPPTKSRPNSAANRSLEPAATKRKARRMEYARAQRAWKKNPCNYLRTILKKKTSVHTPAKEEMVQFWRTTMTSTTNDSPTCEPRRPEILNLWRPIEPTEIIKSYPGPSTCPGPDGVTTRQLKAVPLPILGRIFNLFLLCRKLPRHLLAARTTLIPKKDDAHRPEDFRPITVQSVITRTFHKILARRLVETVDLDKRQKAFLPVDGCSMNIFELDLILKYHRQYFKTMFMASMDIAKAFDTVSHKTIRDTMLVMGIPEQMVDYVMDTYDRGTTTLTCGKWESDPIKPTCGVKQGDPLSPIIFNMVIDRLLRRIPPEIGVDIGGNHFNAFAFADDLIFVAATPNGLQITIEIASDFLAQCGLNINATKSFTVAIRNVPHKKKSVVDGKVKFMCRGRQLPALRREDEWKYLGVPFTPEGRTTAQPESQLKEALETLTSAPLKPQQRMFALRVMVLPGLYHLLTLGNTTLSRLKKIDVMARTAVRNWLNLPHDVTNAYFHASVKDGGLSIPSMRWLMPLHRKIRLQKLVRDGLPTDPYLALELQRAKRRLTENHVDIATLEMLRTRWARVLHLSSDGRGLRESRRVPQQHQWLVEGNRFLSGRDFVNAVKFRINAMPTRSRTARGRIKDRLCRAGCNTVETLNHVVQQCHRTHRARIERHNAITSYIKRALIKSAERVDEEPRFLTHAGLRKPDLIAKSGETALVVDAQVCSEHLELAAAHKAKTEKYLPLEEDIKAWYSVTQVAFMTATLSYRGVWSEESAAQVPQKAILKKSELKIISTRVLVGGLNSFWRFNCTTTSGRNARPRSGVG

SEQ ID NO: 20263 - protein, 1014 aa, Andrena haemorrhoa
MTRTNVGGPSGFSGPTPALELEGRSDAEEFACRHPDCERTFPTSRGRGVHEQRAHKNWHDERQVDNIVNKKAPWSAEESALLARQEARLTLDGHKFMNQALQPLFPNRTLESLKGQRKYQRHKDQVAQFLRELEEERQRLDHPTDPVSQEIPQDTDSMASFKELFARLEPLDIVEFQADHLNRICQGVATWSVKKISGELEMYLLNTFPLKTDRKEASPRGPERTLTNRQARRAEYARTQRSWTRNPCKCLKEILDHKAPEQTPPKEDMVQFWRTAMTAGTDESPESEPRRPVIQELWKPIDPVEIKKSFPELSTAPGPDGLTSRQLRAVPLQVTARVLNLFMLCGRLPRHLLRARTTLIPKKDGILGPQDYRPITVQSVLTRTFHKVLAKRLTDMVLLDPRQKAFLPKDGCAENIFDLDMILKYHRQQFKPLFMASTDIAKAFDSVSHNSIRDTLLTMGVPDPMVEYVMNAYQRSVTTLASGDWESDDIRPTCGVKQGDPLSPVMFNMVIDRLLRRIPPEIGVDVGGNHFNAFAFADDLVLVATTPNGLQQTINVATDFLASCGLKINAAKSFTVAIRNVPHEKKSVVDGSQKFTCAGRILQALRREDEWRYLGVPFSPEGRTNVQPEIQLKKAVEILTKAPLKPQQRLFALRVMVLPGLYHLLALGNTTLSKLKKVDLIARAAVRKWLCLPHDVLNAYIHANVKDGGLSVPSMRWLMPLHRRKRLQKLVREGQPTDPYLSREIQLTIRRLTDHNLDLDNARKIEQRWAKLLHTSYDGKGLRESRNVPQQHQWITEGNRLLSGKDYINATKLRINAMPTRSRTTRGRGQSRQCRAGCNAVETLNHVLQQCDRTHKARIDRHNAVASYIKRALEKSYQQVDEEPRFVTPEGVRKPDLIAKRGEMALVVDAQVVSEHTNLDEAHAAKVGKYQPLTQAIRERYDVVGVHITSATLNYRGVWSVSSANELNTKGVLKRTELKIISTRVLVGGLNAVWRFNRTTRTVRRNVAQRTGVG

SEQ ID NO: 20264 - protein, 950 aa, Ancistrocerus nigricornis
MIDNKKAQWSKEESALPARQEATLAFQGTRFMNQALLPYFPNRTLEAIKGQRKTPRHKERVLQLLNELEEEEGEAVGNHEPQNSPSSENTNEASRSAELLRKMEPLTGSEYQVKDLNRICSNAATWSVDRISEELEAYLLTIFLPKSKRRARAKNVEPEPTRTKREARRIEYAKTQRAWRKNPCNCLRTILKSKASAKTPSKQDMVQFWRTIMTNGTDESPSCESRRPECPDLWRPVETGEIEQAFPELSTCPGPDGVTSRQLRAVPLPVLNRIFNLFLLCGKLPRHLLVARTTLIPKKDGAEAPGDFRPITVQSVITRTFHKVLARRINDQIALDTRQRAFLPIDGCSENIFDLDLVLRYHRQNFKTMYMASMDIAKAFDAVSHKTIKDTLIVMGMPRPMVRYVMDTYERGTTTLTCGDWESERIKPTCGVKQGDPLSPSIFNMVIDRLLRRLPPEIGVDVGGSHFNAFAFADDLILIAATPKGLQMAIDTAADFLAQCGLLINATKSCTVAIRNVPHLKKSVVDGKMKFSCRGKQLPALKREDEWRYLGVPFSPEGRTMAKPEVQLKEALNKLSSAPLKPQQRMFALRVMVLPGLYHLLTLGNTTLSRLNKIDKMSRAAVRKWLNLPHDVPNAYIHACVKDGGLSIPSVRWLMPLHRRVRLKRLVREGAPTDQFLTLEIQRATRRLIENQVDVGTVALLEKRWAQLLHSSCDGKGLKESRKVPQQHQWLVEGNRFLSGRDFVNAAKLRINAMPTRSRTARGRVKDRLCRAGCNAVETLNHVLQHCHRTHRARIERHNAIVAYLKRALGKTADQVEEEPHFLTPEGLRKPDLIAKTGNAALLVEVQVVSEQIDLATAHRNKVEKYRPLENAIKERYGAQHVAFTAATLSYRGIWSESSATQLIERGILKRSETKIISTRVLVGGLHSFWRFNRTTATAGRNAKPRRGEG

SEQ ID NO: 20265 - protein, 950 aa, Ancistrocerus nigricornis
MIDNKKAQWSKEESALLARQEATLAFQGTRFMNQALLPYFPNRTLEAIKGQRKTPRHKERVLQLLNELEEEEGEAVGNHEPQNSPSSENTNEASRSAELLRKMEPLTGSEYQVKDLNRICSNAATWSVDRISEELEAYLLTIFLPKSKRRARAKNVEPEPTRTKREARRIEYAKTQRAWRKNPCNCLRTILKSKASAKTPSKQDMVQFWRTIMTNGTDESPSCESRRPECPDLWRPVETGEIEQAFPELSTCPGPDGVTSRQLRAVPLPVLNRIFNLFLLCGKLPRHLLVARTTLIPKKDGAEAPGDFRPITVQSVITRTFHKVLARRINDQIALDTRQRAFLPIDGCSENIFDLDLVLRYHRQNFKTMYMASMDIAKAFDAVSHKTIKDTLIVMGMPRPMVRYVMDTYERGTTTLTCGDWESERIKPTCGVKQGDPLSPSIFNMVIDRLLRRLPPEIGVDVGGSHFNAFAFADDLILIAATPKGLQMAIDTAADFLAQCGLLINATKSCTVAIRNVPHLKKSVVDGKMKFSCRGKQLPALKREDEWRYLGVPFSPEGRTMAKPEVQLKEALNKLSSAPLKPQQRMFALRVMVLPGLYHLLTLGNTTLSRLNKIDKMSRAAVRKWLNLPHDVPNAYIHACVKDGGLSIPSVRWLMPLHRRVRLKRLVREGAPTDQFLTLEIQRATRRLIENQVDVGTVALLEKRWAQLLHSSCDGKGLKESRKVPQQHQWLVEGNRFLSGRDFVNAAKLRVNAMPTRSRTARGRVKDRLCRAGCNAVETLNHVLQHCHRTHRARIERHNAIVAYLKRALGKTADQVEEEPHFLTPEGLRKPDLIAKTGNAALLVEVQVVSEQIDLATAHRNKVEKYRPLENAIKERYGAQHVAFTAATLSYRGVWSESSATQLIERGILKRSETKIISTRVLVGGLHSFWRFNRTTATAGRNARPRRGEG

SEQ ID NO: 20266 - protein, 916 aa, Osmia bicornis
MPFFPNRTLEAIKGQRKQPRHKNKVLQFLEELRNEALLPEQPAGRNEANDTNEQNTNLKALVSELFENLPSLRDQTDFHAEHLDRICRGVSTWSPNRIFEELTAYLLLVFPPTTNSNKPPRKSRCSSPTKRQARRADYAITQRAWARNPCNCLRTILKGKTQENPPPKIDMVQYWQTLMTDGTNISPGVNDKRPALTDLWNPITPGEIKASFPEGNTCPGPDGLTVRQLRAIPLDILCRIFNLFMISGKLPIHLLKARTTLIPKKDQACSPEDYRPITVQSIMTRAYHKVLAKRMTNMVVLDQRQKAFLPKDGCAENIFDLDLILKYHRQNFKPLYMLSIDIAKAFDSVSHTTIRDTLTVMGIPAPMIEYIMYTYENGSTKLKCDGWESDEYQPTRGVKQGDPLSPIIFNMVIDRLLRLIPPEVGVDIGGIHFTAAAFADDLLFFASSPNGLQETINIASEFLTQCGLQINATKSFTVSLRNVPHMKKSVVDGKTKFTCLNRQLPSLQREDEWKYLGVPFTPEGRTIVQPEKQLKDALDRLTRAPLKPQQRLFGLRVMVLPGLYHLLTLGFTTLSRLKKIDTMTRAAARKWLCLPHDTPNAFFHADVKDGGLSLPSMRWLMPLHRKVRLLNLSKGSQRTDPYLTLEIQKASRRLTDNRTTIESADQLKAKWANLLHSSIDGRALKESRKVPFQHRWVTEGNRLLSGKDYLNMIKLRINAMPTRSRTSRGRGTNRTCRAGCQAVETLNHVLQQCHRTHRARIERHNAVVSYIQRALSKNYETVLAEPHFITPEGLRKPDLVAVSGPIALVIDAQVVSEHLELCSAHRTKIEKYEPLTNAIKSRYAVQSVSFTTATLSYRGVWSGSSAMDLIQYGILSRSDLKIVSTRVLIGGLSGFWRFNRTTSSSGRVATYRTGIG

SEQ ID NO: 20267 - protein, 921 aa, Nomada fabriciana
MCIRRRKRVKNCRRGSGASHMNWYDARQVDNIYSRRAPWSAEEAALLARQEAKLTLDGVRFINQSLRPLFPNRTLEAIKSQRRNSGHKSKVLQLLAEIKQEREQPGEQAPGGDLPSVAPSNNFKASVHESIVHLDSINDRTDFFAGLLDHICINICTWSTDRIFEELTAYLLLAFPPTTSRRKHPIINPPNLPLSRRQARRADYVRTQRAWKKNPCKCLRIILKGKTQDRPPSKPNMVQFWGTLMTEGTNESPGVSSRQPEKLALWRPITPQEVKASLPERNTCPGPDGLTARQLAATPLEFLTRIFNLVMICEKLPEHLLQATTIFIPKKDDAKLPEDHRPITVQSVITRACHKILARRLTNAVDLDPRQKAFLPMDGCAENIFDIDLILRYHRQNFKPLYMMSMDIAKAFDSVSHSTVRDTLIAHGVPAPMLRHIMHGYENGLTSLKFDNWESDSIKPRRGVKQGDPLSPIIFNMVIDRLLRLLPPEVGVDIGGIHYTACAFADDLILLATTPIGLQLAIDTAADYLSSCGLQINAAKSFMVAIRNVPHMKRSVVDGKTRFTCLARQLPALQREDEWKYLGVPFSPEGRTTVRPENLQEIALTKLTKAPLKPQQRLFGLRVIALPSLYHLLTLAHTTLSRLKKFDSMTRGAVRKWLCLPHDTPNAFFHADVKDGGLSIPSLRWLMPLHRRARLQNIIRFSQSTDLYLAHELQKTIRRLTENRTAFESAQQLKDRWASLLHSSVDGKGLKESRKVPIQHKWVTDGNRFLSGKDFINMIKLRINAMPTRSRTSRGRGTTRACRAGCHAVETLNHVLQHCHRTHRARIERHNAIASYIRRAIAKKYDTVIEEPHFSTSAGLRKPDLLAIQHDKAVVIDAQVVGANVDLCTAHAAKKHKYESLRSAIETEYAVSSVSYIGSTT

SEQ ID NO: 20268 - protein, 885 aa, Nomada fabriciana
MQQERELPVHQALGNVSPATAVCSNLKTSINEMFDLLEPIEDRSDFFAATLDRICKNICIWPTERIFEELTAYLLLTFPPTVSRSNHPPSGSPSASLTRRQTRRADYARTQRAWRKNPCNCLRTILKGKAQGTPPSKSNMVQFWSTLMTERTNESPGISSKQPEMLDLWQPIATREIKASFPELTTCPGPDGLTARQLAAVPLEILTRIFNLFMICERLPEHLLQARTTLIPKKDDAKLPEDYRPITVQSVVTRAYHKVLARRLTNAVDLDPRQKAFLPKDGCAENVFDLDLILKYHRQNFKPLYMMSMDIAKAFDSVSHPTIRDTLIVKGVPAPMIRHIMYTYENGGTNLKFDSWESDTIKPRRGVKQGDPLSPIIFNMVIDRLLRLLPPEIGVDIGGIHYTACAFADDLILLATTPNGLQQVIDIAADYLSKCGLQINAAKSFTVAIRNVPHMKRSVVDSKEKFTCLARQLPALQREDEWKYLGVPFSPEGRTTVQPEKLLQDALTKLTKAPLKPQQRLFGLRVMALPSLYHLLTLGHTTLSRLKKFDTMTRSAVRKWLCLPRDTPNAFFHADVKDGGLSIPSMRWLMPLHRKARLQNIVRSSQSSDLYLAQEIQKTTRRLTENRSTIDSAQQLKNRWAHKLHLSVDGQDLKESRKVPNQHKWVTEGNRLLSGKDFINMVKLRINAMPTRSRTSRGRGTNRACRAGCHAVETLNHVLQQCHRTHRARIERHNAIVSYIKRAIAKKFDAVFEEPHFSTPVGLRKPDLLAIKRNNALVIDAQVVGANVDLCTAHHLKAQKYEPLRSAIMSRYAIDSVSFTSATISYRGVWSVTSAESLTKNGLLSREDLKILSTRALIGGLSGFWKFNRNTSTSAGTTTNRRGIG

SEQ ID NO: 20269 - protein, 913 aa, Osmia lignaria
MPYFPNRTLESIKGQRRYQRHKDKVLQILRELEEENEPISSPAQGEERPSVSPEQDTMTAIKELFELLEPLSGTEYHVERLDRICNGLSTWSMAKIYEELELYILEVFPPARKSKSRASNAPKRTITKRQARRVEYAKTQKAWKKNPCNCLRVILKGKTLANPPTKQNMVNFWRTTMTNGTNESPDCEAKQPELSGLWTPVVPGEIIKSYPEMTTCPGPDGLTVRQLRAVPIDILTRIFNLFLLCGKLPKHLLVARTTLIPKKDGAEKPEDYRPITVQSVITRTFHKILARRLTNMVALDKRQKAFLPTDGCAEHTFDLDLVLRYHRQNFKPLYMASMDIAKAFDSVSHKTIRDTLSIMGLPSPMIDYIMDTYDRCHTTLTCDNWESEAIRPTCGVKQGDPLSPIIFNMIMDRLLKRLPPEVGVDIGNVRYNALIFADDIIFLAATPNGLQLTIDIASEFLAQCGLFINATKSFTVALRNVPHVKKSVVDGKTQFKCRGHKLPALKREDEWKYLGVPFTPEGRSITQPEAKLKEAIDKLTRAPLKPQQRLFALRVIVLPGLYHLLTLGNTTLSRLKKVDKMVRAAVRKWLCLPHDTVNAYFHANVKDGGLSIPSMRWLMPLHRRVRLEKLTREGLPTNLYLTQEIQRSTRRLTENRIDINTSEQLEKRWATILHSSIDGKGLKESRKVRQQHQWVTDGNRFLSGKDFINAVKLRINALPTRSRTSRGRRADRICRGGCNAAETLNHVLQQCHRTHRARIERHNAVTAYVKRALERKYEKVEAEPHFRTAEGLRKPDLVAKQGTTAIVADTQIVSEHMDLDTAHKNKVEKYKTLDNAIKERYGVRDVSFTTVTLSYRGVWSEGSANELTRRGILKMSELKIISTRVLVGGLNSFWRFNRTTTTRINTNPPTGVG

SEQ ID NO: 20270 - protein, 912 aa, Osmia bicornis
MPYFPNRTLESTKGQRRYQRHKDKVLQILRELEEETEPISSPAQGEERPSVPPEQDTLSAIKELFELLEPLSGTEYHVERLDRICNGLSTWSMAKIYEELELYLLEVFPPARKNKSKASSAPKRTITKRQARRVEYAKTQKAWKRNPCNCLRAILKGKTLANPPDKQNMVNFWRTTMTNGTNESPDCEAKQPELTGLWTPVVPGEIIKSYPEMTTCPGPDGLTVRQLRAVPIDILTRIFNLFLLCGKLPKHLLVARTTLIPKKDGAEKPEDYRPITVQSVITRTFHKILARRLTNMVALDKRQKAFLPTDGCAEHTFDLDLVLRYHRQNFKPLYMASIDIAKAFDSVSHKTIRDTLSIMGLPNPMIDYIMGTYDSCHTTLTCDKWESEAIKPTCGVKQGDPLSPIIFNMVMDRLLKRLPPEVGVDIGNIRYNALIFADDIIFLAATPNGLQLIIDVASEFLAQCGLFINTSKSFTVALRNVPHVKKSVVDGKTQFKCRGHKLPALKREDEWKYLGVPFTPEGRSITHPEVKLKEAIDKLTRAPLKPQQRLFALRVIVLPGLYHLLTLGNTTLSRLKKIDKMVRAAVRKWLCLPHDTVNAYFHANAKDGGLSIPSMRWLMPLHRRVRLEKLTREGLPTNLYLTQEIQRSIRRLTENRIDISTSEELEKRWATILHSSIDGKGLRESRKVHQQHQWVTEGNRFLSGKDFINAVKLRINALPTRSRTSRGRRSDRICRGGCNAAETLNHVLQQCHRTHRARIERHNAVTAYVKRALERKYEKVEAEPHFRTAEGLRKPDLVAKQGTTAIVVDTQIVSEHMDLDTAHRNKVEKYKTLQNAIKERYAVRDVSFTTVTLSYRGVWSEGSANEITRRGILKMNELKVISTRVLVGGLNSFWRFNKTTTRINTIPPTGVG

SEQ ID NO: 20271 - protein, 1021 aa, Nysson spinosus
MELLVLLLEPVRPQALPVRHLPMLEKWIRARPKQFRAECRTAKKSSKPLEGEVCMSNVPTRIGTMKGRSIASITRKHRGVLKNLGSWHGRRPTSSFLAQSFVNQALMPFFPNRTLESIKGQRRYQRHKDKVLQILRGLETDTTQLVPPAPSEVTQSGTQNLSLVSSISELFAKLPPLDGTQFHAEHLSKICNSISVWPINKVSEELEIYLLETFPPTPGNKKKASKGAPDCPSTKRQARRAEYAMTQRAWKKNPCNCLRVILKGTAAAIPPAKADMVQFWQTIMTNGTNVSPGCEVKRPVLQDLWKPIDPRALTQSFPELTTCPGPDGLATRQLKAVPTHILARIFNLFLLCGKLPRHLLKARTTLIPKKDEAHKPEDYRPITVQSIITRAFHKILARRLTDQVDLDDRQKAFLPKDGCAENIFNLDMILRYHRQNFKPLYMVSMDIAKAFDSVSHNTIRDTLYTMGLPNPTVSYIMDTYERSSTTLACGDWESEGIRPTCGVKQGDPLSPIIFNMVIDRLLRLVPPEVGVGVGDERFNAFAFADDLIFVASTPNGLQLTIDTASRFLSQYGLNINAAKSFTVVLRNVPHLKKSVVDSKAQFTCQGRKLPALKREDEWKYLGVPFTPEGRTMARPESIFKEALNKLTKASLKPQQRLFALRVMVLPWLYHLLTLGNTTLSRLKKVDTMARTAVRKWLCLPHDVVNAYFHADAKDGGLSIPSMRWLMPLHRSERLQNLIKAGHTAEPYISQEIQRTIRRLTENRQDFSTATELKKRWAEILHNSTDGRGLRESDKVPQQHQWVADGNRFLSGRDFINTIKLRINAMPTRSRTVRGRIEDRRCRAGCNAVETLNHVLQQCHRTHRARIERHNAVVAYMKRALSKKFEQVEEEPHFETPTGLRKPDLVAKHGTTALVLDAQVVSEHIDLATAHENKAEKYHLLEDAIKDRYGVTDASFTTATLSYRGVWSDSSAKELHGKGVLKKKELKIIATRVLVGGLNAFWRFNRTTSAYGRGTASRTGVG

SEQ ID NO: 20272 - protein, 925 aa, Dolomedes plantarius
MTPDQDSQSVDAEAQSNVGEDAADEHPRLGTSSDYSESVPATSNITHGLGEVESRLEEFLKILPTSAGSFSEVDEVIASLTSSSREAVLARVEAILRKIFPPQARSHWGNARPRTRVINSVTSRRKNRRREYARVQSLYKKCRARAIRSTLSGDKGDFKVTRDFAEDFWRTLLTRPIQPLPEFPPAACENKGPHIELLEIWGPVLWDEIEGCLPRNTSAAGPDEVTPRMIRGLPWEFLTKICNLILWCGELPGSMTSARTVFIPKKPCPTSPGELRPITISNCLARTITKIISRRVQSVIKLDPRQRGFLPLDGCLENTTVLDLVLSGRRSEMRSVFVASVDIQKAFDSIDHRAILKVLENFHLPLFLIYFISSLYSRASTVLQFSDGCSDPIMPSMGVRQGDPLSPLLFNMAIDVLLRSLPDHIGVPVGGKLINAAAYADDLLLFAETKQGLQVLLEKACAALKALGLQVNYLKSFTISMVPSGREKKMKVIEVPFYISNVPLRSLRLGEEFNYLGISFTPEGRAKVSVVEQLDMDLQVLSKAPYKPQQRLYALRSHLLPGIHHKLVLGRTNIGHLRRADILVRRYVRKWLDLPHDVPIAFIHAAVRDGGLGVDSLRWAMPRLRLARLETFIKSFGLEDSAGGAARSFIDLQISRLRSQVSYNNEQLLTSSSVARMWASRLYEAVDGSALRHASRVVQQNLWVSDGTSMLTGRKYIQCIKARINALPTRSRTSRGRPHLERSCRAGCSAVETPNHVAQICYRTHAARVKRHNKIVSYVERALVQRGFEATLEPIYRLSSGVLKPDIVATKSGQAFILDAQIVGDSVDLREAHISKRDKYSANDLLQAVKSFTDASEVQVTSITLNWRGIWSRHSAESLQRFGMLGGRDFKIIAVRVLESTVDGFGRFGKMTTLERGAMARTGVG

SEQ ID NO: 20273 - protein, 697 aa, Dolomedes plantarius
MIRGLPWEFLTKICNLILWCGELPGSMTSARTVFIPKKPCPTSPGELRPITISNCLARTITKIISRRVQSVIKLDPRQRGFLPLDGCLENTTVLDLVLSGRRSEMRSVFVASVDIQKAFDSIDHRAILKVLENFHLPAFLIYFISSLYSRASTVLQFSDGCSDPIMPSMGVRQGDPLSPLLFNMAIDVLLRSLPDHIGVPVGGKLINAAAYADDLLLFAETKQGLQALLEKACAALKALGLQVNYLKSFTISMVPSGRDKKMKVIEVPFYISNVPLRSLRLGEEFTYLGISFTPEGRAKVSVVEQLDMDLQVLSKAPYKPQQRLYALRSHLLPGIHHKLVLGRTNIGHLRRADILVRRYVRKWLDLPHDVPIAFIHAAVRDGGLGVDSLRWAMPRLRLARLETFIKSFGLEDSAGGAARSFIDLQISRLRSQVSYNNEQLLTSSSVARMWASRLYEAVDGSALRHASRVVQQNLWVSDGTSMLTGRKYIQCIKARINALPTRSRTSRGRPHLERSCRAGCSAVETPNHVAQICYRTHAARVKRHNKIVSYVERALVQRGFEATLEPIYRLSSGVLKPDIVATKSGQAFILDAQIVGDSVDLREAHISKRDKYSANDLLQAVKSFTDASEVQVTSITLNWRGIWSRHSAETLQRFGMLGGRDFKIIAVRVLESTVDGFGRFGKMTTLERGAMARTGVG

SEQ ID NO: 20274 - protein, 925 aa, Dolomedes plantarius
MTPDQDSQSVDVEIRSNVGEDAADAHPRPGTSSDYSESVPATSNILHGLGEVESRLEEFLKILPASAGSFSEVDEVIASLTSSREVVLARVEAILRKIFPPPQARSQWGNARPRTRVINSVTSRRKNRRREYARVQSLYKKCRARVIRSTLSGDKGDFKVTREFAEDFWRTLLTRPTQPLPEFPPAACENKGPRIELLEIWGPVLWDEIEGCLPRNTSAAGPDKVTPRMIRGLPWEFLTKICNLILWCGELPGSMTSARTVFIPKKSIPASPGELRPITISNCLARTITKIISRRVQSAIKLDPRQRGFLPLDGCLENTTVLDLILSGRRSEMRSVFVASVDIQKAFDSIDHRVILKVLENFHIPSFLIYFISSLYSQASTALQFSDGCSDPIKPTMGVRQGDPLSPLLFNMAIDVLLRSLPDHIGVPVGGKLVNATAYADDLLLFAETKQGLQVLLDKACLALKALGLQVNYLKSFTISMVPSGREKKMKVIEVPFYVSNVPLRSLRLGEEFTYLGISFTPEGRAKVSLVEQLDKDLQVLSKAPYKPQQRLYALRSHLLPGVHHKLVLGRANIGHLRRADILVRRYVRKWLDLTHDVPIAYIHAAVSDGGLGVDSLRWAMPRLRLARLETFIKSFGLEDSAGGASRSFISLQISRLRSQVTFNNEQLLTSSSVARMWASRLYEAVDGSALRQASRVVQQNLWVSDGTSMLTGRKFIQCIKACINALPTRSRTSRGRPHLERSCRAGCSAVETPNHVAQICYRTHAARVKRHNKIVSYVERALVQRGFEATLEPIYRLGSGVLKPDIVATKSGQAYVLDAQIVGDSVDLREAHISKRDKYNGRDLLQAVKSFTGASEVQVTSITLNWRGIWSRHSAESLQRFGMLGGKDVKIIAVRVLESTVDGFGRFNKMTTLERGAMARTGVG

SEQ ID NO: 20275 - protein, 947 aa, Idaea aversata
MHRSSPAGSPRVVVAPPTSPRSPGLSYLGVCTPSCPPSPRSPSPSLSEARTPFWQTLSDLKGSIPIVRRIPRGARITLALALRAHIDKAVSLNSVGAWEDLFTFAYRHLHVDGNRDKRLSLTQKLKNNCVNPGIPSSQGTKRKPSGASADGSRNLFKKVEEKVGDGDIGGASRLLFSNDTVAPVCSETLQCLRDKHPTSDRADSPNISLVVGTPPVISADDIVASILSFRNGSCGGLDGLSPQHLKDLVCFSTGDPGRGLASSLASLADLMLSGSVNNEVTGILYGASLCALKKKDGGIRPIAVGTTFRRLVSKMACRHIAPILQNKFQPIQVGFGSKSGCEAAVHATRKFLSQADGQILLKVDVKNAFNSLDRGSLLSRVGEHIPAFYPYLRQCYGEQSKLVYQGNLIDSSVGCQQGDPLGPAIFSLGIHPVVSSLSSKLNLWYLDDGTLGGDPEVVLEDLKGLITRFSDIGLELNFSKCEIYLHPSVPPDRGREILAMFNGVAPNIQAVSGASLRLLGAPVLDDSFPAFIREQSQRFAGATERLLKISPHVALAIIRFCLFVPQFVYALRCCHFWMFDSLLLEVDEQISEVLTRVLNCQLPSHAWAQASLPVRFGGLGIRSVSAVALPAFLASAHSCRGLFESILGASSVGAGVIHLSEASTRWGSLSGCEPPTILHSQRQWDEPLCQVVQKKLLADSSNTIDRARLLAAFERESGFWLNAVPSASLGTLLDRHTLTLAVGLRLGLRVVQPHMCVCGSDVNEFGHHGLSCQRSAGRIPRHSSLNDVIRRALVSANIPAILEPNGIVRSDGKRPDGVTLIPWEQGRCLVWDVTCVDTLAPSHLRATCAQACAAAAGAESLKMRKYQDIPGCYAFTPLGFETVGSWGPSAKAFLKVLSSRLCEATGDRRAGSFLSQRISLAIQRGNAASLLGTLGRGDALEDGVFCF

SEQ ID NO: 20276 - protein, 1288 aa, Crocallis elinguaria
METRYRKLRIGPLPEGDRRGTSVAGHGRDSMLASDSRLGGWAGVGDAGGRGMSSGITADRTNRQDSSSNCSRSVTPAEDVSQEAHATKPTTTKAGKPRVRMKWSEEINLFIMRTYFHVTKLESDKTMYCKKLHDQFTIKYPDLKLSAQRIADQRRVIVRNKLLSDDVINNLKREISEQLTIEERENSPIQILNSRPQTLTSQVDTLQHTSEINIPFSMISPVDTLHTSQTSLTLQSILVPSHVSTQTNALPSIVSITHDIEREQNSELIQIDIPTQELIEQVETTLVQYTGTDPTVRPKLPRLKENKKLYALIDIFNKQILGRFFSIDSDINTLHTLIYCSALVICENLGYKIRSHHTQASKRKPQKPAWQIRLESDIKLLRADIGKLTQYINNNRSRKVVERVEEIFQRTKIHTVHEKNNVRPEEYLDTLKQKLTLKSQRLARYNKALQRKEDNKLFTTNEKGFYGAFKSDSIQSDSNSELPQANELENYWADLWKKQNEHNDSADWINLEEARMENIETMEFTEISRDDIEAVTIKLKNWKAAGIDNVHNFWYKKFFILHDILAKNITDLIRGDQDLPKFITKGITFMLPKSSDTANPAQYRPITCLPTIYKLITSCITHCINKHIEHNNILFEEQKGCRQSHRGCKEQLVIDTTVLKHANTKKRNLHISYIDYKKAFDSVPHSWLIRVLHLYKINPTIINFLKIAMSEWKTTLYLSNGSNKITTDEIKIENGIFQGDSLSPLWFCLALNPLSLLLNKTNSGYKLNTDTSITHLMYMDDIKIFAKTEKDLRNLIDITAQYSQDINMKFGLDKCRTLHIQRGKIVKGNPDSDELNSFAQMEPKDTYKYLGIHQSNNIDHIQIKKDLSAEYSRRLNLICKKQLYSKNLFKAINTFAIPVLTYSFGVVKWTRTDINRLEIKTRTTLTKRNYLHPKSAIERISLKRQKGGRGLIDLKLLWEGQVRNLRGFFYTKSATSNIHSAIIDLDTNYTPLNLNNRNIQYKTPQIQTNEKIDRWRAKELHGRHLHDLEQGHVDVDASNKWLKLGYLFPETEGFMIAVQDQVINTKNYKKFILKDPNIQNDKCRKCHRASETIQHITSACSSLAQTDYTHRHNQIANIVHQKLAIKHELIQAKAVPYYQYNPKPVLESQSHKIYFDRAILTDKTVHYNRPDITMIDKLNKITYLIDIAVPNTHNLQKTITEKIHKYTELKEEIIRIWKMSKVYIVPLVLSSTGVIPKHLLHYLQQIHLPSNLFMTMQKAAILNTCRIVRKFLQDDLSEINTQNELHLA

SEQ ID NO: 20277 - protein, 919 aa, Crocallis elinguaria
MNLFLNITCAVSINNIKQKIKQKLTLKSQRLARYNKALQRKEDNKLFTTNEKGFYGAFKSDSIQSDSNSELPQSNELENYWADLWKKQNEHNDSADWINLEEARMENIETMEFTEISRDDIEAVIIKLKNWKAAGIDNVHNFWYKKFFILHDILAKNITDLIRGDQDLPKFITKGITFMLPKSSDTANPAQYRPITCLPTIYKLITSCITHCINKHIEHNNILFEEQKGCRQSHRGCKEQLVIDTTVLKHANTKKRNLHISYIDYKKAFDSVPHSWLIRVLHLYKINPTIINFLKIAMSEWKTTLYLSNGSNKITTDEIKIENGIFQGDSLSPLWFCLALNPLSLLLNKTNSGYKLNTDTSITHLMYMDDIKIFAKTEKDLRNLIDITAQYSQDINMKFGLDKCRTLHIQRGKIVKGNPDSDELNSFAQMEPKDTYKYLGIHQSNNIDHIQIKKDLSAEYSRRLNLICKKQLYSKNLFKAINTFAIPVLTYSFGVVKWTRTDINRLEIKTRTTLTKRNYLHPKSAIERISLKRQKGGRGLIDLKLLWEGQVRNLRDFFYTKSATSNIHSAIIDLDTNYTPLNLNNRNIQYKTPQIQTNEKIDRWRAKELHGRHLHDLEQGHVDVDASNKWLKLGYLFPETEGFMIAVQDQVINTKNYKKFILKDPNIQNDKCRKCHRASETIQHITSACSSLAQTDYTHRHNQIANIVHQKLAIKHELIQAKAVPYYQYNPKPVLESQSHKIYFDRAILTDKTVHYNRPDITMIDKLNKITYLIDIAVPNTHNLQKTITEKIHKYTELKEEIIRIWKMSKVYIVPLVLSSTGVIPKHLLHYLQQIHLPSNLFMTMQKAAILNTCRIVRKFLQDDLSEINTQNELHLASARDFHVLPKFFKFREKNKFRIIIIIFIYSDNIYGPCVSNKK

SEQ ID NO: 20278 - protein, 1211 aa, Graphium sarpedon
MENRNNRKRIEPLPGGNRQGTLGADAECYSMRSIGGRELSRRIPTDKNITADTTYIPTESIDTDSSRSVIPAVDDSQETLVNKSATTKAGKPRVRMKWTEDINLFIMRTYFYITKLETDKTMYCKKLHDNFILKYPHTTVSAQRVADQRRVIIRNKLLSDETINTIKREISELLSKEDRNYSPEKSLVTPPNIHDPQNSPLYITPSITSQLSTPPPPLYQQLASITSSHASTQTNILPTTSPLEIEISLVNTQTCHLIEELKIQIETALLEYTGMDPMVRPLLPKLRESKKLHEYLDIFNKHILRQFYFIDSDLNHIHTLVYCSALVIAKNLGYKIHQRHPNIQIPNKKLHKPAWQIRLELDIKKLRADIGRVTQYVNNNRSPKLVEKVAKIFNNITVHSVHERNNTRPVEFLDTLKQKLSLKSQRLARYKKSLKRKEDNILFHRNEKGFYRSLKDQGQANTNGTPQKENLTKYWTELWKKRGNHNEEAEWLTEEANRWKHLKGMEFITITVENIKTITSLLKNWKAAGIDGVHNFWYKKFHSLHGILANLITDIINGEQELPKFITKGKTYMLAKSNNTANPSQYRPITCLPTIYKLITSCISHKIKEYLNQNNILAEEQKGCRQNHKGCKEQLVVDSIVLKHANIHKRNLHISYIDYKKAFDSVPHSWLIKILKIYKIHPFIISFLEKTMLDWRTTLHLSVGNDIVISDEISIENGIFQGDSLSPLWFCLALNPLSYLLNENRSCGYKLSGSSFITHLLYMDDIKIFASTKKNLQNLINITSQFSQDIKMSFGLDKCKILHISKGKIENSKDNIHEDIFDLLNSDETYKYLGIHQSTNINHMKIKKDLTKLYTKRLDLLCKRHLYSKNLLKSINTYAIPILSYTFGVVKWTCTDIKRLEIKTRTTLTKYNYLHPKSAIERMSLKRQMGGRGLIDLKLLWENQIKTLRDFFYTKFESDLHAAVTDLDDNYTPLNLKNRSLKFNSKNDHINSKLNDWRKKELHGRHIHDLEQSHVDLDASNEWLKLGYLFPETEGFMIAIQDQVIHTKNYCKFIIKDPLIENDKCRKCKRQPETVQHITGACPTLAQTDYTHRHNQISYIVHQKLAIIHKLLEGEPRPYYQYIPKPVLESPTHKIYYDRAILTDKTVHYNRPDITLIDKAAKQTYLIDITVPNTHNLQKSITEKIVKYTELKEEIIRIWKMKNVYIVPLVL

SEQ ID NO: 20279 - protein, 1170 aa, Graphium androcles
MLLYYQFRDKTTYCRKLYDNFALKYPHINVSAQRIADERCVIMRNKLLSDETINTYRQQFIITEVSELLSSEENNCSPQKFLVTPPNTLRSLSHSLCAPLITSQTSTSSPPIYHPQSSSILLPNTTFPHASTQTNTPLVTSQIDTEQKLDQAEIGQSIEELKIQLETALIKYVGTDPMVRPVLPKLRENKKLYKYLDLFNKHILTQFYSIDSDLNHIHTLVYCSALVIAKNLGYKIHQRYSNLQIPNNKSQKPAWQMRLELDIRKLRADIGRVTQYINNNRSTKLVKHVHKIFSNIPLHSVHERNNVRPEEFLDTLKQKLALKSQRLARYKKALHRKEDNILFYKNEKEFYRSLKVKTKQNSNGIPQKEILTKYWTDLWKKKENHNTHAEWLTEEENRWKHIKGMELVEITENDIGTITRRMKNWKAAGIDGVHNFWYKKFYILHTSLAYVITDIINGKQELPKFVTKGITYMLPKSNNTSNPSQYRPITCLPTIYKLITSCISQKISSYVLINNILAEEQKGCRQNHKGCKEQLVIDSIVLKHANIHKRNLHITYIDYKKAYDSVPHSWLIKILEIYKIHPCIISFLENTMSDWRTTLHLSVGNDTVVTDEISIENGIFQGDSLSPLWFCLALNPLSHLLNEKRSCGYKLTGSTSITHLLYMDDIKIFSKSKKDLQYLLNTTAKFSQDIKMSFGTDKCKILHISKGKIENNNNSPEENLFSLMEPNETYKYLGIHQSNSINHTQLKKDLTKLYTARLNVICKRQLNSKNLFKAINTFAIPVLSYTFGLIKWTCTDIKRLEIKTRTTLTHYNYLHPKSAIERMAVKRPIGGRGLIDLKLLLEGQVKNLRDFFYRKFESDLHAAIIELDDNYTPLNLKNRTTKFKSVQDHLNVKLNDWRKKELHGRHIHDLEQAHVDLDASNKWLKLGTLFPETEGFIIAIQDQVIHTKNYAKFIIKDRKIEHDKCRKCNRHPETIQHITGACPSLAQTDYTHRHNQVAYIIHQKLAVIHKLIEDKPRPYYQYVPKPVLENLTHKIYFDRAILTDKTIHYNRPDITFIDKTNKQTYLIDIAIPNTNNLQKAITEKITKYTELREEIRRIWKMKNVYIVPLVLSSTGVIPKHLHHYLNVIKLPENIYFNMQKAAILNTCRIVRKFLQEDDSQPLREYEHHLV

SEQ ID NO: 20280 - protein, 1271 aa, Fabriciana adippe
METRFNRIRIGPLPEGDRRGTSVAGHGRDSMLASDSQNSGCMGVGDRGDGVKSSDATAASSSRSRRRATALSDTAKIVSQEAFATQPTTTKAGKPRVRMKWTDDMNLFIMRTYYYITKLETDKTMYCTRLHEEFILKYPYMNVSAQRIADQRRVIIRNKYFTDEIIDNIKKEIAEQLQKENNENSPTQITHSITHTPIADNTQATQELTETSPIQSRLNTQTSSTVFTQYSHASTQTGTPNITLISSQYEYEQNTIYNTLNTQELINQLETAIARYNGTDPTCRPKLPKLKENKKLYNYLDLFNREILKKFYSIDCDINHIHTLIYCSALVISENLGYKISHQNTTFIEKHKKLQKPAWQIRIENDIRKLRADIGRVTQYINHNRSRKLVKKVEEIFNRIQVHSKHEKANSSPEEVLDTLKQKLALKSQRLTRYNKASQRKQDNKLFLNNEKRFYRSLNEGQSSNNNKLPEKTTLTNYWTDLWKKRDDYNDKANWIDEEVSRWNNVKGMEPVDLTKEDIEIVIKRMKNWKAAGIDNLHCFWFKKLYIFHDILARLITEIINGKQELPNFCTKGITYMLPKSENTADPSQYRPITCLPTIYKLITSCITQKISQHCTDYNILSEEQKGCRQNHKGCKEQLIIDSTILKHAQVKKRNLHISYIDYKKAFDSVPHSWLIRVLEIYKIHPQIVTFLRNAMKDWRTTLHLSIGNATITTEVIPIENGIFQGDSLSPLWFCLALNPLSNILNETANGYKLNNGTAVTHLMYMDDIKLFAKSKKHLKNLIDLTTQFSKDINMTFGLDKCKTLHIYKGKTQNNSFTTPTDNLFSQINANEIYKYLGINQSNTIDHTNIKKQLTTEYMRRLHLIFKKHLHSKNLFKAINTFAIPVLTYTFGVVKWTRTDINHLEIKTRTTLTKYNYAHPKSAVERMTLKRPKGGRGLIDLRILWEGQVIKMRDFFYTKSITSKLHSAIAELDDKYTPLDLLNRNLQYKTVNELGQEKIVTWRKKELHGRHLHDLEQAHIDMDASNKWLQTGILFPETEGFLIAIQDQVINTKNYRKYIIKDPTIADDKCRKCHKQPETIQHITGACPTLTQTDYTHRHNQIVNIIHQKLAIKHKLIPDTHTPYYKYTPNSVLENTNYKIYYDRAILTDKTIHYNRPDITFQDKVNKIVYIIEIAVPNTHNLIKTITEKINKYTELKEEITKMWKMKKVFIIPIVLSTTGIIPKHLHHSLKILDLSPNSYINIQKAAILNTCRIVRKFMQDDTNITYPQLQ

SEQ ID NO: 20281 - protein, 1268 aa, Boloria selene
METRLNKIRIGPLPEGDRRGTSVAGHGRDSMLASDSQNSGCMGVGDRGDGVRSSDATAANSSSRSRRRATALSEPAEIVSQEAFAIQPTTTKAGKPRVRMKWNDDMNLFIMRTYYYITKLETDNTMYCTRLHEEFISKYPHINVSAQRIADQRRVIIRNKYFTDETINNLKRDIAEQLEKEKNDSSHTQTTHSYTHTPTADNTLATQDLIVTSPSQLRLNTQTVNSTQYSHATTQTGTANITLITPEYDYEQNTIHKTLNKQELIDQLKTAIAKYNGTDPTFRPKLPKLKENKKLYNYLDLFNKEILGKFYSLDCDIIHIHTLIYCSALVISENLGYKISHQDTDLTVTRKKPQKPAWKIRIENDIKNLRADIGRVTQYINNNRSRKVMKKVEEIFNRIKVHSKHEKDNNSPEEFLDTLKQKLALKSQRLARYNKASQRKQDNRLFISNEKRFYRSLNKGQSSNNNELPEKTSFTNYWMDLWKKRDDYNNKADWIDEEVNRWNNVKGMEPVDLTKEDIEIVIKKMKNWKAAGIDNLHCFWFKKLHIFHDILARLITDIINGTQELPKFFTKGITYMIPKSENTADPSQYRPITCLPTIYKLITSCITQKINQHLTHYNILSEEQKGCRPNHKGCKEQLIIDSTILKHAQIKKRNLHISYIDYKKAFDSVPHSWLIRVLEIYKIHPCIVSFLRNAIKDWRTTLNLSLGNATLTTEEIPIDNGIFQGDSLSPLWFCLALNPLSNILNKTAYGYKLNNSTAITHLMYMDDIKLFAKSKKHLKNLIDLTTRFSKDINMTFGLDKCKTLHIYKGKMQNNYNTTSSDNSFTQINANDTYKYLGINQSNTIDHINIKKQLTTEYMRRLHLLFKKHLHSKNLFKAMNTFAIPVLTYTFGVVKWTRTDISRLEIKTRTTLTKYNYAHPKSAVERITVKRPKGGRGLIDLRMLWEGQVMEMRDFFHIKSITSKLHSAIIELDDKYTPLNLLNRNVQYKTVNELDREKTEVWRKKELHGRHLHDLEQAHIDMEASNKWLQLGSLFPETEGFLIAIQDQVIRTKNYRKYIIKDNTVTDDKCRKCHKQSETIQHITGACPTLTQTDYTHRHNQIAKIVHQKLATKHHLIPDTHTPYFRYTPNSVLENNNYKIYYDRAILTDKTIPCNRPDITLQDKINKVAYIIDIAVPNSHNILKTITEKINKYTELKEELVRIWKMKKVYIVPIVISATGIVPKHLCNSLKLLNLPPYLYISIQKAAILNTCRIVRKFLQDDDNRIDSE

SEQ ID NO: 20282 - protein, 1271 aa, Fabriciana adippe
METRFNRIRIGPLPEGDRRGTSVAGHGRDSMLASDSQNSGCMGVGDRGDGVKSSDATAASSSRSRRRATALSDPAKIVSQEAFATQPTTTKAGKPRVRMKWTDDMNLFIMRTYYYITKLETDKTMYCTRLREEFILKYPYMNVSAQRIADQRRVIIRNKYFTDETINNIKKEIAEQLQKENNENSPTQITHSITHTPIADNTQATQELTETSPTQSRLNTQTSSTVFTQYSHASTQTGTPNITLISPQYEYEQNTIYNTLNTQELINQLETAIARYNGTNPTCRPKLPKLKENKKLYNYLDLFNREILKKFYSIDCDINHIHTLIYCSALVISENLGYKISHQNTTFIEKHKKLQKPAWQIRIENDIRKLRADIGRVTQYINHNRSRKLVKKVEEIFNRIQVHSKHEKANSSPEEVLDTLKQKLALKSQRLARYNKASQRKQDNKLFLNNEKRFYRSLNEGQSSNNNKLPEKTTLTNYWTDLWKKRDDYNDKANWIDEEVSRWNNVKGMEPIDLTKEDIEIVIKRMKNWKAAGIDNLHCFWFKKLYIFHDILARLITEIINGKQELPNFCTKGITYMLPKSENTADPSQYRPITCLPTIYKLITSCITQKISQHCTDYNILSEEQKGCRQNHKGCKEQLIIDSTILKHAQVKKRNLHISYIDYKKAFDSVPHSWLIRVLEIYKIHPQIVTFLRNAMKDWRTTLHLSLGNATITTEVIPIENGIFQGDSLSPLWFCLALNPLSNILNETANGYKLNNGTAVTHLMYMDDIKLFAKSKKHLKNLIDLTTQFSKDINMTFGLDKCKTLHIYKGKTQNNSFTTPTDNLFSQINANEIYKYLGINQSNTIDHTNIKKQLTTEYMRRLHLIFKKHLHSKNLFKAINTFAIPVLTYTFGVVKWTRTDINRLEIKTRTTLTKYNYAHPKSAVERMTLKRPKGGRGLIDLRILWEGQVIKMRDFFYTKSITSKLHSAIAELDDKYTPLDLLNRNLQYKTVNELGQEKIVTWRKKELHGRHLHDLEQAHIDMDASNKWLQTGLLFPETEGFLIAIQDQVINTKNYRKYIIKDPTIADDKCRKCHKQPETIQHITGACPTLTQTDYTHRHNQIVNIIHQKLAIKHKLIPDTHTPYYKYTPNSVLENTNYKIYYDRAILTDKTIHYNRPDITFQDKVNKIVYIIELAVPNTHNLIKTITEKINKYTELKEEITKMWKMKKVFIIPIVLSTTGIIPKHLHHSLKILDLSPNSYINIQKAAILNTCRIVRKFMQDDTNITYPQLQ

SEQ ID NO: 20283 - protein, 1268 aa, Boloria selene
METRLNKIRIGPLPEGDRRGTSVAGHGRDSMLASDSQNSGCMGVGDRGDGVRSSDATAANSSSRSRRRATALSEPAEIVSQEAFAIQPTTTKAGKPRVRMKWNDDMNLFIMRTYYYITKLETDNTMYCTRLHEEFISKYPHINVSAQRIADQRRVIIRNKYFTDETINNLKRDIAEQLEKEKNDNSHTQTTHSYTHTPTADNTLATQDLIVTSPSQLRLNTQTVNSTQYSHATTQTGTANITLITPEYDYEQNTIHNTLNKQELIDQLKTAIAKYNGTDPTFRPKLPKLKENKKLYNYLDLFNKEILGKFYSLDCDIIHIHTLIYCSALVISENLGYKISHQDTDLTVTRKKPQKPAWKIRIENDIKNLRADIGRVTQYINNNRSRKVMKKVEEIFNRIKVHSKHEKDNNSPEEFLDTLKQKLALKSQRLARYNKASQRKQDNRLFISNEKRFYRSLNKGQSSNNNELPEKTSFTNYWMDLWKKRDDYNNKADWIDEEVNRWNNVKGMEPVDLTKEDIEIVIKKMKNWKAAGIDNLHCFWFKKLHIFHDILARLITDIINGTQELPKFFTKGITYMIPKSENTADPSQYRPITCLPTIYKLITSCITQKINQHLTHYNILSEEQKGCRPNHKGCKEQLIIDSTILKHAQIKKRNLHISYIDYKKAFDSVPHSWLIRVLEIYKIHPCIVSFLRNAIKDWRTTLNLSLGNATLTTEEIPIDNGIFQGDSLSPLWFCLALNPLSNILNKTAYGYKLNNSTAITHLMYMDDIKLFAKSKKHLKNLIDLTTRFSKDINMTFGLDKCKTLHIYKGKMQNNYNTTSSDNSFTQINANDTYKYLGINQSNTIDHINIKKQLTTEYMRRLHLLFKKHLHSKNLFKAMNTFAIPVLTYTFGVVKWTRTDISRLEIKTRTTLTKYNYAHPKSAVERITVKRPKGGRGLIDLRMLWEGQVMEMRDFFHIKSITSKLHSAIIELDDKYTPLDLLNRNVQYKTVNELDREKTEVWRKKELHGRHLHDLEQAHIDMEASNKWLQLGSLFPETEGFLIAIQDQVIRTKNYRKYIIKDNTVTDDKCRKCHKQSETIQHITGACPTLTQTDYTHRHNQIAKIVHQKLATKHHLIPDTHTPYFRYTPNSVLENNNYKIYYDRAILTDKTIPCNRPDITLQDKINKVAYIIDIAVPNSHNILKTITEKINKYTELKEELVRIWKMKKVYIVPIVISATGIVPKHLCNSLKLLNLPPYLYISIQKAAILNTCRIVRKFLQDDDNRIDSE

SEQ ID NO: 20284 - protein, 763 aa, Fabriciana adippe
MEPVDLTKEDIEIVIKRMKNWKAAGINNLHCFWFKKLYIFHDILARLITEIINGKQELPNFCTKGITYMLPKSENTADPSQYRPITCLPTIYKLITSCITQKISQHCTDYNILSEEQKGCRQNHKGCKEQLIIDSTILKHAQVKKRNLHISYIDYRKAFDSVPHSWLIRVLEIYKIHPQIVTFLRNAMKDWRTTLHLSIENATITTEVIPIENGIFQGDSLSPLWFCLALNPLSNILNETANGYKLNNGTAVTHLMYMDDIKLFAKSKKHLKNLIDLTTQFSKDINMTFGLDKCKTLHIYKGKTQNNSFTTPIDNLFSQINANEIYKYLGINQSNTIDHTNIKKQLTTEYMRRLHLIFKKHLHSKNLFKAINTFAIPVLTYTFGVVKWTRTDINHLEIKTRTTLTKYNYAHPKSAVERMTLKRPKGGRGLIDLRILWEGQVIKMRDFFYTKSITSKLHSAIAELDDKYTPLDLLNRNWQYKTVNELGQEKIVTWRKKELHGRHLHDLEQAHIDMDASNKWLQTGILFPETEGFLIAIQDQVINTKNYRKYIIKDPTIADDKCRKCHKQPETIQHITGACPTLTQTDYTHRHNQIVNIIHQKLAIKHKLIPDTHTPYYKYTPNSVLENTNYKIYYDRAILTDKTIHYNRPDITFQDKVNKIVYIIEIAVPNTHNLIKTITEKINKYTELKEEITKMWKMKKVFIIPIVLSTTGIIPKHLHHSLKILDLSPNSYINIQKAAILNTCRIVRKFMQDDTNITYPQLQ

SEQ ID NO: 20285 - protein, 818 aa, Phalera bucephala
MSKSNSNTPTNIPTENELKNYWTELWEHRGDHNKEADWIKEEERKWENIDEMDFSELTDKDIEAVTQNMQNWKAAGLDRVHNFWYKKFTSLRNMLAKIITTIINGNTKLPKFVTQGITYMLPKSSDTANPSQYRPITCLPTIYKLITACLAKKITRHIENNNILAEEQKGCRRNHKGCKEQLIIDSVVLKHASIHKSNLHIAYIDYKKAFDSVPHSWLIRILEIYKINPNIINFLKSAIKSWSTTLHVFNNSASISTEEILIKNGIFQGDALSPLWFCLSLNPLSNLLNKSNNGYKLTSDIAISHLMYMDDIKLFGNSKKDLDNLVDITTRFSQDIRMAFGLDKCRILHLPKGKAAKNVVQESTNANTFKLMEEKDLYKYLGIYQSSVINHIQIKKDLSNEYVRRLHLIFKRHLSAKHTFKAVNTYAIPVLTYSFGVIKWTKTDINKLEIKTRTIFTKHQYLHPKSAIQRMTVKREKGGRSLIDLKILWEKQIQNLRSFFYNKINNSNIHRAAVEIDNKFTPLNLNQTDIQFKTIDEHLREKIVTWRAKELHGRHLHDLEQPHIDLEASNKWLKLGALFPETEGFMVAIQDQVINTKNYKKYILKDPNIQTDKCRKCQRQSETIQHITSACPTLTQTDYTHRHNQVAYIIHQKLAIKHKLVPNKPSPYYQYTPKPVLENTSHKLYFDRAILTDKTIHNNRPDVTLIDKINKHVYLIDIAVPNTHNLHKTISEKIQKYTELKEEINRIWNMNRTTIVPLVLSSTGVIPKHLLHSLNIIDLPTSTYITMQKAAILNTCRIVRKFLQDDIQPIIGNGVHLA

SEQ ID NO: 20286 - protein, 1276 aa, Phalera bucephala
METRFSKTRKGPLPEGDRRGTPGASAGCHSMRTIGGRGLSRRVPTDKSITAEPLTDRQDSDIRADTPTEDVSQVAHASQPATTKAGKPRVRMRWTDDMNLFIMRTYYYTTKLETDRTMYVKKLHDQFVLEYPHLNVSAQRVSDQRRVILRNKLLSDDVIENLKLEVSRQLNNEEEETIQTLQIPDTQHLLCTNNDTVNSSPEHSQTSTTQNSSYHVSPTRGTQTLNTNSTVIQSSFSQTPSFSPNLSATVIQNTPPELTNISTETLIEELEAMLTRYSGTDPTVRPKLPRLRDSKKLYLLIKTFNKEILNKYFSSDSDLNHIHTLVYCSALVICTQLGYKIKNKSYSYNKPYTREKPPWQIRIEKDISNLRADIGRLIQYINNNNRSERLVRKVEQIFLKARVHSVHERNNMRPEEFLDTLKQKLALKSQRLARYKKSLQRKEDNKLFATNEKLFYRTMSKSNSNTPTNIPTENELKNYWTELWEHRGDHNKEADWIKEEERKWENIDEMDFSELTDKDIEAVTQNMQNWKAAGLDRVHNFWYKKFTSLHKMLAKIITTIINGNTKLPKFVTQGITYMLPKSSDTANPSQYRPITCLPTIYKLITACLAKKITRHIENNNILAEEQKGCRRNHKGCKEQLIIDSVVLKHASIHKSNLHIAYIDYKKAFDSVPHSWLIRILEIYKINPNIINFLKSAIKSWSTTLHVFNNSASISTEEILIKNGIFQGDALSPLWFCLSLNPLSNLLNKSNNGYKLTSDIAISHLMYMDDIKLFGNSKKDLDNLVDITTRFSQDIRMAFGLDKCRILHLPKGKAAKNVVQESTNANTFKLMEEKDLYKYLGIYQSSVINHIQIKKDLSNEYVRRLHLIFKRHLSAKHTFKAVNTYAIPVLTYSFGVIKWTKTDINKLEIKTRTIFTKHQYLHPKSAIQRMTVKREKGGRSLIDLKILWEKQIQNLRAFFYNKINNSNIHRAAVEIDNKFTPLNLNQTDIQFKTIDEHLREKIVTWRAKELHGRHLHDLEQPHIDLEASNKWLKLGALFPETEGFMVAIQDQVINTKNYKKYILKDPNIQTDKCRKCQRQSETIQHITSACPTLTQTDYTHRHNQVAYIIHQKLAIKHKLVPDKPSPYYQYTPKPVLENTSHKLYFDRAILTDKTIHNNRPDVTLIDKINKHVYLIDIAVPNTHNLHKTISEKIQKYTELKEEINRIWNMNRTTIVPLVLSSTGVIPKHLLHSLNIIDLPTSTYITMQNAAILNTCRIVRKFLQDDIQPIIGNGVHLA

SEQ ID NO: 20287 - protein, 1004 aa, Phalera bucephala
MLTHYSGTDPTARPKLPRLRDSKKLYQLIKTFNKEILNKYFSSDSDLNHIHTLVYCSALVICTQLGYKIKNKSYSYNKPYTREKPPWQIRIEKDISNLRADIGRLIQYINNNNRSERLVRKFEQIFLKARVHSVHERNNMRPEEFLDTLKQKLALKSQRLARYKKSLQRKEDNKLFATNEKLFYRTMSKSNSNTPTNIPTENELKNYWTELWEHRGDHNKEADWIKEEERKWENIDEMDFSELTDKDIEAVTQNMQNWKAAGLDRVHNFWYKKFTSLHKMLAKIITTIINGKTELPKFVSQGITYMLPKSSDTANPSQYRPITCLPTIYKLITACLAKKITRHIENNNILAEEQKGCRRNHKGCKEQLIIDSVVLKHASIHKSNLHIAYIHYKKAFDSVPHSWLIRILEIYKINPNIINFLKSAIKSWSTTLHVFNNSASISTEEIPIKNGIFQGDALSPLWFCLSLNPLSNLLNKSINGYKLTSDIAISHLMYMDDIKLFGKSKKDLVNLVDITTRFSQDIRMAFGLDKCRILHLPKGKAAENVVQESTTANTFKLMEEKDLYKYLGIYQSSVINHIQIKKDLSNEYVRRLHLIFKRHLSAKHTFKAVNTYAIPVLTYSFGVIKWTKTDINKLEIKTRTIFTKHQYLHPKSAIQRMTVKREKGGRSLIDLKILWEKQIQNLRAFFYNKINNSNIHRAAVKIDNKFTPLNLNQTDIQFKTIDEHLKEKIVTWRAKELHGRHLHDLEQPHIDLEASNKCLKLGALFPETEGFMVAIQDQVINTKNYKKYILKDPNIQTDKCRKCQRQSETIQHITSACPTLTQTDYTHRHNQVAYIIHQKLAIKHKLVPDKPSPYYQYTPKPVLENTSHKLYFDRAILTDKTIHNNRPDVTLIDKINKHVYLIDIAVPNTHNLHKTISEKIQKYTELKEEINRIWNMNRTTIVPLVLSSTGVIPKHLLHSLNIIDLPTSTYITMQKAAILNTCRIVRKFLQDDIQPIIGNGVHLA

SEQ ID NO: 20288 - protein, 1269 aa, Phalera bucephala
METRFSKTRKGPLPEGDRRGTPGASAGCHSMRTIGGRGLSRRVPTDKSITAEPLTDRQDSDIRADTPTEDVSQVAHASQPATTKAGKPRVRMRWTDDMNLFIMRTYYYTTKLETDRTMYVKKLHDQFVLEYPHLNVSAQRVSDQRRVILRNKLLSDDVIENLKLEVSRQLNNEEEETIQTLQIPDTQHLLCTNNDTVNSSPEHSQTSTTQNSSYHVSPTRGTQTLNTNSTVIQSSFSQTPSFSPNLSATVIQNTPPEITNISTETLIEELEAMLTRYSRTDPTVRPKLPRLRDSKKLYLLIKTFNKEILNKYFSSDSDLNHIHTLVYCSALVICTQLGYKIKNKSYSYNKPYTREKPPWQIRIEKDISNLRADIGRLIQYINNNNRSERLVRKVEQIFLKARVHSVHERNNMRPEEFLDTLKQKLALKSQRLARYKKSLQRKEDNKLFATNEKLFYRTMSKSNSNTPSNIPTENELKNYWTELWEHRGDHNKEADWIKEEERKWENIDEMDFSELTDKDIEAVTQNMQNWKAAGLDRVHNFWYNKFTSLHKMLAKIITTIINGNTKLPKFVTQGITYMLPKSSDTANPSQYRPITCLPTIYKLITACLAKKITRHIENNNILAEEQKGCRRNHKGCKEQLIIDSVVLKHASIHKSNLHIAYIDYKKAFDSVPHSWLIRILEIYKINPNIINFLKSAIKSWSTTLHVFNNSASISTEEILIKNGIFQGDALSPLWFCLSLNPLSNLLNKSNNGYKLTSDIAISHLMYMDDIKLFGNSKKDLDNLVDITTRFSQDIRMAFGLDKCRILHLPKGKAAKNVVQESTNANTFKLMEEKDLYKYLGIYQSSVINHIQIKKDLSNEYVRRLHLIFKRHLSAKHTFKAVNTYAIPVLTYSFGVIKWTKTDINKLEIKTRTIFTKHQYLHPKSAIQRMTVKREKGGRSLIDLKILWEKQIQNLRAFFYNKINNSNIHRSAVEIDNKFTPLNLNQTDIQFKTIDEHLREKIVTWRAKELHGRHLHDLEQPHIDLEASKKWLKLGALFPETEGFMVAIQDQVINTKNYKKYILKDPNIQTDKCRKCQRQSETIQHITSACPTLTQTDYTHRHNQVAYIIHQKLAIKHKLVPDKPSPYYQYTPKPVLENTSHKLYFDRAILTDKTIHNNRPDVTLIDKINKHVYLIDIAVPNTHNLHKTISEKIQKYTELKEEINRIWNMNRTTIVPLVLSSTGVIPKHLLHSLNIIDLPTSTYITMQKAAILNTCRIVRKFLQDDIQPII

SEQ ID NO: 20289 - protein, 1276 aa, Phalera bucephala
METRLSKTRKGPLPEGDRRGTPGASAGCHSMRTIGGRGLSRRVPTDKSITAEPLTDRQDSDIRADTPTEDVSQVAHASQPATTKAGKPRVRMRWTDDMNLFIMRTYYYTTKLETDRTMYVKKLHDQFVLEYPHLNVSAQRVSDQRRVILRNKLLSDDVIENLKLEVSRQLNNEEEETIQTLQIPDTQHLLCTNNDTVNSSPEHSQTSTTQNSSYHVSPTRGTQTLNTNSTVIQSSFSQTPSFSPNLSATVTQNTPPELTNISTETLIEELEAMLTRYSGTDPTVRPKLPRLRDSKKLYQLIKTFNKEILNKYFSSDSDLNHIHTLVYCSALVICTQLGYKIKNKSYSYNKPYTREKPPWQIRIEKDISNLRADIGRLIQYINNNNRSERLVRKVEQIFLKARVHSVHERNNMRPEEFLDTLKQKLALKSQRLARYKKSLQRKEDNKLFATNEKLFYRTMSKSNSNTPTNIPTENELKNYWTELWEHRGDHNKEADWIKEEERKWENIDEMDFSELTDKDIEAVTQNMQNWKAAGLDRVHNFWYKKFTSLHKILAKIITTIINGKTELPKFVTQGITYMLPKSSDTANPSQYRPITCLPTIYKLITACLAKKITRHIEKNNILAEEQKGCRRNHKGCKEQLIIDSVVLKHASIHKNNLHIAYIDYKKAFDSVPHSWLIRILEIYKINPNIINFLKSAIKSWSTTLHVFNNSASISTEEIPIKNGIFQGDALSPLWFCLSLNPLSNLLNKSNNGYKLTSDIAISHLMYMDDIKLFGKSKKDLVNLVDITTRFSQDIRMAFGLDKCRILHLPKGKAAENVVQESTNANTFKLMEEKDLYKYLGIYQSSVINHIQIKKDLSNEYVRRLHLIFKRHLSAKHTFKAVNTYAIPVLTYSFGVIKWTKTDINKLEIKTRTIFTKHQYLHPKSAIQRMTVKREKGGRSLIDLKILWEKQIQNLRAFFYNKINNSNIHRAAVEIDNKFTPLNLNQTDIQFKTIDEHLKEKIVTWRAKELHGRHLHDLEQPHIDLEASNKWLKLGALFPETEGFMVAIQDQVINTKNYKKYILKDPNIQTDKCRKCQRQSETIQHITSACPTLTQTDYTHRHNQVAYIIHQKLAIKHKLVPDKPSPYYQYTPKPVLENTSHKLYFDRAILTDKTIHNNRPDVTLIDKINKHVYLIDIAVPNTHNLHKTISEKIQKYTELKKEINRIWNMNRTTIVPLVLSSTGVIPKHLLHSLNIIDLPTSTYITMQKAAILNTCRIVRKFLQDDIQPIIGNGVHLA

SEQ ID NO: 20290 - protein, 1377 aa, Codatractus imalena
MRLRSRQIPQAGTREGESRPGPSSSGCPTYSGGGNVSHKTAQPNAAAVDQLHSISYSSLPTLSNHHSSSSSSSRSSAISPSIESIPGGDCPATTPGTDGRCHSKRFVSGKKLNRRALTRSSENARADYDDDTDRLTNSRSSSPYSTSTISYTPSKPTSPSTVSDLSIPTLDVAREANAFLPASTKAGKPRVRMSWSRDVNIFIMRAYYQVTKLETDMTTYRKQLHELFSRQYPHISVTEQRISDQRRTIVRNKLIPPNLLNNLKEDVRRQLMDDSELSKEPNLIVQIDPRNILQSNQIQSSPYDHLPSHPNERVTLLQNNTLPNTSSQASIQTSSYPNIPSSTQLAKSTQNTEITQTDASTQELIKHLETTLAKYTGTNPTDRPKLPKLKENKKLYEFVDVFNRQILSKFYSINSDLVSIHTLIYCSALVICEQLGYKIQIFNSNRKIKRTQKSEKPAWQRRIESDIQKLRADIGRLTQYINNNRSRKVVTAVENIFNRNKVHTVYEKNNVRPEEYLDTLKQKLRLKSQRLARYTKAFQRKEANKLFTTNERGFYRTVKANKQGCRTTELPQENELKNYWTDLWKKQQDHNHDADWIDREERRMENIDVMKLFDISKEDIESVTGRMKNWKAAGVDNIHGFWYKKFNTLHNILAKNITELIEGDQVLPEFLTKGITFMLPKSSNTTDPSQYRPITCLPTIYKLITSLITCNIYKHLEHNKILAEEQKGCRQKHRGCKEQLIIDSTILKYTSTHKRNLHISYIDYKKAFDSVPHSWLIHVLKLYKINPVIINFLDNTMSNWRTTLYLSNGTDTIRTDEIRIENGIFQGDSLSPLWFCLALNPLSNLLNSTKSGCKLNNNNSITHLMYMDDIKLFARTSKQLNNLIDITAKYSKDINMTFGLDKCKILHIHKGKVAHDDNNLGDTNIFEQFDPTDFYKYLGFYQSNTINHHQIKQELTSEYTRRVTLLCKRQLYSKNLFKAINTFAIPVLTYSFGIVKWTQTDINNLEIKTRTLLTKHNFLHPKSAIERISIKRQRGGRGLIDLKVLWMRQIQNLRDFFYSKSETSNIHLDIIKLDNNYTPLNLTKSNMQYNSQGACLNQKIDRWRSKVLHGRHLHDLELPHVDSEASNKWLQLGYLFPETEGFMVAIQDQVITTKNYKKNILKDPQIKNDKCRKCHRAAETIQHITSACTSLAQSDYTHRHNQIVNIVHQKMAIKYNLLLQSKIVPYYQYVPKSVLENQTHKMYFDRAILTDKTVHNNRPDITLIDKLKKQTYLIDVAVPNTNNLQKTITDKINKYTELKEETARIWKMEKVYIVPLVLSSTGVVPKHLSFYLNQIGLPNSLIFTMQKAAILNTCRIVRKFLQEDHLSEIPRNDLHLA

SEQ ID NO: 20291 - protein, 1309 aa, Limenitis camilla
MLSERNSTTPSPFHSFESPTSSPKSYIASSRSSSSSMSVDVVQEAHAIKTAPTTNNNRTRKRWTEEMNKFIWRTYLIATKLNSDKVYLDHLHREFSQKFPEMEASRQRLGDQCRAINRNKLLSQDILEQIKTEVKAYLQQTQNQHLIHNEPNTYHITLSNIQKKPMCRMRWTDELNEAIMRSYYRVTNLGINETAYRQLMHVDFITNFPSLGHLSEQRIADQKRVIIKNKFISNERLNSLKNEVGQELKQTTNCSPIITPTPNTVNLDNNMQPLSYVNESSQLDLTPSLTIQQSDQEINPESTQHNILISELVDKLENTITQYAEIDPGKRPKLPRLRENKKLYNFVDIFNKHILEKFYSTNFDLTKIHMLIYCSALVISEKLGYKIHEQNLSSIIGNRKLHKLTWQLRLENDVKKLRADIGRVTQYINNNRSRKVVKNVEEIFKRLTVHSKYDKNNMRPEEFLDTLKQKLAVKSQRLSRYNKALQRKQVNRLFNSNEKVFYRRLNDGQVNNECELPQKEALKSYWTDLWKKREDHNVEAKWIGEEETKWENLDGMESVAVTKEDIEIVTKRMKNWKAAGIDSVHNFWFKKFFVLHDKLANLITDLITGQNELPKFVTTGITYMLPKSNDTTNPSQYRPITCLPTIYKLITSCITFKINSYLIKNNILSEEQKGCRQDHKGCKEQLVIDSTVLKHAQIHKRNLFITYIDYKKAFDSVPHSWLVKVLKIYKIHPHIITFLENAMINWKTTLNITLGNSSLATDEIRIENGIFQGDSLSPLWFCLALNPLSSLLNKTNNGYKLTNNTVITHLMYMDDIKIFAKSQRDLKQLIDLTTQYSQDIKMTFGLDKCKSLYIQKGKIITSNDTTQEDNLFSLMEFNDTYKYLGIYQSNTINHVQIKLKLIKEYSNRLNLICKKQLYSKNLFKAINTYAIPVLTYTFGIIKWTQTDITKLERKTRTTLTKHNYLHPKSAIERMTVKRLKGGRGLINLKQLWEGQIKNLRDFFYTKSTSSHLHLAITEIDNKFTPLNLKNQEVQFKSVSEQLHEALNVWRNKELHGRHLIDLEQGHVDLEASNMWLKLGYMFPETEGFMISIQDQIINTKNYRKFIIKDNSIQNDRCRKCNSHSETIQHIISSCPTLAQTDYTHRHNQVAQIVHQKLAILYKLIQDNLLPYYKYIPKPVLESATHKMYFDRAILTDKTIHNNRPDITLVDKVNKEAYIIDISVPSTHNLQKTISDKITKYIELKQEIIRIWKLDKVHIVPLVLSSTGVIPKHLLSSLKQLKLPKSIFITMQKAALLNTCHIVRKFLQEE

SEQ ID NO: 20292 - protein, 1365 aa, Limenitis camilla
MVQTRSKSRPQVPGGASNSAGCDGSSSETGSRGAKNLRVGTDFRQTTQASCSKDLDMLSERNSTTPSPFHSFESPTSSPKSYIASSRSSSSSMSVDVVQEAHAIKTAPTTNNNRTRKRWTEEMNKFIWRTYLIATKLNSDKVYLDHLHREFSQKFPEMEASRQRLGDQCRAINRNKLLSQDILEQIKTEVKAYLQQTQNQHLIHNEPNTYHITLSNIQKKPMCRMRWTDELNEAIMRSYYRVTNLGINETAYRQLMHVDFITNFPSLGHLSEQRIADQKRVIIKNKFISNERLNSLKNEVGQELKQTTNCSPIITPTPNTVNLDNNMQPLSYVNESSQLDLTPSLTIQQSDQEINPESTQHNILISELVDKLENTITQYAEIDPGKRPKLPRLRENKKLYNFVDIFNKHILEKFYSTNFDLTKIHMLIYCSALVISEKLGYKIHEQNLSSIIGNRKLHKLTWQLRLENDVKKLRADIGRVTQYINNNRSRKVVKNVEEIFKRLTVHSKYDKNNMRPEEFLDTLKQKLAVKSQRLSRYNKALQRKQVNRLFNSNEKVFYRRLNDGQVNNECELPQKEALKSYWTDLWKKREDHNVEAKWIGEEETKWENLEGMESVAVTKEDIEIVTKRMKNWKAAGIDSVHNFWFKKFFVLHDKLANLITDLITGQNELPKFVTTGITYMLPKSNDTTNPSQYRPITCLPTIYKLITSCITFKINSYLIKNNILSEEQKGCRQDHKGCKEQLVIDSTVLKHAQIHKRNLFITYIDYKKAFDSVPHSWLVKVLKIYKIHPHIITFLENAMINWKTTLNITLGNSSLATDEIRIENGIFQGDSLSPLWFCLALNPLSSLLNKTNNGYKLTNNTVITHLMYMDDIKIFAKSQRDLKQLIDLTTQYSQDIKMTFGLDKCKSLYIQKGKTITSNDTTQEDNLFSLMEFNDTYKYLGIYQSNTINHVQIKLKLIKEYSNRLNLICKKQLYSKNLFKAINTYAIPVLTYTFGIIKWTQTDITKLERKTRTTLTKHNYLHPKSAIERMTVKRLKGGRGLINLKQLWEGQIKNLRDFFYTKSTSSHLHLAITEIDNKFTPLNLKNQEVQFKSVSEQLHEALNVWRNKELHGRHLIDLEQGHVDLEASNMWLKLGYMFPETEGFMISIQDQIINTKNYRKFIIKDNSIQNDRCRKCNSHSETIQHIISSCPTLAQTDYTHRHNQVAQIVHQKLAILYKLIQDNLLPYYKYIPKPVLESATHKMYFDRAILTDKTIHNNRPDITLVDKVNKEAYIIDISVPSTHNLQKTISDKITKYIELKQEIIRIWKLDKVHIVPLVLSSTGVIPKHLLSSLKQLKLPKSIFITMQKAALLNTCHIVRKFLQEE

SEQ ID NO: 20293 - protein, 1365 aa, Limenitis camilla
MVQTRSKSRPQVPGGASNSAGCDGSSSETGSRGAKNLRVGTDFRQTTQASCSKDLDMLSERNSTTPSPFHSFESPTSSPKSYIASSRSSSSSMSVDVVQEAHAIKTAPTTNNNRTRKRWTEEMNKFIWRTYLIATKLNSDKVYLDHLHREFSQKFPEMEASRQRLGDQCRAINRNKLLSQDILEQIKTEVKAYLQQTQNQHLIHNEPNTYHITLFNIQKKPMCRMRWTDELNEAIMRSYYRVTNLGINETAYRQLMHVDFITNFPSLGHLSEQRIADQKRVIIKNKFISNERLNSLKNEVGQELKQTTNCSPIITPTPNTVNLDNNMQPLSYVNESSQLDLTPSLTIQQSDQEINPESTQHNILISELVDKLENTITQYAEIDPGKRPKLPRLRENKKLYNFLDIFNKHILEKFYSTNFDLTKIHMLIYCSALVISEKLGYKIHEQNLSSIIGNRKLHKLTWQLRLENDVKKLRADIGRVTQYINNNRSRKVVKNVEEIFKRLTVHSKYDKNNMRPEEFLDTLKQKLAVKSQRLSRYNKALQRKQVNRLFNSNEKVFYRRLNDGQVNNECELPQKEALKSYWTDLWKKREDHNVEAKWIGEEETKWENLEGMESVAVTKEDIEIVTKRMKNWKAAGIDSVHNFWFKKFFVLHDKLANLITDLITGQNELPKFVTTGITYMLPKSNDTTNPSQYRPITCLPTIYKLITSCITFKINSYLIKNNILSEEQKGCRQDHKGCKEQLVIDSTVLKHAQIHKRNLFITYIDYKKAFDSVPHSWLVKVLKIYKIHPHIITFLENAMINWKTTLNITLGNSSLATDEIRIENGIFQGDSLSPLWFCLALNPLSSLLNKTNNGYKLTNNTVITHLMYMDDIKIFAKSQRDLKQLIDLTTLYSQDIKMTFGLDKCKSLYIQKGKTITSNDTTQEDNLFSLMEFNDTYKYLGIYQSNTINHVQIKLKLIKEYSNRLNLICKKQLYSKNLFKAINTYAIPVLTYTFGIIKWTQTDITKLERKTRTTLTKHNYLHPKSAIERITVKRLKGGRGLINLKQLWEGQIKNLRDFFYTKSTSSHLHLAITEIDNKFTPLNLKNQEVQFKSVSEQLHEALNVWRNKELHGRHLIDLEQGHVDLEASNMWLKLGYMFPETEGFMISIQDQIINTKNYRKFIIKDNSIQNDRCRKCNSHSETIQHIISSCPTLAQTDYTHRHNQVAQIVHQKLAILYKLIQDNLLPYYKYIPKPVLESATHKMYFDRAILTDKTIHNNRPDITLVDKVNKEAYIIDISVPSTHNLQKTISDKITKYIELKQELIRIWKLDKVHIVPLVLSSTGVIPKHLLSSLKQLKLPKSIFITMQKAALLNTCHIVRKFLQEE

SEQ ID NO: 20294 - protein, 1359 aa, Limenitis camilla
MVQTRSKSRPQVPGGASNSAGCDGSSSETGSRGAKNLRVGTDFRQTTQASCSKDLDMLSERNSMTPSPFHSFESPTSSPKSYIASSRSSSSSMSVDVVQEAHAIKTAPTTNNNRTRKRWTEEMNKFIWRTYLIATKLNSDKVYLDHLHREFSQKFPEMEASRQRLGDQCRAITRNKLLSQDILEQIKTEVKAYLQQTHNEPNTYHITLSNIQKKPMCRMRWTDELNEAIMRSYYRVTNLGINETAYRQLMHVDFITNFPSLGHLSEQRIADQKRVIIKNKFISNERLNSLKNEVGQELKQTTNCSSIITPTLNTVNLDNNMQPLSYVNESSQLDLTPSFTIQQSDQEINPESTQHNVLISELVDKLENTITQYAEIDPGKRPKLPRLRENKKLYNFVDIFNKHILEKFYSTNFDLTKIHMLIYCSALVISEKLGYKIHEQNLSSIIGNRKLHKLTWQLRLENDVKKLRADIGRVTQYINNNRSRKVVKNVEEIFKKLTVHSKYDKNNMRPEEFLDTLKQKLAVKSQRLSRYNKALQRKQVNRLFNSNEKVFYRRLNDGQVNNECELPQKEALKSYWTDLWKKREDHNVEAKWIGEEETKWENLEGMESVAVTKEDVEIVTKRMKNWKAAGIDSVHNFWFKKFFVLHDKLANLITDLITGQNELPKFVTTGITYMLPKSNDTKNPSQYRPITCLPTIYKLITSCITFKINSYLIKNNILSEEQKGCRQDHKGCKEQLVIDSTVLKHAQIHKRNLFITYIDYKKAFDSVPHSWLVKVLKIYKIHPHIITFLENAMINWKTTLNITLGNSSLATDEIRIENGIFQGDSLSPLWFCLALSPLSSLLNKTNNGYKLTNNTVITHLMYMDDIKIFAKSQRDLKQLIDLTTQYSQDIKMTFGLDKCKSLYIQKGKTITSNDTTQEDNLFSLMEFNDTYKYLGIYQSNTINHVQIKLKLIKEYSNRLNLICKKQLYSKNLFKAINTYAIPVLTYTFGIIKWTQTDITKLERKTRTTLTKHNYLHPKSAIERMTVKRLKGGRGLINLKQLWEGQIKNLRDFFYTKSTSSHLHLAITEIDNKFTPLNLKNQKVQFKSVSEQLHEALNVWRNKELHGRHLIDLEQGHVDLEASNMWLKLGYMFPETEGFMISIQDQIINTKNYRKFIIKDNSIQNDRCRKCNSHSETIQHIISSCPALAQTDYTHRHNQVAQIVHQKLAILYRLIQDNLLPYYKYIPKPVLESATHKMYFDRAILTDKTIHNNRPDITLVDKVNKEAYIIDISVPSTHNLQKTISDKITKYIELKQEIIRIWKLDKVHIVPLVLSSTGVIPKHLLSSLKQLKLPKSIFITMQKAALLNTCHIVRKFLQEE

SEQ ID NO: 20295 - protein, 1262 aa, Polygonus leo
MRSVSGEELNRRAPTGFSENATADHDETDRLTNSRSNSPYSASTTSYTPSVSTSPSTINNSPIPTLDVAREANAFLPASTKAGKPRVRMSWSKDVNIFIMRTYYYVTKLETDMTTYRKQLHELFSRQYPHISVSEQRISDQRRTIIRNKLLSLELLNQLKEEVWRNLQVVNENSENINVLYSNQTQYSPHTLQSSHSRAHVTLQNNTRTFSHASTQTVALPNIASQTQLTEITQNTDLIHTDISTQELINQLETTLAQFTYTDPTVRPKLPKLRGDKALYRFIDIFNKHILHRFYSTESDLLSIHTLIYCSALVICENLGYKIHTPKCNKLNSRKQKANRPAWQIRIESDIKKLRADIGRLTQYINNNRSKKVVTAVENIFHRNKVHTIHENNNIIPVEFLDTLKQKLRLKSQRLARYNKALQRKETNKLFTANEKRFYRKVKTGLGIHSDRTSGLPQQHELKSYWTDLWKKQKDHNQNADWIDSEESKLKNIEVMELHDISREDIESVTQRMKNWKAAGVDNIHGFWYKHFYALHNILAKNISALIKGDQALPRFLTKGITFMLPKSNDTANPSQYRPITCLPTIYKLITSLITCRINKHLENNKILIEEQKGCRQNHRGCKEQLIIDSTVLKHASTHKRNLHISYIDYKKAFDSVPHSWLIRVLNLYKVNPLIINFLENTMSDWRTTLHLSDGTNTITTDEIRIENGIFQGDSLSPLWFCLALNPLSNLLNNTKCGYKLNNISSITHLMYMDDIKLFAKNEKDLNKLIDITAKYSKDINMTFGLDKCRVLHINRGKIADSKSNSNDLQFFDHLEPESSYKYLGIYQSNTINHQQIKQDLSSEFAKRVNSLCKKQLYSKNLFKAVNTFAIPILTYSFGVIKWTQTDITNLEIKTRTLLTKHNYLHPKSAIERISIKRDRGGRGLIDLKLLWNNQIQNLRDFFYNKSKTSNIHAGIIQLDNNYTPLQLNNTDMQYDSRGHINNKIDRWRSKELHGRHLQDLELPHVHFEASNKWLKLGYLFPETEGFMVAIQDQVINTKNYRKFILKDSQIQNDKCRKCHRASETIQHITSACPSLAQSDYTHRHNQICNIVHQKLAIKYNFIQLNKVVPYYQYVPKTVLENQTHKIYFDRAILTDKTVHNNRPDITVVDKFKKQTYLIDIAVPNTNNLQKTITDKINKYTDLKEEIIRIWKMDKVCIVPLVLSSTGVIPKHLLHYLNQIALPSNLVIIMQKAAILNTCRIVRKFLQDDHSPENPQNDLHLA

SEQ ID NO: 20296 - protein, 1320 aa, Spodoptera frugiperda
METRLKRKLRGPLPGGDRRGTPGADAGCFSMRTVSGAELSRRAPTEKDATAEQEHSDSLNDYVSNAPFEPYSPSTVSYAPSLQSLPSSTSSSPPAVNFRDPPTPVLDVAREVNTFLPASTKAGKPRVRMSWSKDVNIFIMRTYYYITKLETDMTMYRKRLHELFSRQYPQITVSEQRVSDQMRTIVKNNRLSQDTLDQIKEEVRKVLEEEETNENLNFENMSEITYNTQSFIPSQAMEQSSNIQDISLITSSTDPNTQSSVTNLSCTQNVTFSQHASTQTNFTSESLLQHALITQPRETTEIDIATQELINQVETALIKYTGTDPTARPKLPKLRGNKKLYQLVDVFNKQVLNRFYSIDSDLICIHTLIYCSAYVICQNLGYKIRTHKPSSKFHKNLKPSWQIRLEIDIKNLRVDIGRLTQYINNNRSRKIIKTVERIFRKTKVHTIHEPDNIRPEEYLDTLKQKLILKSQRLARYLKSLRRKEDNKLFLTNEKNFYRSCRGNSIQSDSNIIPEPNELQSYWANLWEKQNDHNDSAEWIDEERNRMIDVEEMELTDITPEDIAIVTSRLKNWKAAGIDSVHNFWYKKFFTLHHILAKNVTELIRGEQPIPKFITKGITYMLPKSSDTSNPSQYRPITCLPTIYKLITSLITRITNSHLHRNNILSEEQKGCRQNHRGCKEQLIIDSTILKCVHAQKKNLSISYIDYRKAFDSVPHSWLLRILEIYKINPTVINFLKSAMSDWRTTLHLTNGTDSITTDEIHIRNGIFQGDSLSPLWFCLALNPLSHLLNNTDNGYKLNPDTAISHLMYMDDIKLFSKSKKCLESLIEITTRYSKDINMSFGLDKCRTLHIQKGKLISTVNNTDEPPATFESMGPTDTYKYLGVHQSNIIDHIKIKKDLSAQFAHRLNVLCKKQLHSKHLFKAINTFAIPVLTFSFGIVKWTRTDIRSLETKIRTTLTKHNYHHPKSAIERISINREKGGRGLIDLNVLWQGQIQNLRNFFFSKINTSNIHSAIVELDQNCTPLNLSNNNISFKTPQTHTTEKINRWRSKELHGRHLHDLEQPHIDIDASNKWLKLGSLFPETEGFMIAIQDQVINTRNYKKYILKDTTIQNDKCRKCHRAAETIQHITSACPNLAQTDYTHRHNQVARIIHQKLAIKCNLLPPKVEPYYQYSPKPVLENQSHKIYYDRAILTDKTIHYNRPDITMIDKQKKHTYIIDIAVPNTHNLQKTITEKIHKYTDLKEEIIRIWKMEKVYIVPLVLSSTGVVPKHLHHYLQQIQLPKNTYMTMQKATILNTCRIVRKFLQEDTSMEPNPINGTHLA

SEQ ID NO: 20297 - protein, 1358 aa, Spodoptera frugiperda
MPPKSNHTSESTIRFTWGADTRLIYYWRGQHGNGNPYTMETRLKRKLRGPLPGGDRRGTPGADAGCFSMRTVSGEELSRRAPTEKDATAELEHSDSLNDYVSNSPFEPYSPSTISYAPSLQSLPSSTSSSPPAVNFRDPPTPVLDVAREVNTFLPASTKAGKPRVRMSWSKDVNIFIMRTYYYITKLETDMTMYRKRLHELFSRQYPQITVSEQRVSDQMRTIVKNNRLSQDTLDQIKEEVRKVLEEEETNENLNFENMSEITYNTQSFIPSQAMEQSSNIQDISSITSSTDPNTQSSVTNLSCTQNVTFSQHASTQTNFTSESLLQQALITQPRETTEIDIATQELINQVETALIQYTGTDPTARPKLPKLRGNKKLYQLVDVFNKQVLNRFYSIDSDLICIHTLIYCSAYVICQNLGYKIRTHKPSSKFHKNLKPSWQIRLEIDIKNLRVDIGRLTQYINNNRSRKIIKTVERIFRKTKVHTIHEPDNIRPEEYLDTLKQKLILKSQRLARYLKSLRRKEDNKLFLTNEKNFYRSCRGNSIQSDSNIIPEPNELRRYWANLWEKQNDHNDSAEWIDEERNRMIDVEEMELTDITPEDIAIVTSRLKNWKAAGIDSVHNFWYKKFFTLHHILAKNVTELIRGEQPIPKFITKGITYMLPKSSDTSNPSQYRPITCLPTIYKLITSLITRITNSHLHRNNILSEEQKGCRQNHRGCKEQLIIDSTILKCVHTQKKNLSISYIDYRKAFDSVPHSWLLRILEIYKINPTVINFLKSAMSDWRTTLHLTNGTDSITTDEIHIRNGIFQGDSLSPLWFCLALNPLSHLLNNTDNGYKLNPDTAISHLMYMDDIKLFSKSKKCLESLIEITTRYSKDINMSFGLDKCRTLLIQKGKLITTVNNTDEPPATFESMGPTDTYKYLGVHQSNIIDHIKIKKDLSAQFAHRLNVLCKKQLHSKHLFKVINTFAIPVLTFSFGIVKWTRTDIRSLETKIRTTLTKHNYHHPKSAIERISINREKGGRGLIDLNVLWQGQIQNLRNFFFSKINTSKIHSAIVELDQNCTPLNLSNNNISFKTPLTHTTEKINRWRSKELHGRHLHDLEQPHIDIDASNKWLKLGSLFPETEGFMIAIQDQVINTRNYKKYILKDTTIQNDKCRKCHRAAETIQHITSACPNLAQTDYTHRHNQVARIIHQKLAIKCNLLPPKVEPYYQYSPKPVLENQSHKIYYDRAILTDKTIHYNRPDITMIDKQKKHTYIIDIAVPNTHNLQKTITEKIHKYTDLKEEIIRIWKMEKVYIVPLVLSSTGVVPKHLHHYLQQIQLPKNTYMTMQKATILNTCRIVRKFLQEDTSMEPNPINGTHLA

SEQ ID NO: 20298 - protein, 1192 aa, Spodoptera frugiperda
MSWSKDVNIFIMRTYYYITKLETDMTMYRKRLHELFSRQYPQITVSEQRVSDQMRTIVKNNRLSQDTLDQIKEEVRKVLEEEKTNENLNFENMSEITYNTQSFIPSQAMEQSSNIQDISSITSSTDPNTQSSVTNLSCTQNVTFSQHASTQTNFTSESLLQQALITQPRETTEIDIATQELINQVETALIQYTGTEPTARPKLPKLRGNKKLYQLVDVFNKQVLNRFYSIDSDLICIHTLIYCSAYVIGQNLGYKIRTHKPSSKFHKNLKPSWQIRLEIDIKNLRVDIGRLTQYINNNRSRKIIKTVERIFRKTKVHTIHEPDNIRPEEYLDTLKQKLILKSQRLARYLKSLRRKEDNKLFLTNEKNFYRSCRGNSIQSDSNIIPEPNELRSYWANLWEKQNDHNDSAEWIDEERNRMIDVEEMELPDITPEDIAIVTSRLKNWKAAGIDSVHNFWYKKFFTLHHILAKNVTELIRGEQPIPKFITKGITYMLPKSSDTSNPSQYRPITCLPTIYKLITSLITRITNSHFHRNNILSEEQKGCRQNHRGCKEQLIIDSTILKCVHTQKKNLSISYIDYRKAFDSVPHSWLLRILEIYKINPTVINFLKSAMSDWRTTLHLTNGTDSITTDEIHIRNGIFQGDSLSPLWFCLALNPLSHLLNNTDNGYKLNSDTAISHLMYMDDIKLFSKSKKCLEFLIEITTRYSKDINMSFGLDKCRTLHIQKGKLITTVNNTDEPPATFESMGPTDTYKYLGVHQSNIIDHIKIKKDLSAQFAHRLNVLCKKQLHSKHLFKAINTFAIPVLTFSFGIVKWTRTDIRSLETKIRTTLTKHNYHHPKSAIERISINREKGGRGLIDLNVLWQGQIQNLRNFFFSKINTSNIHSAIVELDQNCTPLNLSNNNISFKTTQTHTTEKINRWRSKELHRRHLHDLEQPHIDIDASNKWLKLGSLFPETEGFMIAIQDQVINTRNYKKYILKDTTIQNDKCRKCHRAAETIQHITSACPNLAQTDYTHRHNQVARIIHQKLAIKCNLLPSKVEPYYQYSPKPVLENQSHKIYYDRAILTDKTIHYNRPDITMIDKQKKHTYIIDIAVPNTHNLQKTITEKIHKYTDLKEEIIRIWKMEKVYIVPLVLSSTGVVPKHLHHYLQQIQLPKNTYMTMQKATILNTCRIVRKFLQEDTSMEPNPINGTHLA

SEQ ID NO: 20299 - protein, 807 aa, Spodoptera exigua
MPEQSELKTYWANLWEQRNDHNDNAKWIEEEINRMNGIEEMELADITPEDVTIVTKRMSNWKAAGIDHVHNFWYKKFFTLHHIIAKNVSEIIRGEQQIPKFITKGITYMLPKSNDTSNPSQYRPITCLPTIYKLITSLITRVINSHLHRNNILSEEQKGCRQNHRGCKEQLVIDSTILKHAHTQKKNISISYIDYRKAFDSVPHSWLLKILQIYKINPSIIFFLKDAMADWRTSLHLTNGSSTIIVEDIHIRNGIFQGDSLSPLWFCLALNPLSHLLNNTENGYKLNSDTAITHLMYMDDIKLFAKSGKYLQSLINLTAQYSRDINMSFGLDKCRALRIQKGKIVSPIENTDDDIFESMGPSDSYKYLGIHQSNIIDHTKIKKGLTTQFSKRLNIICKKQLHSKNLFKAINTFAIPVLTFSFGVIKWSKTDIRNLEIKIRTTLTKHKYLHPKSAIERISTKREKGGRGLIYLNVLWEGQIQNLRTFFFSKLSTSRIHAAIVDLDKNLTPLNLSNRSIAYKTVESHTTDKINRWRSKELHGRHLHDLEQPHIDMEASNKWLKFGSLFPETEGFMIAIQDQVINTKNFKKHILKDPTVQNDKCRKCHRAAETIQHITSGCPNLAQTDYTHRHNQVAHIIHQKLAVKYNLISPKIVPYYQYIPKPMLENQNNKIYYDRAILTDKTIHNNRPDITMIDKQKKHTYIIDIAVPNTHNLQKTITEKIHKYTDLKEEIIRIWKMDRVYIVPLVLSSTGIIPKHLHHYLQQIELSTNTYITMQKATILNTCRIVRKFLQEDASTEANPLNEIYLA

SEQ ID NO: 20300 - protein, 1258 aa, Azonax typhaon
MRLRNRQIPQAGTLTGESRPGPSGPGCPTYSGGGNVSHTAAQLSAVATGKTPSKNISGQKDTSSKGSCSRATTPAEDVLQEAPATQLATTKAGKPRVRMKWSEEMNLFIMRTYFYITKLETDRTMYCQKLHEQFDMKYPELKVTAQRVADQRRVIIRNKLISDEVINNLKREISDQLSSERIHNTSPQMLRSDSHTSPTQTHQINLEQITLYSNNFPNQSLTPSSTRHTLTTQENYEDISNHHVSTQTTTITDAISSIQQSEQVQNAKRDETNTQELTDEVETALIKYTGTDPSLRPKLPKLKENQKLYDLLDIFNKHILDKFFNTDSNMNTLHTLIYCSALVISKNLGYSIRTQYTTTQNRNKTPYKPAWQIRLELDVKKLRVDIGRLTQYINNNRSRKLVTEVENIFKRTITHTTHERNNTRPEEFLDTLKQKLTLKSKRLSRYKKALVRKEDNKQFDINEKGFYRALRKDIKNNERNKELPKTDELQEYWANLWKKRKDHNDSAKWLSDEVNRFESVKTMEFTEITRNDIETITKRLKNWKATGIDNVHNFWLKKLFTLHGALAKNITDLIKGTQKLPEFLTKGITYMLPKSNDTKNPSQYRPITCLPTMYKLITSCITLNINRHLQDNNILSEEQKGCRQNHKGCKEQLIIDSIVLKHANTQQRNLHISYIDYKKAFDSVPHSWLIQVLRIYKINPDIITFLKNAMSAWKTTICLSNGTDTIKTGEIHIENGIFQGDSFSPVWFCLVLNPLSYLLNNTNTGYKLNTNTSITHLLYMDDIKLFAKTAKDLSTLTNITAQYSKDINMSFGFDKCKTLHIHKGKVTTNNNIINESITFDQMESSDTYKYLGIQQSNIINHVQLKKDLFAEYSRRLHLICKKQLYSRNLFKAINSYAIPILTYSFGVIKWTRTDINRLEIKTRTTLTKYNYLHPKSAIQRISVKRQEGGRGLIDLNILLEGQVRNLRDFFYTKMTTSDLHLAIVDLDKNYTPLNLNNRNIQYKTPQIHNQEKFNRWRSKELHGRHLHNLEQVHVDIEASNKWLKLGSLFPETEGFMNAIQDQVINTKNYKKFIIKDRNIQNDKCRKCHRVSETIQHITGGCISLTQTDYTHRHNQVAYIVHQKLAIKHKLIETKMVPYYQYKPKPVLENQSHKIYFDRAILTDRTIHNNRPDITVIDKLNKLTYLIDIAVPNTHNLQKTITEKIHKYTELKEEIVRLWNMNRVYIVPLVLSSTGVIPKLFHHYLQQIDLHKNTYITMQ

SEQ ID NO: 20301 - protein, 1290 aa, Oechydrus chersis
MPMSNEALVSRNYAMRLRSRQLPQAGTHDHVGESRPEPSGSGCPTYSGGGNVSHMTTQYHTAAVNNLQTNTDTLTDGITIESSSSRSSCRRATTPVEDVSQAASATQPVTTKAGKLRVRMQWSNEINLFIMRTYYYITKLETDRTMYCQRLYEQFSIKFPYLKVSSQRVADQRRVILRNKLISDEDLNDLKIEVLNQLKTENRENTNLQISSPICLTQTLSQVNPHNNTPPIQPQTSTSPQNELHTQASTQNNIIPNTDSTLENETNQDGILIGTSILKQELIAQVETALTKYTGTDPECRPKLPKLKENHKLYELLGIFNEQILGRFHNIDSDINTVHTLIYCSALVISENLGYKIGTQHAVSQYKNKKRQNKPTWQIRLESDVTKLRKDIGRMTQYINNNRSRKVVSEVEKIFKRAKTHTIHERNNIRPEEFLDTLKQKLTLKSKRLARYNKALHRKEDNINFETNEKGFYRSLKNNITVDNITNNEMPQTDALKNYWTNLWKKQKDHNDGAEWITDEERRFENVETMTFNDIGKDHIGSITRKLKSWKAAGIDNVHNFWLKKLITLHKVIAKNINELIKGTQALPSFMTKGITYMIPKSNDTTNPSQYRPITCLPTIYKLITSCITHVINKHLYDNNILSEEQKGCRQNHKGCKEQLIIDTTVLKHANIRNRNLHISYIDYKKAFDSVPHSWLIQILKIYKINSNIINFLKNAMSDWKTTICVSNGIDSIKINEIRIENGIFQGDSLSPVWFCLAINPLSHLLNKTNNGFKLSKHTSITHLLYMDDIKLFAKTKKDLNNLTNITSQFSNDINMSFGLDKCRTLHIHKGKVTVFNNSTHEPTIFSQMEPTETYRYLGIQQSNYINHTQIKKDLSIEYTRRLNLICKKQLYSKNLFKAINTYAIPILTYSFGIIKWTRTDINRLEIRTRTTLTKHNYLHPKSAVERISIKRQEGGRGLIDLNMLWEGQVRNLRDFFYTKTSTSKIHSAIVEIDSNYTPLNLNNKDYQYKIPQIHNQEKINRWRSKQLHGRHIKDLEQAHVHFEASNKWLQLGSLFPETEGFIISIQDQVINTKNYKKFILKDRNIQTDKCRKCHCASETIQHITGACPVLAQTDYTHRHNQVAHYVHQKLSTKHKLITGKQPPYYQYKPKSVLETANHKIYFDRAILTDKTIHNNRPDITFIDKIKKEVYLIDIAIPNTHNLQKTITEKIHKYTDLKEEIHRIWNMNSIYIVPLVISSTGVIPKYLLHALKIIDLPQNTYMQMQKAAILNTCRIVRKFLQEDSATHLCG

SEQ ID NO: 20302 - protein, 1199 aa, Laothoe populi
MKWNDEINLFIMRTYFYITKLETDRTMYCKKLHDQFCTKYPELTVSAQKVADQRRVIIRNKLLSDNVIDNLKREVSDQLSRDEIENTTLQTLCPVNHTSMASGLQVNTNQPTQSMDSLVTQLSIMQTTRQTPSIQANDEAVSCHHASTQTSSIPSITTITQQIGRDQHTEPIELGTTTEALIDQVQTALTKYTGMDPSARPKLPRLKENKKLYELLDLFNKNILGRFFCITSDINTLHTLIYCSALVVTENLGYKIRTQHTSTLYKSKKFNKPAWQIRIESDIKSLRADIGRLTQYINNNRSRKVVTQVEKIFKRTKTHTKHERNNIRPEEFLDTLKQKLSLKSKRLARYTKSLQRKEDNKQFHTNEKEFYRLLKRDRTDIDRRKELPQAEELTNYWTNLWKKQKGHNDNAVWLSDEENRLTHIETMDFTEITRDDVEAVTKKIKNWKAAGIDNVHNFWLKKFFVLHDVLAKNITDLIKGDQELPKFITTGITYMLPKSNDTTNPSQYRPITCLPTIYKLITSCITRNINNHLQNNDILAEEQKGCRQNHKGCKEQLIIDSTVLKHANTHKRNLHIAFIDYKKAFDSVPHSWLIRVLEIYKINPYIINFLRSAMSDWRTTLCLSNGNDTIRTDEIHIENGIFQGDSFSPVWFCLALNPLSYLLNNTINGYKLNNSTSITHLLYMDDIKLFAKSDKDLKNLIDITTQFTNEINMTFGLDKCRTLHIHRGKFNNNFSSQINTEDGPMNSFACMEPAETYKYLGIQQSNNISHIQIKKDLSKEYARRLNLICKKQLYSKNLFKAINTYAIPILTYSFGIIKWTRTDINRLEILTRTTFTKHNYSHPKSAIERITIKRQQGGRGLIDLNVLWEGQLRNLRVFFYSKTATSHIHSAVVELDKNYTPLNLTNRDIQYKTPQIHIQDKIHRWRSKELHGRHIHDLEQTHVDTEASNKWMKLGSFFPETEGFMVAIQDQVINTKNYKKFIVKDPSIQNDKCRKCHRASETIQHITGACPSLAQTDYTHRHNQIAHIVHQKLAIKHKLIQSKPIPYYQYDPKPVLENQSHKIYFDRAILTDRTIHYNRPDITIIDKLNKLTYLIDIAVPNTHNLQKTITEKIHKYTELKEEIIRLWNMNKVYIVPLVLSSTGVIPKHLHHYLHQIDLHSNTYITMQKAAILNTCRIVRKFLQDDSLSADNPHYEFHLA

SEQ ID NO: 20303 - protein, 1321 aa, Spodoptera exigua
METRLKRKLRGPLPGDRRGTPGADAGCFSMQTVSGEELSRRAPTGSPEVTTAEQDTSDSLNDYVTNHIVEPYSPSTVSYTPSLQSLPSSTNSSPPPVRFRTSPTPVLDVAREVNTFLPASTKAGKPRVRMSWSKDVNIFIIRTYYYITKLETDKTTYRKRLHELFSRQYPQITVSEQRVSDQMRTIIKNKRLSQETLDHIKEEVRKTLEEEGSENFNIANTSDVIPTTSSLSFQPREQLLNFENVASIDSNITPNTNLSCNQHATFTQHATFTQHASTQTHFSQDLLSQQILISQPSQTSEVDVSAQTLINQLETVLIKYTGTDPTTRPKLPKLRETKKLYALVDIFNKQILNRFYSVDSDLVCIHTLIYCCAHVISQNLGYKIKTCKPTTKYNKNLDKPSWQTRLELDIKNLRVDIGRLTQYINNNRSRKIMKTVESIFRQTKVHTIHEPNNVRPEEYLDTLKQKLTLKSQRLARYLKALQRKEHNKLFTVNEKNFYRACRDSKIQNNSNNISPEPNELKHFWANLWEKQTHHNDTATWIDEERRRMADIDEMEFADITPEDITIVTSRMKNWKAAGVDNIHNFWYKKFFTLHVILAKNVTELIRGEQLMPKFITKGVTYMLPKSSDTSNPSQYRPITCLPTIYKLITSLITRNINSHLHRNNILSEEQKGCRQNHRGCKEQLVIDSTILKCAHTQNRNLSIAYIDYQKAFDSVPHSWLIKILQIYKISPIIITFLRIAMTDWRTTLYLNNGVSFITTDEIYIRTGIFQGDSLSPLWFCLALNPLSHLLNNSAHGYKLNSETAITHLMYMDDIKLFGKSKKCLQSLIDLTAKYSSDIQMTFGLDKCRTLHIYKGKIISTLSNTTEPDTFESMGSTDTYKYLGIHQSNTIDHINIKKHLSTEFSKRLNLLCKKQLYSKHLFKAINTFAIPILTFSFGVVKWTRTDIRNLEIKIRTTLTKYNYLHPKSAIERISVKREKGGRGLIDLNVLWEGQLKNLRNFFYSKITTSHIHSAIVNLDKNYTPLNLSNRDIIYKTPQTHVTDKLNRWRSKELHGRHLHDLEQPHIDIDASNKWLKLGSLFPETEGFMIAIQDQVINTKNYKKHILKDPTAQNDKCRKCYRAAETIQHITSACPNLAQTDYTHRHNQVTYIIHQKLAIKCNLLPPKVVPYYQYVPKPVLENQSHKIYYDRAILTDKTIHNNRPDITMIDKQNKYTYIIDIAVPNTHNLQKTISEKISKYTELKEEIIRIWKMNRVYIVPLVLSSTGIIPKHLQHYLQQIELPINTYITMQKAAILNTCRIVRKFLQDDANIEPIPPNEAHLA

SEQ ID NO: 20304 - protein, 1183 aa, Spodoptera litura
MSWSKDVNIFIMRTYYYITKLETDMTTYRKRLHELFSRQYPQITVSEQRVSDQMRTIVRNKRLSQDTLDHLKEEVRKTLEKEEEEVNENFNSINTSEVPNNSHIQSPLPSQTRGQSINSEDISFITSSILPNSQSSVTNLSQHASTQTNFSHESLPPLTLTTYPRETTEVDTITQELINQLETTLIQYTGTDPTARPKLPKLRENKKLYELVDIFNKQILNQFYSIDSDLICIHTLIYCSAYVICKNLGYKIKTYKRNTKYHKTLKPSWQIRLELDIKKLRASIGRLTQYINNNRSRKIVKAVEKIFRQTKVHTIHEPDNVRPEEYLDTLKQKLTLKSQRLKRYLKALQRKEDNKLFTTNERNFYRACRDNGIQNDNNNIIPEANDLKIFWANIWEKRSDHTDTAHWIDEEQNRMIEIDEMEFTDITPEDVTIVTARMKNWKAAGIDNIHNFWFKKFITLHHVIAKNVTELIRGEQPIPKFITKGVTYMLPKSNNTSDPSQYRPITCLPTIYKLITSLITRDINSHLHRNNVLSEEQKGCRQNHRGCKEQLIIDSTILKTAHSHKKDLSITYIDYKKAFDSVPHSWLIKILQIYKINPIIIDFLRNAMADWRTSLHLSNGANSITTEEIHIRNGIFQGDSLSPLWFCLALNPLSHLLNNTTNGFKLNSDTSITHLMYMDDIKLFANSKKGLQSLIELTTKFSADINMSFGLDKCRILHICKGKVMNTLNSTDEPNTFESMGPTDSYKYLGIHQSNTIDHIKIKKHLSLEFSKRLNLLCKKQLHSKNLFKAINTFAIPVLTFSFGVIKWTRTDIRSLEIKIRTTLTKHSYLHPKSAIERISVKREKGGRGLIDLNVLWEGQIQNLRNFFYSKVTTSHIHSAIIDLDKNCTPLNLSNRNINYKTPQNHITDKLNRWRSKELHGRHLHDLEQSHVDIDASNKWLKLGSLFPETEGFMIAIQDQVINTKNYKKHILKDPAVQNDKCRKCHRAAETIQHITSACPNLAQTDYTHRHNQVTRIIHQKLAIKYNLLPPKIVPYYQYVPMPVLENQNHKIYYDRAILTDKTIHNNRPDITMIDKQNKHAYIIDIAIPNTHNLQKTITEKIHKYTDLKEEIMRIWKMNRVYIVPLVLSSTGIIPKHLHHYLQQIDLPTNTYMTMQKATILNTCRIVRKFLQEDSNSEPNPQD

SEQ ID NO: 20305 - protein, 1321 aa, Spodoptera exigua
METRLKRKLRGPLPGDRRGTPGADAGCFSMQTVSGEELSRRAPTGSPEVTTAEQDTSDSLNDYVTNHIVEPYSPSTVSYTPSLQSLPSSTNSSPPPVRFRTSPTPVLDVAREVNTFLPASTKAGKPRVRMSWSKDVNIFIMRTYYYITKLETDKTTYRKRLHELFSRQYPQITVSEQRVSDQMRTIIKNKRLSQETLDHIKEEVRKTLEEEGSENFNIANTSDVIPTTSSLSFQPREQLLNFENVSSIDSNITPNTNLSCNQHATFTQHATFTQHASTQTHFSQDLLSQQILISQPSQTSEVDVSAQTLINQLETVLIKYTGTDPTARPKLPKLRENKKLYALVDIFNKQILNRFYSVDSDLVCIHTLIYCCAHVISQNLGYKIKTCKPTTKYNKNLDKPSWQTRLELDIKNLRVDIGRLTQYIKNNRSRKIMKTVESIFRQTKVHTIHEPNNVRPEEYLDTLKQKLTLKSQRLARYLKALQRKEHNKLFTVNEKNFYRACRDSKIQNNSNNISPEPNELKHFWANLWEKQTHHNDTATWIDEERSRMADIDEMEFADITPEDITIVTSRMKNWKAAGVDNIHNFWYKKFFTLHAILAKNVTELIRGEQLMPKFITKGVTYMLPKSNDTSNPSQYRPITCLPTIYKLITSLITRNINSHLHRNNILSEEQKGCRQNHRGCKEQLVIDSTILKCAHTQNRNLSIAYIDYQKAFDSVPHSWLIKILQIYKISPIIINFLRIAMTDWRTTLYLNNGVSFITTDEIYIRTGIFQGDSLSPLWFCLALNPLSHLLNNSAHGYKLNSETAITHLMYMDDIKLFGKSKKCLQSLIDLTAKYSSDIQMTFGLDKCRTLHIYKGKIISTLSNTTEPDTFESMGSTDTYKYLGIHQSNTIDHINIKKHLTTEFSKRLNLLCKKQLYSKHLFKAINTFAIPILTFSFGVVKWTRTDIRNLEIKIRTTLTKYNYLHPKSAIERISVKREKGGRGLIDLNVLWEGQLKNLRNFFYSKITTSHIHSAIVNLDKNYTPLNLSNRDIIYKTPQTHVTDKLNRWRSKELHGRHLYDLEQPHIDIDASNKWLKLGSLFPETEGFMIAIQDQVINTKNYKKHILKDPTAQNDKCRKCYRAAETIQHITSACPNLAQTDYTHRHNQVTYIIHQKLAIKCNLLPPKVVPYYQYVPKPVLENQSHKIYYDRAILTDKTIHNNRPDITMIDKQNKYTYIIDIAVPNTHNLQKTISEKISKYTELKEEIIRIWKMNRVYIVPLVLSSTGIIPKHLQHYLQQIELPINTYITMQKAAILNTCRIVRKFLQDDANIEPIPPNEAHLA

SEQ ID NO: 20306 - protein, 1184 aa, Euriphellus phraxanor
MRLRNRQIPQAGTREGESRPGPSGSGCPTYSGGGNVSHRTTQSRTVVVEKEPSRHSSSSISSTSTHSQFQSGGRRRAPTGSENVTGDNYDEIDRLTDNSSSSLYSPSTISYTSSIATSPSSISDPPIPTSDVAREATAFLPASTKAGKPRVRMSWSKDVNIFIMRTYYQITKLETDMTTYRKQLHELFSRQYPYISVTEQRISDQRRTIIRNKLLPQKLLDQLKEEVQNQLVSVIEHTCDPNQIILSQNSSHSNQIESESSTQLPHALTSQLQTNTQTSHTFSHDSTQTTIFSNIVPLTEFTENSELNQIDISTQELINQVETTLAQYTGTDPTLRPKLPKLRENKKLFSLIEVFNKHILHRFNSIDSDLVAIHTLIYCSALVICENLGIKIRPFNSNNQIRKREFIKPSWQIRIESDIKKLRVDIGRVTQYLNNNRSRKVVAAVDNIFKRNKIHTSHENNNSRPEEYLDTLKQKLRLKSQRLARYIKALQRKEDNKLFTVNEKGFYRTIKIDRQSNNTSEMPQETDLKNYWSEIWKKQKHHNHNAEWIGREESKMENISVMELFDITKEDIRLVTRRMKNWKAAGIDNIHNFWYKKFYTLHNTLAKNIIELIKGEQSIPKFITKGITFMLPKSSDTTNPSQYRPITCLPTIYKLITSLITRNIIKHLEHNNILSEEQKGCRQRHKGCKEQLIIDSVVLKHANTHKRNLHISYVDYKKAFDSVPHSWLIQVLKLYKINPVIISFLENAMSDWRTTLYLSNDTTTITTDEIAIRNGIFQGDSLSPIWFCLALNPLSNLLNNTNSGYKLNNTNSITHLMYIDDIKLFARTGKELTNLINITAQYSQDINMTFGLDKCRILHIHRGKVAGTINNSGETEAFKQLDPGDCYKYLGLYQSNTIDHQQIKKDLLLEYIRRLNLLCKRQLHSKNLFKAINTFAIPILTYSFGIIKWTQTDINNLEIKSRTSLTKYNNLHPKSAIQRMSIKRQLGGRGLIDIKMLWEGQVKNLRDFFYTKSITSNIHLDIIKLDNNHTPLNLNNRNIQYSTQKDYTKYKIDKWRSKELHGRHLQDLEMTHIDLEASNKWLKLGYLFPETEGFMIAIQDQVINTKNYKKIILKDPQVKNDKCRKCHRASETIQHITSACPSLAQSDYTHRHNQVAYIIHQKLAVKYNLIKHPKIVPYYKYVPK

SEQ ID NO: 20307 - protein, 1322 aa, Spodoptera exigua
METRLKRKLRGPLPGDRRGTPGADAGCFSMQTVSGEELSRRAPTGSPEVTTAEQDTSDSLNDYVTNHIVEPYSPSTVSYTPSLQSLPSSTNSSPPPVRFRTSPTPVLDVAREVNTFLPASTKAGKPRVRMCAWSKDVNIFIMRTYYYITKLETDKTTYRKRLHELFSRQYPQITVSEQRVSDQMRTIIKNKRLSQETLDHIKEEVRKTLEEEGSENFNIANTSDVIPTTSSLSFQPREQLLNFENVTSIDSNITPNTNLSCNQHATFTQHATFTQHASIQTHFSQDLLSQQILISQPSQTSEVDVSAQTLINQLETVLIKYTGTDPTARPELPKLRETKKLYALVDIFNKQILNRFYSVDSDLVCIHTLIYCCAHVISQNLGYKIKTCKPTTKYNKNLDKPSWQTRLELDIKNLRVDIGRLTQYINNNRSRKIMKTVESIFRQTKVHTIHEPNNVRPEEYLDTLKQKLTLKSQRLARYLKALQRKEHNKLFTVNEKNFYRACRDSKIQNNSNNISPEPNELKHFWANLWEKQTHHNDTATWIDEERSRMADIDEMEFADITPEDITIVTSRMKNWKAAGVDNIHNFWYKKFFTLHAILAKNVTELIRGEQLMPKFITKGVTYMLPKSSDTSNPSQYRPITCLPTIYKLITSLITRNINSHLHRNNILSEEQKGCRQNHRGCKEQLVIDSTILKCAHTQNRNLSIAYIDYQKAFDSVPHSWLIKILQIYKISPIIINFLRIAMTDWRTTLYLNNGVSFITTDEIYIRTGIFQGDSLSPLWFCLALNPLSHLLNNSAHGYKLNSETAITHLMYMDDIKLFGKSKKCLQSLLDLTAKYSSDIQMTFGLDKCRTLHIYKGKIISTLSNTTEPDTFESMGSTDTYKYLGIHQSNTIDHINIKKHLATEFSKRLNLLCKKQLYSKHLFKAINTFAIPILTFSFGVVKWTRTDIRNLEIKIRTTLTKYNYLHPKSAIERISVKREKGGRGLIDLNVLWEGQLKNLRNFFYSKITTSHIHSAIVNLDKNYTPLNLSNRDIIYKTPQTHVTDKLNRWRSKELHGRHLHDLEQPHIDIDASNKWLKLGSLFPETEGFMIAIQDQVINTKNYKKHILKDPTAQNDKCRKCYRAAETIQHITSACPNLAQTDYTHRHNQVTYIIHQKLAIKCNLLPPKVVPYYQYVPKPVLENQSHKIYYDRAILTDKTIRNNRPDITMIDKQNKYTYIIDIAVPNTHNLQKTISEKISKYTELKEEIIRIWKMNRVYIVPLVLSSTGIIPKHLQHYLQQIELPINTYITMQKAAILNTCRIVRKFLQDDANIEPIPPNEAHLA

SEQ ID NO: 20308 - protein, 1269 aa, Myscelus epimachia
MRRSSRIKNKNFAQSEIVAEITSHLSNRTTNPMDSLTLDHKENTHVHNSNNIIPITPAKEVSQEANATQPVTTKAGKTRVRMQWNDDINTFIMRTYFYITKLETDRTMYCKKLHEQFSIRYPHLNVSAQRIADQRRAILRNKMLPDDLINNLKQEISEQLRKEETANLPLQVSDTITSTTDISPSSTQQELVLQAHVFTQSNEIPNITSITQQTQNTETILPDIPTQQLIDLLETAFVQYNGTDPTVRPKLPKLKESKKLYELIDIFNKQVLHNFTSIDSDINSIHTLIYCSALVISEYLGYKIRTHNPNIKPNHKPQKPAWQIRLEINIKKLRADIGRLTQYINNNRSRKIIVAVENIFRNTKIHTIHERNNIRPEEYLDTLKQKLTLKSQRLARYLKALQRKQDNKTFTINEKEFYRILKNNSGQLNKDNELPQPEELKNYWTDIWRKSKDHYNNAKWAIDEENRMAKVVTMEFTNINREDIQLTTTRMKNWKAAGIDRIHNFWYKKFSTLHSILAKNITELINGDQELPKFITKGITYMLPKSSDTAAPSQYRPITCLPTIYKLITSVITHKINKHLKHNNILSEEQKGCRQNHKGCKEQLVIDTTILKHAHTQKRNLHISYIDYKKAFDSVPHSWLIHILHIYKINPVIVNFLKNAMSNWRTTLYLSNGADAIITDEIPIGNGIFQGDSLSPLWFCLALNPLSNLLNTSPNGYKLNTGTSITHLMYMDDIKLFAKTAKCLKNLIEITAQYSQDINMTFGLDKCRTLHIHQGRIKNNSSLIDEPNSFITMDPFDTYKYLGIYQSNTINHIKIKNDLKSEYTKRLNLICKKQLYSKNLFKAINTFAIPVLTYSFGVVKWTRTDINKLEIKTRTTLTKHNYLHPKSAIERISVKRHKGGRGLIDLTSLWTTQIKNLRDFFYSKSTTSTLHSSIIQLDNKFTPLNLNNKELIHKLPQVHLQEKMGRWRSKELHGRHLHDLEQTHIDTISSNQWLKLGSLFPETEGFMLAIQDQIINTKNYKKIILKDPNTQNDKCRKCHRASETIQHITSACPNLAQTDYTHRHNQIAHIVHQKLSIKHKLITDKTIPYYQYVPKPVLENQSHKIYFDRAILTDKTVHNNRPDITVIDKINKNTYLIDIAVPNTHNLQKTITDKIHKYTELKEEIVRIWKMNKVYIVPLVLSSTGIIPKHLHHYLQLIGLPRNIYMTMQKAAILNTCRIVRKFLQEDTVTFEINKLELVWARGFYYNPKSKSFISRTNKLQIKKKKNII

SEQ ID NO: 20309 - protein, 1275 aa, Crocallis elinguaria
METRNRKLRIGPLPEGDRRGTSVAGHGRDSMLASDSRLGGWAGVGDAGGRGMSSGITADSTGGQDSSSSCIRSATPAEDVSQEAHAAKPATTKAGKPRVRMKWSEEINLFIMRTYFYVTKLETDRTTYCKKLHDQFIIKYPDLNITAQRIADQRRVIIRNKLLSDDVITNLKQEISEQLIREERENSPIQVSNSIPSISQVDTFQFTSELQASSSLQTSPIPNSMTVSSHVSTQTNTLLNIVSIIQNIESEQNSEMSEIDVPTQKLIEQIETTLLQYTGTDPTVRPKLPRLKENRKLYELVDIFNKQILGRFFSIDSDINTVHTLVYCSALVICESLGYKIRTHQTQARNRKPQKPAWQIRLELDIKNLRADIGRLTQYINNNRSRKVVAGVEDIFKRTKVHTIHERNNIRPEEYLDTLKQKVTLKSQRLARYIKALQRKEDNKQFTINEKGFYREFKNDSSQSNSNNEIPQADELKNYWADLWKKQNDHNDSAEWIGIEENRMENKETMEFTDITRDDIEAVTIKLKNWKAAGIDNIHNFWYKKFVALHDILAKNITELIKGEQELPQFITKGITFMLPKSNDTANPSQYRPITCLPTIYKLITACITRNINRHIEHNNILSEEQKGCRRNHMGCKEQLVIDTTVLKHANTKKRNLHISYIDYKKAFDSVPHSWLIRVLHIYKINPIIINFLKNAMLEWKTTLRLSNGTNTINTDEINIENGIFQGDSLSPLWFCLALNPLSYLLNNTNSGYKLNDDTTITHLMYMDDIKIFAKSQKDVKNLIDITAKYSQDINMTFGLDKCKTLHIHRGKISKNNHNSDEPISFAQMEPEDTYKYLGIYQSDNINHMQIKKDLSEEYSRRLNRICKKQLYSKNLFKAINTFAIPALTYSFGVVKWTRTDINRLEIKTRTTLTKCNYLHPKSAIERISLKRPNGGRGLIDLKLLWEGQIRNLRDFYYKKSTTSKLHSAIVELDTNYTPLNLNNRNIEYKSPQTQTNEKIDRWRTKELHGRHLHDLEQGHVDSDASNKWLKLGSLFPETEGFMIAVQDQVINTKNYKKYILKDPNIQNDKCRKCHRASETIQHITSACPSLAQTDYTHRHNQIAHIVHQRLAIKHKLVQTKAVPYYQYAPKPVLENLSHKIYFDRAILTDKTVHYNRPDITMIDKLNKIVYLIDIAVPNTHNLQKTITEKIHKYTELKEEIIRIWKMNKVYIVPLVLSSTGVIPKHLLHYLQQIELPKNLFMTMQKAAILNTCRIVRKFLQDDQSENPQSELHLA

SEQ ID NO: 20310 - protein, 1265 aa, Ernsta colotes
MRRSNRIKNKNSAQSETVAETTPDERTSSPIESISASSHSYSLSTSPSTLSNSSFQRDLLPLNNNNNSISPIILAEDVSQEAHATQPATTKAGKPRVRMQWNSEINTFIMRTYFYMTKMETDRTMYCKKLYDQFTAKYPHLNVSAQRIADQRRVILRNKLLSNDVINALKLEISEQLRKEEITNLTAQTGEITAQNEISASIVQACHESASETSTYQKATHAHISTQTNEISNITSITEHIENTPNTDNNTNNTINILTQELTEHLETTLMQYTGIDPTVRPKLPRLKPSKKLYKCIDVFNKHILGNFLSFDSDINTVHTLVYCSALVICEHLGYEIRTYNASSRRNCQPPKPAWQTRIESDIQSLRADIGRLSQYIVNNIRSKKVVAAVENIFRKTKIHTIHERNNFRPEEYLDTLKQKLTLKSQRLKRYLKALRRKEDNKIFATNEKAFYRTLNDNNLTQINTKNGVPQTNELKKYWTDLWKKQGDYNNNAEWIMDEENRMSNMETMEFTNINREDIEITTRRMKNWKAAGIDNIHNFWYKKFSVLHYILAKNITELIKGEQELPKFITKGLTYMLPKGSDTNNPSQYRPITCLPTIYKLITSLITYKINKHLTFHNILSEEQKGCRQNHKGCKEQLIIDTTILKHSHFHKRNLHISYIDYKKAFDSVPHSWLVRVLQIYKINPIIINFLKIAMSNWRTTLHLSNGNDNITTDEIPIETGIFQGDSLSPLWFCLALNPLSNLLNSSSNGYKLDTSTSITHLMYIDDIKLFAKTDKCLKNLIKITTQYSQDINMTFGLDKCRTIHISKGKIKNNSNSVVDPEAFISLGPNDTYKYLGIHQSNTINHIKIKQDLTHEYTRRLNLLCKKQLYSKNLFKAINTFAIPVLTYSFGVVKWSRTDINNLEIKTRTTLTKYNYLHPKSAIERISVKRDKGGRGLIDLTLLWEGQVQNLRNFFYYKSATSTIHASITEVDKNFTPLNLNTKDLNFKLPQAHFEEKLDKWRSKELHGRHLHDLEQPHVEPESSNKWLKLGSLFPETEGFMIAIQDQVIATKNYKKVILKDPNTQNDKCRKCHRASETIQHITSACPNLAQTDYTHRHNQVAHIIHQKLSTKHKLITDKLCPYYQYVPKPVLENQSHKIYFDRAILTDKTIHNNRPDITMIDKANKITYLIDIAVPNTNNLQKTLIDKIHKYTELKEEVLRIWKMQKVYIVPLVLSSTGIIPKHLHHYLKQIDLPENTYITMQKAAILNTCRIVRKFLLEDITD

SEQ ID NO: 20311 - protein, 1258 aa, Hypena proboscidalis
MEMILRNKRIGPLSGGERRSTPGADAGCYSMRTVSGEELNRRAPSGSSENVTANTSSRRSSRAVTPAMAVSQEALATQPVTTKAGKPRVRMQWSDEINKFIIRTYFYITKLETDRTMYCKKLHDQFNLKYPHLNLSGQRIADQRRAIIRNRMLSETVINNLKEEVAEQLAREESENSQLQLSNQLPSLSNSLEASLITLENSSQTTQITPSEILHLQQNTTSITQQTESTQNSVAIHLDISAEDLITQIETALVLYTGTDPTVRPKLPRLKENKKLYGFIDICNKQVLPRFISLESDLIAIHTLLYCSALVISENLGYKIRYNSNTQYRTRTLRKPAWQVRLERDIDHLRSDIGRLTQYINNNRSRKVVAAAERIFKMTKIHTIHERNNIRPEEYLDTLKQKLTVKSQRLARYIKSLRRKEDNKNFTFNEKGFYRACKDNNTPTNVQCALPEVRELENYWADLWKKQYNHNDGADWIGKIESSMSNIDTMELYDITEEDVSVVTRRMKNWKAAGVDGVHNFWYKKCFALHSILAKNITDIISGHQELPKFLTKGITYMLPKSNDTHNPSQYRPITCLPTIYKLITSLITRSINSHIIRNNILSEEQKGCRQNHKGCKEQLIIDSTVLKNAHTHKRNLHISYIDYKKAFDSVPHSWLVKVLHIYKINPTIITFLENAMSEWRTTLHLRIGTDEITTDEIHIGNGIFQGDALSPLWFCLALNPLSHILNDTANGYKLNTNTSLTHLMYMDDIKLFAKSDKCLKNLLEITTQFSQDINMSFGLDKCKTLHIHKGKIKNSNPDESSSLAFEVMDPTDSYKYLGIHQSNVINHVQIKKRLTAQYFTRLNLISKKHLNSKNLFKAINTFAIPILTFSFGVVKWTRSDINNLEVKTRKILFKHSYLHPKSAIERVSVARLKGGRGLIDLKQLWEGQVKNLREFFYNKAIDSNIHSATIDLDNNFTPLNLKNKDIIYRKPQEHASDKLSRWCSKELHGRHFNDLQQPHVDSDASNQWLKLGSLFPETEGFMIAIQDQVINTKNYKKFILKDPSIRNDKCRKCHRASETIQHITSACPTLAQTDYTHRHNQVAHIVHQKLAIKHNLIPSKVTPYYQYTPKPVLENQSHKIYFDRAILTDKTIHNNRPDITLIDKENKHTYLIDIAVPNSHNLQKTITNKIHKYTELKEEIIRIWKMSKVSIVPLVLSSTGIIPKSLRHYLQQIDIPINIYMTMQKAVILNTCRIVRKFLQDDYNPNEPIPQHELHLV

SEQ ID NO: 20312 - protein, 1275 aa, Crocallis elinguaria
METRNRKLRIGPLPEGDRRGTSVAGHGRDSMLASDSRLGGWAGVGDAGGRGMSSGITADSTGGQDSSSSCIRSATPAEDVSQEAHAAKPATTKAGKPRVRMKWSEEINLFIMRTYFYVTKLETDRTTYCKKLHDQFIIKYPDLNITAQRIADQRRVIIRNKLLSEDVITNLKQEISEQLIREERENSPIQVSNSIPSISQVDTFQFTSELQALSSLQTSPIPNSMTISSHVSTQTNTLPNIVSIIQNIESEQNSEMSEIDVPTQKLIEQIETTLLQYTGTDPTVRPKLPRLKENRKLYELVDIFNKQILGRFFSIDSDINTVHTLVYCSALVICESLGYKIRTHQTQARNRKPQKPAWQIRLELDIKNLRADIGRLTQYINNNRSRKVVAGVEDIFKRTKVHTIHERNNIRPEEYLDTLKQKVTLKSQRLARYIKALQRKEDNKQFTINEKGFYREFKNDSSQSNSNNEIPQADELKNYWADLWKKQNDHNDNAEWIGIEENRMENKETMEFTDITRDDIEAVTIKLKNWKAAGIDNIHNFWYKKFVVLHDILAKNITELIKGEQELPQFITKGITFMLPKSNDTANPSQYRPITCLPTIYKLITSCITRNINRHIEHNNILSEEQKGCRRNHMGCKEQLVIDTTVLKHANTKKRNLHISYIDYKKAFDSVPHSWLIRVLHIYKINPIIINFLKNAMLEWKTTLRLSNGTNTINTDEINIENGIFQGDSLSPLWFCLALNPLSYLLNNTNSGYKLNDDTTITHLMYMDDIKIFAKSQKDVKNLIDITAKYSQDINMTFGLDKCKTLHIHRGKISKNNHNSDEPISFAQMEPEDTYKYLGIYQSDNINHMQIKKDLSEEYSRRLNRICKKQLYSKNLFKAINTFAIPVLTYSFGVVKWTRTDINRLEIKTRTTLTKCNYLHPKSAIERISLKRPKGGRGLIDLKLLWEGQIRNLRDFYYKKSTTSKLHSAIVELDTNYTPLNLNNRNIEYKSPQTQTNEKIDRWRTKELHGRHLHDLEQGHVDSDASNKWLKLGSLFPETEGFMIAVQDQVINTKNYKKFILKDPNIQNDKCRKCHRASETIQHITSACPSLAQTDYTHRHNQIAHIVHQRLAIKHKLVQTKAVPYYQYAPKPVLENLSHKIYFDRAILTDKTVHYNRPDITMIDKLNKIVYLIDIAVPNTHNLQKTITEKIHKYTELKEEIIRIWKMNKVYIVPLVLSSTGVIPKHLLHYLQQIELPKNLFMTMQKAAILNTCRIVRKFLQDDQSENPQSELHLA

SEQ ID NO: 20313 - protein, 1290 aa, Astraptes naxos
MRRSNRIKNKNSAQSETVAQIPPNITSHVLSSLSDNDIDRQTDRTPSPAEPFSPSTISYTPSVSSSPSTVSNSDHQQNTQIEDSNVFRLDTLAEDVSQEAFATQPVTTKAGKPRVRMQWNEDINTFIIRTYLYVTKLETDRTMYCKKLYDKFTLKYPHLKVSAQRIADQRRAILRNGMLSDDIINTIRQEIKEQLRREETANTPIQVSNTTTFASITHENTVQATSNTCATPSPAQQTQAHLSTQTNTIPNNVSVTQQTEIIQNMEIGTLDIPTHKIMEQLETSIVQYTGTDPAVRPKLPRLKENKKLYQYIDVFNKKILSNFYSSESDINCIHTLIYCSALVICENLGYKIRTNNSSIRHTNILQKPAWQIRLEADIKKLRADIGRLTQYIVKNNRSRKVVSAVEKIFRNTKIHTRHERDNVRPEEYLDTLKQKLTLKSQRLARYLKALQRKEDNKTFATNQKSFYRMLKNSDAQIDRNSEMPQSNELKNYWTNLWKKQNDHNNNAEWIDSEERRMSGVLTMEFVSISREDIEIATRRMKNWKAAGIDSIFNFWYKKFCTLHQVLAKNITELLKGEQELPHFITKGITYMLPKSNDTANPSQYRPITCLPTIYKLITSLITCNINKHLIDNSILSEEQKGCRQNHKGCKEQLVIDTTILKHAHTKKRNLHISYIDYRKAFDSVPHSWLIRVLHIYKINPILINFLENTMSNWRTTLFLSNGTNIITTDEIPIGNGIFQGDSLSPLWFCLALNPLSNLLNTSSHGYALNTSTSITHLMYMDDVKLFATSDKCLKSLIEITTQYSRDINMTFGLDKCRTLHICKGKIKSSSNNIDEPNTFLSMDATDLYKYLGIHQSNIINHIKIKKDLTSEYTRRLKLICKKQLYSKNVFKAINTFAIPALTYSFGVVKWTRTDINNLERKTRTTLTKYKYLHPKSAIERISIKRDKGGRGLIDLSLLWEGQIQNLREFFYSKSVTSIIHSSIIELDSNFTPLNLNNKNLIYKSPQLHTEEKIGRWRSKELHGRHLYDLEQSHVDAAASNKWLKLGSLFPETEGFMIAIQDQVINTKNYKKFILKDPNTQNDKCRKCHRASETIQHITSACPNLAQTDYTHRHNQIAQIIHQKLAIKHKLITDKAVPYYQYAPKPVLEDQSHKIYFDRSILTDKTIHNNRPDITLIDKINRNTYLIDIAVPNTHNLQKTITDKIHKYTELKEEIIRIWKMNKVYIVPLVLSSTGIIPRHLQHYLQQIGLHTNIYMTMQKAAILNTCRIVRKFLQEDTPNEQTPSSELHLA

SEQ ID NO: 20314 - protein, 1324 aa, Agriopis aurantiaria
MDSKNINKPQVPGDSTREADDSRLRLRRVRGQVNLRVGFLNCQTTNASRNRDSDTSITIPAEDVVQEANTSAPTTANQCTRKKRTDARGRGVSTRTKIETKDEHITSRADTPAEDVSQEAIATQPATTKAGKPRVRMKWNDDMNLFIMRTYYYITKLETDRTMHCKKLHDKFILKYPELKVSAQRIGDQRRAIIRNKLLSDEILNNTKKEVAEQLSREERENLMSSSTNSTSDILIPHTSQFPTFRDATNISSQTSSVTLSSTSQDTLNQVPSTLQSPHLSTQITVPSTLAATQHLQQEPNSEIINTDLLKKLRDQLDTALAQYTGIDPSARPKLPRLKENKELYYYLGIFNKHILGHYFSEDSDINLIHTLIYCGALVVSENLGYKAKDNITNQHVKRRNTQTPSWQRRIETDIKKLRADIGRLTQYIHGNRAPNLVKKVEEIFNRNKIHSSHESNNNKPEEYLDTLKQKLALKSQRLARYKKALHRKEDNKLFMNNEKGFYRTLRGGTEQIDNEIPQPDELKNYWTDIWKRQEDHNDQADWVQDEERRWSGIAEMEFHNLTPEDIAKITGKMKNWKAAGIDSVHNFWYKKFVTLHDILAKNITDLIRGQQKLPKFLTKGITYMLPKSSDTKNPSQYRPITCLPTLYKLITSCITRRINIHLTHHNILSEEQKGCRRSHKGCKEQLTIDSTVLKHANTNRRNLHITYIDYKKAFDSVPHSWLLKVLQIYKIDPSIISFLRDTMADWRTMIHLSNNSTTIETDEVPIENGIFQRDSFSPVWFCLALNPLSNMLNNANCGYKLTPNTSLTHLLYMDDIKLYSKSQKDLDSLIKITAQFSTDINMTFGLDKCRTLHIHKGKVTTTNPEIVEHNTFAEMEPSDTYKYLGIYQSNIINHTQIKKNLNTEYIRRLNLICKKQLHAKNLFKAINTFAIPVLTYSFGVIKWTKTDINKLEIKTRTTLTKYKYLHPKSAIERTSVKRQNGGRGLIDLKLLWEKQVLCLRNFFYEKSNTSETHAAIVAIDDKYTPLNLSNIDIQFNTQQVHEHQKLNRWRAKELHGRHIHDLEQDHVDTEASNKWLKIGYLFPETEGFMIAIQDQVINTKNYRKHIIKDPNAQNDKCRKCHRHPETIQHITSACPTLTQTDYTHRHNQVTHIIHQKLAIKHKLVDSTIKPYYQYVPKPVLESSTHKMYFDRAILTDKTIHNNRPDITLTDKIEKTVYLIDIAIPNTHNLQKTITEKIHKYTELKEEIIRIWKMEKVYIVPLVLSSTGVIPNYIHHGIKLLDLPKNIFITMQKAAILNTCRIVRKFLQEETGNESTPQNEQHLV

SEQ ID NO: 20315 - protein, 1258 aa, Hypena proboscidalis
MEMILRNKRIGPLSGGERRSTPGADAGCYSMRTVSGEELNRRAPSGSSENVTANTSSRRSSRAATPAMAVSQKALATQPVTTKAGKPRVRMQWSDEINKFIIRTYFYITKLETDRTMYCKKLHDQFNLKYPHLNLSGQRIADQRRAIIRNRMLSETLINNLKEEVAEQLAREESENSQLQLSNQLPSLSNSLEASLITLENSSQTTQITPSEILHLQQNTTSITQQTESTQNSVAIHLDISAEDLITQIETALVLYTGTDPTVRPKLPRLKENKKLYGFIDICNKQVLPRFISLESDLIAIHTLLYCSALVISENLGYKIRYNSNTQYRTRTLRKPAWQVRLERDIDHLRSDIGRLTQYINNNRSRKVVAAAERIFKMTKIHTIHERNNIRPEEYLDTLKQKLTVKSQRLARYIKSLRRKEDNKNFTFNEKGFYRACKDNNTPTNVQCALPEVRELENYWADLWKKQYNHNDGADWIGKIESSMSNIDTMELYDITEEDVSVVTRRMKNWKAAGVDGVHNFWYKKFFALHSILAKNITDIISGHQELPKFLTKGITYMLPKSNDTHNPSQYRPITCLPTVYKLITSLITRSINSHIIRNNILSEEQKGCRQNHKGCKEQLIIDSTVLKNAHTHKRNLHISYIDYKKAFDSVPHSWLVKILHIYKINPTIITFLENAMSEWRTTLHLRIGTDEITTDEIHIGNGIFQGDALSPLWFCLALNPLSHILNDTANGYKLNTNTSLTHLMYMDDIKLFAKSDKCLKNLLEITTQFSQDINMSFGLDKCKTLHIHKGKIKNSNPDESSSMAFEVMDPTDSYKYLGIHQSNVINHVQIKKRLTAQYFTRLNLISKKHLNSKNLFKAINTFAIPILTFSFGVVKWTRSDINNLEVKTRKILFKHSYLHPKSAIERVSVARLKGGRGLIDLKQLWEGQVKNLREFFYNKAIDSNIHSATIDLDNNFTPLNLKNKDIIYRKPQEHASDKLSRWCSKELHGRHFNDLQQPHVDSDASNQWLKLGSLFPETEGFMIAIQDQVINTKNYKKFILKDPSIRNDKCRKCHRASETIQHITSACPTLAQTDYTHRHNQVAHIVHQKLAIKHNLIPSKVTPYYQYTPKPVLENQSHKIYFDRAILTDKTIHNNRPDITLIDKENKHTYLIDIAVPNSHNLQKTITDKIHKYTELKEEIIRIWKMSKVSIVPLVLSSTGIIPKSLRHYLQQIDIPINIYMTMQKAVILNTCRIVRKFLQDDYNPNEPIPQHELHLV

SEQ ID NO: 20316 - protein, 1378 aa, Emesis temesa
MKQSYKRYNLRPLPGGRRGAPGAGAGCFSMRDTGGEALSRRAPVTQHTTANRRELNRRANDVEATAEISGDDSISLFSSIPSTCPSYMTRQTSVLSSSIPDDVVQDINLETELGPTSGIPQTRRRWTNEMNAFILRTYFQITELDTEKKSYLEPLYLKFIEKFPNVQVSRQRIGDQRRAIVRNKLLSQEIIDQIYNEVKTELKNLRVNLQTQNQTLNLNDVDQIDPSATTNTGKRKLTSFSKSKPQARMRWTKEHNETLMRIYYRITQLDTNRTAYRKLLHEAFVDIYPSLSHLTEQHIADQRRAIINKSYISDTRLSFIKQQVAVEMSPGTCMSDITINQSNNSLDTATTQFVQQLQVSPTPISPTQNSHTPLSDAIQNRVLSYTQLSDTQDSYQLNTLNHQISKLKTQLETALIKYTDTDPSNRPKLPRLKENKNLYKFLDIFNEHILSKYFSVDSDISTIHTLIYCSALVICENLGYKIQHNTDNIQHHNHKHQKPTWQRRIEKDITYLRADIGRLTQYINNNRSKKVLSAVENIFNTTKVHSTYEKNNARPEEYLDTLKQKLRLKSQRLARYVKALKRKEDNKLFKTNEKSFYSLLKSENINDNVRSNTHIPSVNEIKNYWSDLWKKQKDYNENAKWITDEEKRLDAVKTMELKDINEEDVVKAIKNTKNWKAAGLDKVHNFWLKKFSILHNILAKNITALIKGEQSLPNFFTTGITYMLSKSSDTANPSQYRPITCLPTIYKLITSIITHHIRNHLEQNNIMSEEQKGCRQNHKGCKEQLIIDSIILKHAQVHKRNLYISYIDYKKAFDSVPHSWLVRILHIYKIDPVIIKFMEKAMSDWKTKIYLSNGTDTITTDEIRIENGIFQGDSFSPLWFCLALNPLSNLLNAANNGYQINTNTSITHLMYMDDIKLFARTTKCLKKLEDITTKYSNDINMCFGLDKCRTLHIHRGKIENNSTNPENANSFTIMEPNDSYKYLGIYESNIINHTQIKKMLTLEYIRRVKLICKKQLYSKNLFKAINTFAIPVLTYTFGIIKWTHTDINHLEIKIRTSLTKFNYLHPKSAIERISLKRQSGGRGLIDLKLLLQEQVRKLRDFFYDKSNTSKLHKSVTEIDNKYTPLNLNNRHTDHKSRENHINEKMANWRAKELHGRHLNDLEQSHIDLKASNQWLKLGSLFPETEGFMVAVQDQVVNTKNYKKYILKDVTVQNDNCRKCHHAPETIQHITSACSALAQTDYTHRHNQVAHIIHQKLALKHKLIPPKALPYYQYTPKPVLENRTHKIYFDRTILTDKTIHYNRPDITLVDKHNKYTYLIDIAVPNTHNLQKTLTEKINKYTELKEEIIRIWKMNRVFIVPLILSSTGVIPKHLNYYLEQ

SEQ ID NO: 20317 - protein, 1295 aa, Astraptes hopfferi
MRRSNRIKNKHFAQSETVAQIPNSITSHVLSSLSENDIDRHTDRTSSPIEPFSPSTISYTPSVSSSPFTNNSDNQQVAQIEDSNIFRLDTLAEAVSQEALATQPATTKAGKPRVRMQWNEDINTFIIRTYLYVTKLETDRTMYCKKLHDQFTLKYPHLKVSAQRIADQRRAILRNRMLSDDIINSIRQEIKEQLRREEIANTPIQVANTTTVLSITHESTRQTTSNTVALPIPFIASTFTQQTQAHFSTQTNTISNIISNMQHTEITQNMETETLDIPTHKIMEQLETSLVQYTGLDPTVRPKLPRLKENKKLHQYIDIFNKKILSNFFSSESDINCIHTLIYCSALVICENLGYKIRSHNSRIRYTNTSQKPAWQIRIEADIQKLRADIGRLTQYIVRNNRSRKVVSAVENIFRNTKVHTRHERDNFRPEEYLDTLKQKLTLKSQRLARYLKALQRKEDNKIFATNEKGFYRMLKNNNTKIDRNSEMPQSNELKNYWTNLWKKENDHNNNAEWIDREERRMINVETMEFTNITGEDIEIATRRMKNWKAAGIDGIFNFWYKKFNTLHNILAKNITEILKGEQELPQFITKGITYMLPKSNDSADPSQYRPITCLPTIYKLITSLITYNINKHITNNGILSEEQKGCRQSHKGCKEQLIIDTTILKHAHTKKRNLHISYIDYKKAFDSVPHSWLIRVLQIYKINPIIINFLENAMSNWRTTLFLSNGKNIITTDEIPIGNGIFQGDSLSPLWFCLALNPLSNLLNTSSSGYALNASTSITHLMYMDDIKLFAKTDKCLKNLIQLTTQYSRDINMTFGLDKCRTLHIHQGKLKKNSNNIDETNTFVSMDATDSYKYLGIHQSNTINHIKIKKDLTSEYIRRLKLICKKQLYSKNLFKAINTFAIPALTYSFGVVKWTGTDINNLERVTRTTLTKYKYSHPKSAIERISVKRHSGGRGLIDLSLLWKGQIQNLREFFYTKSTTSTIHSSIIEIDNNFTPLNLHNKNVIYKTQQIHSEEKIGRWRSKELHGRHLHDLEQPHVDAVASNKWLTLGSLFPETEGFLIAIQDQVINTKNYKKFILKDPNTQNDKCRKCHRASETIQHITSGCPNLAQTDYTHRHNQIAHIVHQKLAIKHKLITDKARPYYQYIPKPVLEDQSHKIYFDRSILTDKTIHNNRPDITLIDKINKNTYLIDIAVPNTHNLQKTITDKIHKYTELKEEIIRIWKMNKVYIVPLVLSSTGIIPKHLHYYLQQIDLPKNLYMTMQKAAILNTCRIVRKFLQEDTPNEQTPSNELHLA

SEQ ID NO: 20318 - protein, 1182 aa, Urbanus evona
MQWNEEINTFIIRTYLYVTKLETDRTMYCKKLHDQFTLKYPHLKVSAQRIADQRRAILRNRMLSDDVISNIRREIVDQLSREEIANTPIQVSNTMTFSPIIHESTYRDTLNTCTIPITSIAPSSTQQTQAHASTQTTRITAPNIISIMQQTEITQNIEAETLDIRTHKIIEQLETSLIQYTGMDPTVRPKLPRLKENKKLYQYIDIFNKQILSNFFSIDSDINNIHTLIYCSALVICENLGYEIRTHNSQKRNTYTPQKPAWQIRLEADIKKLRADIGRLTQYIVRNNRSSKVVRAVENIFRNTKVHTIHERNNIRPEEYLDTLKQKLTLKSQRLARYLKALQRKEDNRTFATNEKSFYRMLKDNNAKIDTNNKIPQSTELKNYWTNLWKRQNDHNYNAEWIDSEKRRMAKVETMEFGNITREDIEIVTRRMKNWKAAGIDGIFNFWYKKFSTLHNILAKNITELLKGDQELPQFVTKGITYMLPKSNDTADPSQYRPITCLPTIYKLITSLITYNINKHIMHNDILSEEQKGCRQSHKGCKEQLVIDTTILKHAHTKKRNLHISYIDYKKAFDSVPHSWLIQVLHIYKINPIIITFLQNVMSNWRTTLFLCNGTNIITTDEIPIGNGIFQGDSLSPLWFCLALNPLSNLLNTSSSGYALNTSTSITHLMYMDDIKLFAKTDKCLKNLIEITTQYSRDINMTFGLDKCRTLHISQGRIKGNSNTIVEPNTFVSMNATDSYKYLGIHQSNTINHIKIKKDLTSEYIRRLKLICKKQLYSKNLFKAINTFAIPILTYSFGVVKWMRTDMNNLERITRTTLTKFKYLHPKSAIERISVKRHSGGRGLIDLSLVWKGQIQNLREFFYSKSTTSIIHSSIIQLDNNFTPLNLNNKNVNYISPQLHSEEKLGRWRSKELHGRHLHDLEQPHVDTEASNKWLTLGSLFPETEGFMMAIQDQVINTKNYKKFILKDPNAQNDKCRKCHRASETIQHITSACPNLAQTDYTHRHNQIAHIVHQKLAIKHKLITDKMMPYYQYTPKPVLEDQSHKIYFDRSILTDKTIHNNRPDITLIDKINKNTYIIDIAVPNTHNLQKTITDKIHKYTELKEEIIRIWKMNKVYIVPLVLSSTGIIPKHLQHYLQQIGLPTNLYMTMQKAAILNTCRIVRKFLQEDTPNEQTPSNESHLA

SEQ ID NO: 20319 - protein, 1258 aa, Hypena proboscidalis
MEMILRNKRIGPLSGGERRSTPGADAGCYSMRTVSGEELNRRAPSGSSENVTANTSSRRSSRAVTPAMAVSQEALATQPVTTKAGKPRVRMQWSDEINKFIIRTYFYITKLETDRTMYCKKLHDQFNLKYPHLNLSGQRIADQRRAIIRNRMLSETVINNLKEEVAEQLAREENENSQLQLSNQLPSLSNSLEASLITLENSSQTTQITPSEILHLQQNTTSITQQTESTQNSVAIHLGISAEDLITQIETALVLYTGTDPTVRPKLPRLKENKKLYGFIDICNKQVLPRFISLESDLIAIHTLLYCSALVISENLGYKIRYNSNTQYRTRTLRKPAWQVRLERDIDHLRSDIGRLTQYINNNRSRKVVAAAERIFKMTKIHTIHERNNIRPEEYLDTLKQKLTVKSQRLARYIKSLRRKEDNKNFTFNEKGFYRACKDNNTPTNVQCALPEVRELENYWADLWKKQYNHNDGADWIGKIESSMSNIDTMELNDITEEDVSVVTRRMKNWKAAGVDGVHNFWYKKFFALHSILAKNITDIISGHQELPKFLTKGITYMLPKSNDTHNPSQYRPITCLPTIYKLITSLITRSINSHIIRNNILSEEQKGCRQNHKGCKEQLIIDSTVLKNAHTHKRNLHISYIDYKKAFDSVPHSWLVKVLHIYKINPTIITFLENAMSEWRTTLHLRIGTDEITTDEIHIGNGIFQGDALSPLWFCLALNPLSHILNDTSNGYKLNTNTSLTHLMYMDDIKLFAKSDKCLKNLLEITTQFSQDINMSFGLDKCKTLHIHKGKIKNSNPDESSSLAFEVMDPTDSYKYLGIHQSNVINHVQIKKRLTAQYFTRLNLISKKHLNSKNLFKAINTFAIPILTFSFGVVKWTRSDINNLEVKTRKILFKHSYLHPKSAIERVSVARLKGGRGLIDLKQLWEGQVKNLREFFYNKAIDSNIHSATIDLDNNFTPLNLKNKDIIYRKPQEHASDKLSRWCSKELHGRHFNDLQQPHVDSDASNQWLKLGSLFPETEGFMIAIQDQVINTKNYKKFILKDPSIRNDKCRKCHRASETIQHITSACPTLAQTDYTHRHNQVAHIVHQKLAIKHNLIPSKVTPYYQYTPKPVLENQSHKIYFDRAILTDKTIHNNRPDITLIDKENKHTYLIDIAVPNSHNLQKTITDKIHKYTELKEEIIRIWKMSKVSIVPLVLSSTGIIPKSLRHYLQQIDIPINIYMTMQKAVILNTCRIVRKFLQDDYNPNEPIPQHELHLV

SEQ ID NO: 20320 - protein, 1245 aa, Crocallis elinguaria
MLASDSRLGGWAGVGDAGGRGMSSGITADSTGGQDSSSSCIRSATPAEDVSQEAHAAKPATTKAGKPRVRMKWSEEINLFIMRTYFYVTKLETDRTTYCKKLHDQFIIKYPDLNITAQRIADQRRVIIRNKLLSDDVITNLKQEISEQLIREERENSPIQVSNSIPSISQVDTFQFTSELQASSSLQTSPIPNSMTVSSHVSTQTNTLPNIVSIIQNIESEQNSEMSEIDVPTQKLIEQIETTLLQYTGTDPTVRPKLPRLKENRKLYELVDIFNKQILGRFFSIDSDINTVHTLVYCSALVICESLGYKIRTHQTQARNRKPQKPAWQIRLELDIKNLRADIGRLTQYINNNRSRKVVAGVEDIFKRTKVHTIHERNNIRPEEYLDTLKQKVTLKSQRLARYIKALQRKEDNKQFTINEKGFYREFKNDSSQSNSNNEIPQADELKNYWADLWKKQNDHNDSAEWIGIEENRMENKETMEFTDITRDDIEAVTIKLKNWKAAGIDNIHNFWYKKFVVLHDILAKNITELIKGEQELPQFITKGITFMLPKSNDTANPSQYRPITCLPTIYKLITACITRNINRHIEHNNILSEEQKGCRRNHMGCKEQLVIDTTVLKHANTKKRNLHISYIDYKKAFDSVPHSWLIRVLHIYKINPIIINFLKNAMLEWKTTLRLSNGTNTINTDEINIENGIFQGDSLSPLWFCLALNPLSYLLNNTNSGYKLNDDTTITHLMYMDDIKIFAKSQKDVKNLIDITAKYSQDINMTFGLDKCKTLHIHRGKISKNNHNSDEPISFAQMEPEDTYKYLGIYQSDNINHMQIKKDLSEEYSRRLNRICKKQVYSKNLFKAINTFAIPVLTYSFGVVKWTRTDINRLEIKTRTTLTKCNYLHPKSAIERISLKRPKGGRGLIDLKLLWEGQIRNLRDFYYKKSTTSKLHSAIVELDTNYTPLNLNNRNIEYKSPQTQTNEKIDRWRTKELHGRHLHDLEQGHVDSDASNKWLKLGSLFPETEGFMIAVQDQVINTKNYKKYILKDPNIQNDKCRKCHRASETIQHITSACPSLAQTDYTHRHNQIAHIVHQRLAIKHKLVQTKAVPYYQYAPKPVLENLSHKIYFDRAILTDKTVHYNRPDITMIDKLNKIVYLIDIAVPNTHNLQKTITEKIHKYTELKEEIIRIWKMNKVYIVPLVLSSTGVIPKHLLHYLQQIELPKNLFMTMQKAAILNTCRIVRKFLQDDQSENPQSELHLA

SEQ ID NO: 20321 - protein, 1407 aa, Emesis brimo
MKQSCKRYNLRPLPGGRRGAPGAGAGCFSMRDTGGEALSRRAPVTQHTTANRRELNRRANDDEATAETSGDGTISLFSSIPSTRPSYMTRRTSVLSSSMLDDVVQDINLETELGPTSSTPQTRRRWTHEMNAFILRTYLQITELDTEKKSYLEPLYLKFIEKFPNVQVSRQRIGDQRRAIVRNKLLSQEIVDQIYNEVKTELINLQANLQARNQIVNLSDKDHISATVNIAKRKRTSFSKSQSQPRMRWTKEQNETLMCIYYRITQLDTNRTDYRRLLHEAFIDTYPSLTHLTEQHIADQRRAISNKNYISDTRLSLIKQQVAEELSLRTCMSDITINQNNNRLDVTITQSIQISPTPISSTQNLHTPSSDAIQNCVLHTQLSDIQESYQLNTPNSQASKLKTQLETALIRYTDMDPSNRPKLPRLRENKNLYKFLDIFNKHLLSKYFSTDSDLSTIHTLIYCSALVICENLGYKIQDNSTNNTHHHNHKHLKPAWQRRIEKDIAYLRVDIGRLTQYINNNRSKKVLAAVQNIFNTTKVHSTYERNNARPEEYLDTLKQKLRLKSQRLARYVKALRRKEDNKRFITNEKSFYRLLRNENTHENVSSKKHIPTVNEIQNYWADLWKKQKDYNENATWITDEEKRMDAVKTMELKNINEEDVVEAIKNIKNWKAAGLDKVHNFWLKKFSSLHNILAKNITALIKGEQSLPNFLTIGITYMSSKSSDTTNPSQYRPITCLPTIYKLITSIITHHIRKHLEQNNIMSEEQKGCRQNHKGCKEQLIIDSIILKHAQVHKRNLYISYIDYKKAFDSVPHSWLLRILHIYKINPVVIKFMEKAMSNWKTKIYLSNGTDTITTEEIRIENGIFQGDSFSPLWFCLALNPLSNLLNIANNGYQMNINTSITHLMYMDDIKLFARTAKCLKKLEDITTKYSNDINMCFGFDKCRTLHIHRGKIESNSTNPDEANNFIVMEPSESYKYLGIYESNKINHSQIKKKLMLEYIRRVKLICKKQLHSKNLFKAINTFAIPLLTYTFGIIKWTHTDINHLEIKTRTSLTKFNYLHPKSAIERISLKRQNGGRGLIDLKLLWQEQIRNLRDFFYEKSKTSELHKSAIKIDDNYTPLNLNNRQIVHKSPENYINEKMASWRAKELHGRHLHDLEQSHIDLKASNQWLKLGSLFPETEGFMVAVQDQVINTKNYKKFIINDATVQNDNCRKCHHAPETIQHITSGCSALAQTDYTHRHNQVAHIIHQKLALKHKLIPPKALPYYQYIPKPVLENRTHKVYFDRTILTDKTVHYNRPDITLVDKHNKYTYLIDIAVPNTHNLQKTITEKINKYTELKEEISRIWKMDRVFIVPLVLSSTGVIPKHLNYYLEQIELPSSLYMTMQKAVILNTCRIVRKFLQDDFSAK

SEQ ID NO: 20322 - protein, 1182 aa, Urbanus esmeraldus
MQWNDEINTFIIRTYLYVTKLESDRTMYCNKLHDQFKLKYPHLKVSAQRIADQRRAILRNRMLSDDVISSIRQEVVEQLSREEIANTPIQVSNTMTFSPITHESTYQGTSDTCTIPITSIAPSSTQQTQAHTATRTTRITEPNIISIMQQTEITQNIEAETLDIRTRQIMEQLETSLIQYTGIDPTVRPKLPRLKENKKLYQYIDIFNKQILSNFFSIDSDINSIHTLIYCSALVICENLGYQIRTHNSQKRNTYTPQKPAWQIRLEADIKKLRADIGRLTQYIVRNNRSSKVVTAVENIFKNTKVHTIHERNNIRPEEYLDTLKQKLTLKAQRLARYLKALQRKEDNRTFATNEKIFYRMLKDNNAKIDTNNKFPKSTELKNYWTNLWKRQNDHNYNTEWIDTEKRRMTNIKTMEFSNITGEDIEIVTRRIKNWKAAGIDGIFNFWYKKFSTLHNILAKNITELLKGDQELPQFVTKGITYMLPKSNDTADPSQYRPITCLPTIYKLITSLITYNMNKHIIHNDILSEEQKGCRQGHKGCKEQLVIDTTILKHAHTKKRNLHISYIDYKKAFDSVPHSWLIQVLHIYKINPIIITFLQNAMSNWRTTLFLSNGTNIITTDEIPIGNGIFQGDSLSPLWFCLALNPLSNLLNTSSSGYVLNTSTSITHLMYMDDIKLFAKTDKCLKNLIEITTQYSRDINMTFGFDKCRTLHISQGRIKGNSNTIDEPITFVSMDATDSYKYLGIHQSNTINHIKIKKDLTSEYIRRLKLICKKQLYSKNLFKAINTFAIPTLTYSFGVVKWTRTDINNLERTTRTTLTKFKYLHPKSAIERISVKRHSGGRGLIDLLLLWKGQVQNLREFFYSKSTTSTIHSSIIQLDNNFTPLNLNNKNVNYISPQLHAEEKVGRWRSKELHGRHLHDLEQPHVDAAASNKWLSLGSLFPETEGFMLAIQDQVINTKNYKKFILKDPNSQNDKCRKCHRASETIQHITSACPNLAQTDYTHRHNQIVHIVHQKLAIKHKLITDKIMPYYQYTPKPVLEDQSHKIYFDRSILTDKTIHNNRPDITLIDKINKHTYIIDIAVPNTHNLQKTITDKIHKYTELKEEIIRIWKMDKVYIVPLVLSSTGIIPKHLQHYLQQIGLPTNLYMTMQKAAILNTCRIVRKFLQEDTPNEQIPSNESHLA

SEQ ID NO: 20323 - protein, 1258 aa, Hypena proboscidalis
MEMILRNKRIGPLSGGERRSTPGADAGCYSMRTVSGEELNRRAPSGSSENVTANTSSRRSSRAVTPAMAVSQEALATQPVTTKAGKPRVRMQWSDEINKFIIRTYFYITKLETDRTMYCKKLHDQFNLKYPHLNLSGQRIADQRRAIIRNRMLSETVINNLKEEVAEQLAREESENSQLQLSNQLPSLSNSLEASLITLENSSQTTQITPSEILHLQQNTTSITQQTESTQNSVAIHLDISAEDLITQIETALVLYTGTDPTVRPKLPRLKENKKLYGFIDICNKQVLPRFISLESDLIAIHTLLYCSALVISENLGYKIRYNSNTQYRTRTLRKPAWQVRLERDIDHLRSDIGRLTQYINNNRSRKEVAAAERIFKMTKIHTIHERNNIRPEEYLDTLKQKLTVKSQRLARYIKSLRRKEDNKNFTFNEKGFYRACKDNNTPTNVQCALPEVRELENYWADLWKKQYNHNDGTDWIGKIESSMSNIDTMELYDITEEDVSVVTRRMKNWKAAGVDGVHNFWYKKCFALHSILAKNITDIISGHQELPKFLTKGITYMLPKSNDTHNPSQYRPITCLPTIYKLITSLITRSINSHIIRNNILSEEQKGCRQNHKGCKEQLIIDSTVLKNAHTHKRNLHISYIDYKKAFDSVPHSWLVKVLHIYKINPTIITFLENAMSEWRTTLHLRIGTDEITTDEIHIGNGIFQGDALSPLWFCLALNPLSHILNDTANGYKLNTNTSLTHLMYMDDIKLFAKSDKCLKNLLEITTQFSQDINMSFGLDKCKTLHIHKGKIKNSNPDESSSLAFEVMDPTDSYKYLGIHQSNVINHVQIKKRLTAQYFTRLNLISKKHLNSKNLFKAINTFAIPILTFSFGVVKWTRSDINNLEVKTRKILFKHSYLHPKSAIERVSVTRLKGGRGLIDLKQLWEGQVKNLREFFYNKAIDSNIHSATIDLDNNFTPLNLKNKDIIYRKPQEHASDKLSRWCSKELHGRHFNDLQQPHVDSDASNQWLKLGSLFPETEGFMIAIQDQVINTKNYKKFILKDPSIRNDKCRKCHRASETIQHITSACPTLAQTDYTHRHNQVAHIVHQKLAIKHNLIPSKVTPYYQYTPKPVLENQSHKIYFDRAILTDKTIHNNRPDITLIDKENKHTYLIDIAVPNSHNLQKTITDKIHKYTELKEEIIRIWKMSKVSIVPLVLSSTGIIPKSLRHYLQQIDIPINIYMTMQKAVILNTCRIVRKFLQDDYNPNEPIPQHELHLV

SEQ ID NO: 20324 - protein, 1293 aa, Telegonus anausis
MRRSNRIKNKHFAQSETVAQIPKNITAQVLSSLSDNDSDRHTDRISSPVEPFSPSTISYTPSVSSSPFTVSDHQQDAQIEDSNIFRLDTLAEDVSQEAFATQPATTKAGKPRVRMQWNEDINTFIIRTYLYVTKLETDKTMYCKKLHDQFTLKYPHLKVSAQRIADQRRAILRNRMLSDDIINNIKQEIKEQLRRDEIANTPIQVANTTFSSITHESTFQTASNTVATSIPFIAPSSIQQTQSYFSTQTNTICNNTSITQQTEITQNMDTETLDIPTHKIIEQLETTLVQYTGLDPTVRPKLPRLKENKKLYQYIDIFNKKILSIFFSSESDINCIHTLIYCSALVICENLGYKIRTHNSRIRYTDTSQKPAWQIRIEADIQKLRADIGRLTQYIVKNNRSRKVVGAVENIFRNTKVHTRHERDNFRPEEYLDTLKQKLTLKSQRLARYLKALQRKEDNKIFASNEKSFYRMLKNNNQKIDRNSEMPQSNELKNYWTNLWKKQNGHNNNAEWIDNEERRMNNVETMEFTDINGDDIEIATRRMKNWKAAGIDGIFNFWYKKFNTLHNILAKNITELLKGEQELPQFITKGITYMLPKSNNTADPSQYRPITCLPTIYKLITSLITYNINKHITTNNILSEEQKGCRQNHKGCKEQLVIDTTILKHAHTKKRNLHISYIDYKKAFDSVPHSWLIRVLNIYKINPTIINFLENAMSNWRTTLFLSNGTNITTTDEIPIGNGIFQGDSLSPLWFCLALNPLSNLLNTSSSGYTLNNNTSITHLMYMDDIKLFGKTDKCLKNLIKLTTQYSRDINMTFGLDKCRTLHICQGKIKKNSNYIDESNTFVSMDATDSYKYLGIHQSNTINHIKIKKDLTSEYITRLKLICKKQLYSKNLFKAINTFAIPALTYSFGVVKWTGTDINNLERVTRTTLTKYKYLHPKSAIERISVKRHSGGRGLVDLSLLWKGQIQNLREFFYTKSTNSPIHASIIQIDNNFTPLNLNDKNVIYKTPQIHSEEKIGRWRSKELHGRHLHDLEQPHVDAAASNKWLTLGSLFPETEGFLIAIQDQIINTKNYKKFILKDPNTQNDKCRKCHRASETIQHITSGCPNLAQTDYTHRHNQIAHIVHQKLAIKHKLITDKARPYYQYIPKPVLEDQSYKIYFDRSILTDKTIHNNRPDITLIDKINKNTYLIDIVVPNTHNLQKTITDKIHKYTELKEEIIRIWKMNKVYIVPLVLSSTGIIPKHLHFYLQQIDLPKNLYMTMQKAAILNTCRIVRKFLQEDTPIEQIPSNELHLV

SEQ ID NO: 20325 - protein, 1275 aa, Crocallis elinguaria
METRNRKLRIGPLPEGDRRGTSVAGHGRDSMLASDSRLGGWAGVGDAGGRGMSSGITADSTGGQDSSSSCIISATPAEDVSQEAHATKPATTKAGKPRVRMKWSEEINLFIMRTYFYVTKLETDRTTYCKKLHDQFIIKYPDLNITAQRIADQRRVIIRNKLLSDDVITNLKQEISEQLIREERENSPIQVSNSIPSISQVDTFQFTSELQASSTLQTSPIPNSMSVSSHVSTQTNTLPNIVSIIQNIESEQNSEISEIDVPTQKLIEQIETTLLQYTGTDPTVRPKLPQLKENRKLYELVDIFNKQILGRFFSIDSDINTVHTLVYCSALVICESLGYKIRTHQTQARNRKPQKPAWQIRLELDIKNLRADIGRLTQYINNNRSRKVVAGVEDIFKRTKVHTIHERNNIRPEEYLDTLKQKVTLKSQRLARYIKALQRKEDNKQFTINEKGFYREFKNDSSQSNSNNEIPQADELKNYWADLWKKQNDHNDSAEWIGIEENRMENKETMEFTDITRDDIEAVTIKLKNWKAAGIDNIHNFWYKKFVVLHDILAKNITELIKGDQELPQFITKGITFMLPKSNATANPSQYRPITCLPTIYKLITSCITRNINRHIEHNNILSEEQKGCRRNHMGCKEQLVIDTTVLKHANTKKRNLHISYIDYKKAFDSVPHSWLIRVLHIYKINPIIINFLKNAMLEWKTTLRLSNGTNTINTDEINIENGIFQGDSLSPLWFCLALNPLSYLLNNTNSGYKLNDDTTITHLMYMDDIKIFAKSQKDLKNLIDITAKYSQDINMTFGLDKCKTLHIHKGKISKNNHNSDEPISFAQMEPEDTYKYLGIYQSDNINHMQIKKDLSEEYSRRLNRICKKHLYSKNLFKAINTFAIPVLTYSFGVVKWTRTDINRLEIKTRTTLTKCNYLHPKSAIERISLKRPKGGRGLIDLKLLWEGQIRNLRDFYYKKSTTSKLHSAIVELDTNYTPLNLNNRNIEYKSPQTQTNEKIDRWRTKELHGRHLYDLEQGHVDSDASNKWLKLGSLFPETEGFMIAVQDQVINTKNYKKFILKDPNIQNDKCRKCHRASETIQHITSACPSLAQTDYTHRHNQIAHIVHQRLAIKHKLVQTKAVPYYQYAPKPVLENLSHKIYFDRAILTDKTVHYNRPDITMIDKLNKIVYLIDIAVPNTHNLQKTITEKIHKYTELKEEIIRIWKMNKVYIVPLVLSSTGVIPKHLLHYLQQIELPKNLFMTMQKAAILNTCRIVRKFLQDDQSENPQSELHLA

SEQ ID NO: 20326 - protein, 1182 aa, Urbanus sp.
MRRSNRIKNKNSAQSETVAQIPPNITSHILSSLSGNNIDRQTDRTPSPIEPFSPSTISYNPSVSSSPSTVGSSDRVTNINIEDSNIFILDTLAEDVSQEAHAIQPVTTKAGKPRVRMQWNDEINTFIIRTYLYVTKLDTDRTMYCKKLHDQFILKYPHLKVSAQRIADQRRAIVRNRMLSDDVISSIKQEIEEQLRREEIANTPIQVPNNITFSQITSESTLRGISNTCTIPIISIAPSSTQQTQAHSSTQTITIPNITSIMQQTVTTQNMEAETLDIPIHNIMEQLETSLVQYTGMDPAVRPKLPRLRENKKLYQYIDIFNKQILSKFFSTDSDVNSIHTLIYCSALVISENLGYKIRTHNSRKRYTYTPQKPAWQIRIEADIKKLRADIGRLTQYIVKNNRSRKVVSAVENIFRNTKVHTIHERNNIRPEEYLDTLKQKLTLKSQRLARYLKALQRKEDNKIFVTNEKNFYRMLKNNNAKIDTNSQIPQSTELKNYWTDLWKRQNDHNYNAEWIDSEERRMTNVETMEFANISGEDIEIVTRRMKNWKAAGIDGIFNFWYKKFSTLHNILAKNITELLKGDQELPQFVTKGITYMLPKSNDTADPSQYRPITCLPTIYKLITSLITYNINKHIIHNNILSEEQKGCRQNHKGCKEQLVIDTTILKHAHTKKRNLHISYIDYKKAFDSVPHSWLIHVLHIYKINPIIITFLQNAMSNWRTTLFLSNGTSIIATDEIPIGNGIFQGDSLSPLWFCLALNPLSNLLNTSSSGYALNTSASITHLMYMDDIKLFAKTDKCLKKLLEITTQYSRDINMSFGFDKCRTLHIYQGRIKNNSNTIDEPNTFVSMDATDSYKYLGIHQSNTINHIKIKKDLTSEYIRRLKLICKKQLYSKNLFKAINTFAIPTLTYSFGVVKWMRTDINNLERITRTTLTKFKYLHPKSAIERISVKRHNGGRGLIDLLLLWKGQIKNLREFFYSKSTASTIHSSIIQLDNNFTPLNLNNKNVNYISPQLHSDEKVSRWRSKELHGRHLHDLEQPHVDAAASNKWLTLGSMFPETEGFMVAIQDQVINTKNYKKFILKDPNTHNDKCRKCHRASETIQHITSACPNLAQTDYTHRHNQIAHIVHQKLAIKHKLIIDKTVPYYQYIPKPVLEDQRHKIYFDRSILTDKTIHNNRPDITLI

SEQ ID NO: 20327 - protein, 1313 aa, Apodemia walkeri
MSSSSIPDDVVQDVNLDTELASTSGNPQKRKRWTHEMNSYILRTYFQLTELNTDTKNYLEPLHLKFTEKFPYMKVTRQRIGDQRRAIVRNKLLPQDTIDQIYNEVKDELNNLTINFQLQHQTIEDEVQHASALHGHKIVQTSSNTRKSQSQTRIRWTKEQNETIMRLYYRITQLETNKTAYRKLLHEEFIKIYPLLAHLTEQHVADQRRAIHTKKYISDTRLTVIKKEVTEELSLRTYNLGNMSDSPTIQIEQGSSIIISPTHTFYTQSHTSSQNNDLSNTQLLDSQNPQQADAPNSQTSNVTHIGPTLDQLKKQLEAAIIKYTNIDPINRPKLPKLRENKNLYKFVDIFNKNLLKEYYSADSDLSTIHTLIYCTALVICENMGYKIQDHNLDIHHNNHKHQKPAWQRRIENEITCLRADIGRLTQYINNNRSKRVVAAVEIIFRRAKIHSTYENNNVRPEEYLDTLKQKLRLKSQRLARYIKSLKRKEDNKLFQTNEKNFYRTLKNENIHDNYNTHTHIPAVKELKNYWSDLWKKQKDYNDNATWITEEEKRMADIEAMELGDITEEDVFAAIKRIKNWKAAGLDKLQNFWLKKISTLHNILAKNIMAIIKGEQPLPKFLTIGITYMLSKSSDTVNPSQYRPITCLPTIYKLITSIITHRIRNHLEQHNIISEEQKGCRQNHKGCKEQLVIDSIILKHAKVHKRNLYISYIDYKKAFDSVPHSWLVRVLHIYKIDPIIIKFLENAMSNWRTKIYLSNGKDTITTDEIPIENGIFQGDSFSPLWFCLALNPLSNLLNTSRNGYKLNTNTLITHLMYMDDIKLFDRTAKGLKTLESLTTKYSQDINMCFGLDKCRSLFIHKGKITNSNASLEEASIFTSIDPTESYKYLGILESNKIDHSQIKKNLVSEYVKRIKLICKKQLYSKNHFKAINTFAIPVLTYSFGIIKWTQADIHNLEIKTRTLLTKHNYLHPKSAIERISLKRQEGGRGLIDIKLLWLGQIRNLREFFYDKSKICNLHNSVIDIDNNFTPLNLKNRNIDYDTPENYTNAKMARWRGKELHGRHLHDLEQTHVDLEASNQWLKLGCLFPETEGFMVAVQDQVINTKNYKKYIIKDATVQSDSCRKCHHASETIQHITSACPNLAQTDYTHRHNQVAQIIHQKLAQKHNLIPPTTLPYYQYTPKPVLESKTHKIYFDRTILTDKTVHYNRPDITLIDKLRKYTFLIDIAVPNTHNLQKTVTEKITKYAELKEEIIRIWKMNKVFIVPLVLSSTGVIPKNLKFYLEQIELPISMYMTMQKAVILNTCRIVRKFLQED

SEQ ID NO: 20328 - protein, 1177 aa, Telegonus anausis
MRRSNRIKNKHSAQSETVAVITPNISSHTPTLSLEIDIDRQTDRTPSLIEPFSPSSVSYTPSISSSPSTDRSRLDRLDTLAEDVSQEATATQPVTTKAGKPRVRMQWNEDINTFIIRTYLYVTKLETDRTMYCKKLHDQFTLKYPHLKVSAQRIADQRRVILRNRMLSDDVISNIKQEIKEQLRREEIANTPIQISNTVTFSSNARDGTSQTMTNTCTTSIVSVSSSSTQKTQAHVSTQTSTPNLISIIQQTEITQNMETETLDVSTHKMMEQLETSLVQYTGVDPTLRPKLPRLKENKKLYQFIDIFNKKILSKFYCIDSDINCIHTLIYCSALVICENLGYKIRTNNSRMRHTYIPQKPAWQIRIEADIKQLRADIGRLTQYIVKNNRSRKVVSAVENIFRNKKIHTRHERDNVKPEEYLDTLKQKLTLKSQRLARYLKALQRKEDNKTFTTNEKSFYRLLKNNDAKVDRNSEMPQSNELKNYWTNLWKKQNDHNNNADWIDSEERRMSSVITMEFTNISEEDVEIATRRMKNWKAAGIDSIFNFWYKKFSSLHNILAKNITELLKGEQELPQFITKGITFMLPKSNDTANPSQYRPITCLPTIYKLITSLITYNINKHLIDNNILSEEQKGCRQSHKGCKEQLVIDTTILKYAQLKKRNLHISYIDYKKAFDSVPHSWLIRVLHIYKINPTLINFLENTMCNWRTTLLLSNGTNVITTDEIPIGNGIFQGDSLSPLWFCLALNPLSNLLNSSSDGYALNNSTSITHLMYMDDIKLFAKSNKCLKNLIEITTQFSRDINMTFGLDKCRTLHIYQGKIKSNSNNIDEPNIFLSMDATDSYKYLGIHQSNTINHIKIKKDLTSEYTRRLKIICKKQLYSKNVFKAINTFAIPALTYSFGVVKWTQTDINNLERKTRTTLTKYKYLHPKSAIERISIKREKGGRGLIDLTLLWEGQIQNLREFFYSKSTTSKIHSSIIQLDSNFTPLNLNNKDLTYKSPQLHSEEKIGRWRAKELHGRHLHDLEQPHVDATASNKWLKLGSLFPETEGFMIAIQDQVINTKNYKKFILKDPSTQNDKCRKCHRASETIQHITSACPNLAQTDYTHRHNQIAQIIHQKLAIKHKLITDKPAPYYQYIPKPILEDHSHKIYFDRSILTDKTIHNNRPDITLIDKINKNTY

SEQ ID NO: 20329 - protein, 1079 aa, Apodemia murphyi
MSNSTTIQIRSTSPNVISPTQNLHTQSNASTQNYVLPNTQLSNTLNSQQSNTLNSQTSELAQIEVTINELKNQLETTIIRYTDTDPTNRPKLPKLRENKTLYKFLDIFNKHLLCEYHAVDSDLSTVHTLIYCSALVICKNLGYKIQDDNSDTHHNKYKHQIPAWQRRIEKDITCLRADIGRLTQYINNNRSKRIIAAVDNIFRTTKVHSAHERHNIRPEEYLDTLKQKLRLKSQRLARYIKSLRRKEDNKIFQTNEKLFYRTLKDGDNHDNHNRNIQLPAANELKKYWSELWKKQKDHNDNAMWIKEEERRMTDIKNMELSDITEKDVVTAVKCMKNWKAAGLDKVHNFWLKKFSTLHNILAKNIMAIIKGEQLLPKFLTAGITYMLSKSSDTINPSQYRPITCLPTIYKLITSIITHRIRNHLEQYNIISEEQKGCRSNHKGCKEQLVIDSIILKHAQVQKRNLFISYIDYRKAFDSVPHSWLLRVLHIYKIDPVIITFLESAMSGWRTKIYMSNGNDTIITDDIPIENGIFQGDSFSPLWFCLALNPLSNLLNTIKNGYKMNNNTSITHLMYMDDIKLFARTANGLKGLEDITLKYSQDINMYFGLDKCRTLYIHKGKIATNNANIEETGIFTLMDPAESYKYLGIYESNKINHSQIKNNLILEYLKRIKLICKKKLYSKNLFKAINTFAIPALTYSFGIIKWTHTDIHNLEIKTRTSLTKFNYLHPKSAIERISLKRQKGGRGLVDITTLWHGQLQNLREFFYNKSKVSNLHNSAIDIDTNFTPLNLSNRNIDHTISENYINEKLSRWRNKELHGRHLHDLEQSHIDLEASNQWLKLGSLFPETEGFMLAVQDQVINTKNYKKYILKDATVQNDNCRKCHHAPETIQHITGACPTLAQSDYTHRHNQVAYIIHQKLALKHNLIQEKALPYYQYNPKPVLESKTHKIYFDRTILTDKTVHYNRPDITLVDKLKKYTFLIDIAVPNTHNLQKTITEKIHKYTELKEEIIRIWNMNRVFIVPLVLSGTGVIPKLLNHYLEQIELPKNIYMTMQKAVILNTCRIVRKFLQEDIRDEQNSQ

SEQ ID NO: 20330 - protein, 1252 aa, Autochton potrillo
MRRSNRIKNKYSAQSETVAEITSNITSRTSSSLSENIDRQHRTPSPIEPFSPSTISYTPSVSSSPSTVSKEDSNIFRLEMLAEDVSQEPFATQPVTTKAGKARVRMQWNEDLNTFIIRTYLYITKLETDRTMYCKKLHDQFTLQYPHLKVSAQRIADQRRAIIRNKMLSDDVINNIRQEIKEQLRREEIANIPIQVSNTMTFSSITHDSTFLSTLNTCTTSITTASPSSSRLPQAHASTQTSTMPNIISILQQTEATQNAKPETLDIPTHRIMEQLETSIVQYTGIDPTVRPKLPRLKENKNLYQYIDIFNKKILSNFFSIESDINCIHTLIYCSALVISENLGYKIRTHISHMQHINTPHKPAWQMRIEADIKKLRADIGRLTQYIVRNNRSRKVVNAVENIFRNTKIHTIHERNNVRPEEYLDTLKQKLTLKSQRLARYLKALQRKQDNKTFTTNEKRFYRMLKNNNAQIDRNSEIPESYELKNYWTNLWKRQNDHNNNAEWIDNEDRRMSNVETMEFTDISGEDIEIATRRMKNWKAAGIDSIFNFWYKKFSILHNILAKNITDLLKGEQELPQFITKGITYMLPKSNYTANPSQYRPITCLPTIYKLITSLITYNINKHLIHNNILSEEQKGCRQSHKGCKEQLVIDTTILKHAHTKKRNLHISYIDYKKAFDSVPHSWLIRVLHIYKINPIIINFLQNAMSNWRTTLLLTNGTDIITTDEIPIANGIFQGDSLSPLWFCLALNPLSNLLNTSSSGYILNTSTSITHLMYMDDVKLFAKTEKCLKNLIEIISQYSQDINMTFGLEKCRTLHINQGRIKSNSNNIDEPYTFVSMDAADSYRYLGIQQSNTINHIKIKKDLSLEYTRRLKLICKKQLYSKNLFKAINTFAVPALTYSFGVVKWTRTDINNLERKTRTTLTKYKYLHPKSAIERISVKRHNGGRGLIDLSLLWEVQIQNLREFFYSKSTTSTIHSSIIKLDDNFTPLNLNNKELIYKSSQLHTEEKISRWRSKELHGRHLHDLEQPHVDAAASNKWLNLGSLFPETEGFMIAIQDQVINTKNFQKFILKDPKAQNDKCRKCHHASETIQHITSACPNLAQTDYTHRHNQIAHIVHQKLASKHKLITDKTVPYYQYIPKPILEDQSHKLYFDRSILTDKTIHNNRPDITLIDKINKTTYLIDIAIPNTHNLQKTITDKIHKYTELKEEIIRIWKMNTVYIVPLVLSSTGIIPKHLHHYLQQLNLPANLYMTM

SEQ ID NO: 20331 - protein, 1316 aa, Venada nevada
METRLKRKLRGPLPGGDRRGTPGADAGCHSMQAVSGEELSRRAPTGSPETISADQDNTDRLTEFITNSPIESYNPSTISYTPSLQSLPSSNSPSPPIVRSRDPSTPVLDVAREVNTFLPASTKAGKPRVRMSWNKEVNIFIMRTYYQITKLETDMTTYRKRLHELFSRQYPHISVSEQRVSDQMRTIVRNKRLSQDTLNQLKKEVRKSLEEETNENSNLINMSQLTQNITLQSLHQSQAVEQSYSLNVADIAPTTSCISPNTQTSVTNITCTLHETFTQHASTQTNFSPVSVSPMIHTTQPNETAQVDTTTQDLINQLETTLIQYTGTDPTARPKLPKLRENKKLYGLIDIFNKQILNRFFSIDSDLVSIHTLIYCSAYVICHNLGYKIRTHNSTTPIKSRNDSKPAWQTRLEIGIKNLRADIGRLTQYINNNRSRKVVKAVEAIFRKTKVHTIHEPYNVRPEEYLDTLKQKLTLKSQRLSRYLKALQRKKDNKLFTTNEKNFYRLCRDNRIQKDNYSIIPEPHELENYWADIWEKRNDHNENAKWINDERNSMVGIEDMELTDITLEDVAIVTSRMKSWKAAGIDNVHNFWYKKFFILHNILAKNITELIRDEQPTPKFITKGITYMLPKNNDTQNPSQYRPITCLPTIYKLITSLITRYINNHLHRNNILSEEQKGCRQNHRGCKEQLIIDSTILKYAHMQKRNLCISYIDYKKAFDSVPHSWLIKILQVYKINPTIINFLKNAMSDWRTTLHLNNGIDMVSTNEIYIRNGIFQGDSLSPLWFCLALNPLSNLLNNTANGYKLNTDTVITHLMYMDDIKLFAKSEKCLQSLLELTAQFSRDINMSFGLDKCRTLHIHKGKILSDTNNADRPDKFESMGPTDTYKYLGIHQSNTIDHSKIKKDLSIEFIRRLNLICKKQLYSKNLFKAINTFTIPVLTFSFGIVKWTRTDIRNIEIKIRTTLTKHNYLHPKSAIERISINREKGGRGLIDLNVLWEGQIQNLRNFFFSKTTTSNIHSAIVDLDKNCTPLNLSNRNIIYKAAQNHITDKINKWRSKELHGRHIHDLEQIHVDLDASNKWLKLGFLFPETEGFMIAIQDQVINTKNYKKHILKDPTVQNDKCRKCHRASETIQHITSACPNLAQTDYTHRHNQVTHIIHQKLAIKHNLLPPKVLPYYQYVPKPVLENRSHKIYYDRAILTDKTIHNNRPDITMIDKQNKHAYIIDIAVPNTHNIQKTITEKIHKYTDLKDEIIRIWKINRVYIVPLVLSSTGIIPAHLHHYLHQIEVSTNTYMTMQKATILNTCRIVRKLEFLQEDS

SEQ ID NO: 20332 - protein, 1258 aa, Hypena proboscidalis
MEMILRNKRIGPLSGGERRSTPGADAGCYSMRTVSGEELNRRAPSGSSENVTANTSSRRSSRAVTPAMAVSQEALATQPVTTKAGKPRVRMQWSDEINKFIIRTYFYITKLETDRTMYCKKLHDQFNLKYPHLNLSGQRIADQRRAIIRNRMLSETVINNLKEEVAEQLAREESENSQLQLSNQLPSLSNSLEASLITLENSSQTTQITPSEILHLQQNTTSITQQTESTQNSVAIHLGISAEDLITQIETALVLYTGTDPTVRPKLPRLKENKKLYGFIDICNKQVLPRFISLESDLIAIHTLLYCSALVISENLGYKIRYNSNTEYRTRTLRKPAWQVRLERDIDHLRSDIGRLTQYINNNRSRKVVAAAERIFKMTKIHTIHERNNIRPEEYLDTLKQKLTVKSQRLARYIKSLRRKEDNKNFTFNEKGFYRACKDNNTPTNVQCALPEVRELENYWADLWKKQYNHNDGADWIGKIESSMSNIDTMELYDITEEDVSVVTRRMKNWKAAGVDGVHNFWYKKFFALHSILAKNITDIISGHQELPKFLTKGITYMLPKSNDTHNPSQYRPITCLPTIYKLITSLITRSINSHIIRNNILSEEQKGCRQNHKGCKEQLIIDSTVLKNAHTHKRNLHISYIDYKKAFDSVPHSWLVKVLHIYKINPTIITFLENAMSEWRTTLHLRIGTDEITTDEIHIGNGIFQGDALSPLWFCLALNPLSHILNDTSNGYKLNTNTSLTHLMYMDDIKLFAKSDKCLKNLLEITTQFSQDINMSFGLDKCKTLHIHKGKIKNSNPDESSSLAFEVMDPTDSYKYLGIHQSNVINHVQIKKRLTAQYFTRLNLISKKHLNSKNLFKAINTFAIPILTFSFGVVKWTRSDINNLEVKTRKILFKHSYLHPKSAIERVSVARLKGGRGLIDLKQLWEGQVKNLREFFYNKAIDSNIHSATIDLDNNFTPLNLKNKDIIYRKPQEHASDKLSRWCSKELHGRHFNDLQQPHVDSDASNQWLKLGSLFPETEGFMIAIQDQVINTKNYKKFILKDPSIRNDKCRKCHRASETIQHITSACPTLAQTDYTHRHNQVAHIVHQKLAIKHNLIPSKVTPYYQYTPKPVLENQSHKIYFDRAILTDKTIHNNRPDITLIDKENKHTYLIDIAVPNSHNLQKTITDKIHKYTELKEEIIRIWKMSKVSIVPLVLSSTGIIPKSLRHYLQQIDIPINIYMTMQKAVILNTSRIVRKFLQDDYNPNEPIPQHELHLV

SEQ ID NO: 20333 - protein, 1414 aa, Emesis brimo
MNSPSKRYNLRSLPGGRRGAPGAGAGCFSIRDTGGEALSRRAPVTQNTTANRRELNRRANDVKATAEISGDVTTSLFSTIPSTRSYYATNQTSMSSSNLLDDVVQDVNLDNEIAPTSSIPKKRRRWTQEMNVYILRIYFQLTELGTDTKNYLEPLHLKFTEKFPSMQVSRQRVGDQRRAIVRNNLVPQDTIDQIFNEVKDELNALQMTLQVQQQILNSDNETQRAPNITVQTHKPGNISTNTPKPQSQTRIRWTKDQNETIMQLYYRITQLDTNRTAYRKQLHEAFIRTYPSLAHLNKQHIADQRRAIITKNYICNTRLNVIKQQIAEELSITTHISHITNNQINMSNSATDQIGQTPPAIILPMLSLNTQSNAPTQSYASSDALSDTQNSQQSDVLNSRTSEMIQNEVTLNELKNQLERTLTRYTDSDPTTRPKLPRLRENKKLYKFIDIFNKQLLNQYHSLESDLNTIHTLIYCSALVICENLGYKIQDHNSYTHQKNNKCLKPAWQRRIEKDIICLRADIGRLTQYINNNRSKKVVAAVEIIFRTTKIHSAYDKNNVKPEEYLDTLKQKLRLKSQRLARYIKSLKRKEDNKLFQINEKHFYRKLKTENIRNNHDSDIEIPDVNDLRNYWSDLWKKQKDYNDNATWITDEENRMNDMVTMEMRDVNEEDVIAVVKYMKNWKAAGLDKVHNFWLKKFRTLHNILAKNIKEIVKGEQPLPKFLTTGITYMLSKGNDTVNPSQYRPITCLPTIYKLITSIITHRIRNHLEQYKIIFEEQKGCRQNHKGCKEQLIIDSIILKHANVNKLNLHISYIDYKKAFDSVPHSWLIRVLRIYKIDPNIIKFLENAMSDWSTKIYLSNGANSITTDEIRIENGIFQGDSFSPLWFCLALNPLSHLLNTIGNGYKLNTNTSITHLMYMDDIKLFANTTEDLKTLEDITTKYSQDINMCFGLDKCRTLHIHKGIIKNNSTNPEEVSNFIFIGPDEFYKYLGILESNKINHSQIKKNLVSEYVRRITLICKKQLYSKNLFKAINTFSIPVLTYSFGIIKWTRTDIHSLQIKTRTSLTKYHYLHPKSAIERMDLKRQKGGRGLIDIKLLWQGQIRNLRDFFYNKSKTSTLHSVTIDIDNNFTPLNLSNRNIDYESPENYTNDKIAKWRGKELHGRHLHDLEQTYVDFEASNQWLKLGSLFPETEGFMIAVQDQVINTKNYKKHIIKDTAVQNDNCRKCHNAPETIQHITGACPTLAHNDYTHRHNQVAYIIHQKLALKYNLIPPKVLPYYQYVPKPVLESRTHKIYFDRTILTDKTVHNNRPDITLIDKRSKYTFLIDIAVPNTHNLQKTVTEKIHKYAELKDEIIRIWKMNRVFIVPLVLSSTGVIPKQLHHYIEQIELPNNIYMTMQKAVILNTCRLVRKFLQD

SEQ ID NO: 20334 - protein, 1258 aa, Hypena proboscidalis
MEMILRNKRIGPLSGGERRSTPGADAGCYSMRTVSGEELNRRAPSGSSENVTANTSSRRSSRAVTPAMAVSQEALATQPVTTKAGKPRVRMQWSDEINKFIIRTYFYITKLETDRTMYCKKLHDQFNLKYPHLNLSGQRIADQRRAIIRNRMLSETVINNLKEEVAEQLAREESENSQLQLSNQLPSLSNSLEASLITLENSSQTTQITPSEILHLQQNTTSITQQTESTQNSVAIHLDISAEDLITQIETALVLYTGTDPTVRPKLPRLKENKKLYGFIDICNKQVLPRFISLESDLIAIHTLLYCSALVISENLGYKIRYNSNTQYRTRTLRKPAWQVRLERDIDHLRSDIGRLTQYINNNRSRKVVAAAERIFKMTKIHTIHERNNIRPEEYLDTLKQKLTVKSQRLARYIKSLRRKEDNKNFTFNEKGFYRACKDNNTPTNVQCALPEVRELENYWADLWKKQYNHNDGADWIGKIESSMSNIDTMELYDITEEDVSVVTRRMKNWKAAGVDGVHNFWYKKCFALHSILAKNITDIISGHQELPKFLTKGITYMLPKSNDTHNPSQYRPITCLPTIYKLITSLITRSINSHIIRNNILSEEQKGCRQNHKGCKEQLIIDSTVLKNAHTHKRNLHISYIDYKKAFDSVPHSWLVKVLHIYKINPTIITFLENAMSEWRTTLHLRIGTDEITTDEIHIGNGIFQGDALSPLWFCLALNPLSHILNDTANGYKLNTNTSLTHLMYMDDIKLFAKSDKCLKNLLEITTQFSQDIKMSFGLDKCKTLHIHKGKIKNSNPDESSSLAFEVMDPTDSYKYLGIHQSNVINHVQIKKRLTAQYFTRLNLISKKHLNSKNLFKAINTFAIPILTFSFGVVKWTRSDINNLEVKTRKILFKHSYLHPKSAIERVSVARLKGGRGLIDLKQLWEGQVKNLREFFYNKAIDSNIHSATIDLDNNFTPLNLKNKDIIYRKPQEHASDKLSRWCSKELHGRHFNDLQQPHVDSDASNQWLKLGSLFPETEGFMIAIQDQVINTKNYKKFILKDPSIRNDKCRKCHRASETIQHITSACPTLAQTDYTHRHNQVAHIVHQKIAIKHNLIPSKVTPYYQYTPKPVLENQSHKIYFDRAILTDKTIHNNRPDITLIDKENKHTYLIDIAVPNSHNLQKTITDKIHKYTELKEEIIRIWKISKVSIVPLVLSSTGIIPKSLRHYLQQIDIPINIYMTMQKAVILNTCRIVRKFLQDDYNPNEPIPQHELHLV

SEQ ID NO: 20335 - protein, 1406 aa, Apodemia duryi
MQSRKNRYNLRPLPGGRRGAPGAGAGCFSMRDTGDEALSRRAPVTQHTTANRRELNRRAYDVEATAEISGDDTTSLFSSILSTRPSYTTSQTSTSSSSMPDDVVQDVNLDIELASTSSIPQKRKRWTHEMNAYILRTYLQLTELDTDTKNYLELLHLKFTEKFPNIQVTRQRIGDQRRAIFRNKLLPQDTIEQIYSEVKNELDNLRVDLRTQHRIADDALHVSAVALKAREMERVPSICKSQSQTKMKWTKDQNENIMRLYYRLTQLETNRTAYRKLLHKEFIKIYPLLSHLTEQHIADQRRAIITKKYISDTKLSAIKTQVTEELSLGSYIDDNVSNSTVSQIGQISPTMISPTQVFYTQSSTSFQNNTLSNIHESNTHNSQHSDALNSQTSELTETETTFNQLKKQLESTIIRYAHTDPTNRPKLPSLRENQKLYKLVEIFNKHLLNKYYSADSDLNTIHTLIYCTALVICENLGYKIQDQNLHTLHNNHKHQKPAWQRRIEKEIIDLRANIGRLTQYINNNRSKRVVATVEIIFRTIKTHSTYEKNNTRPEEYLDTLKQKLRLKSQRLARYLKALKRKEDNKLFQANEKFFYRKLKNENTHNNNDSNTPIPAVNELKNYWSDLWKKREDHNDNATWIIDEEKRMFDIKTMELRDIIEEDVVAAIKSAKNWKAAGLDKVHNFWLKKFSTLHNILAKNIMAIIKGEQPLPKFLTTGITYMLSKGSDTANPSKYRPITCLPTIYKLITSIITHRIRNHLEQYNIISEEQKGCRQNHKGCKEQLVIDSIILKHTQVHKRNLYISYIDYKKAFDSVPHSWLLRVLRVYKIDPIIIKFLKNAMSDWRTKIYLSNGTETITTDEIPIENGIFQGDSFSPLWFCLALNPLSNLLNTSKNGYKLNINTSISHLMYMDDIKLFARTAKGLKTLENITSKYSQDINMCFGLDKCRTLYIHKGKITNNSASFEEASIFTSIDPTESYKYLGILESNKIDHSQIKKNLVSEYVKRIKLICKKQLYSKNLFKAINTFAIPVLTYSFGIIKWTHTDIHNLEIKTRTSLTKYNYLHPKSAIERISLKRQKGGRGLVDIKLLWQGQIRNLREFFYDKSKTCNLHNAAIDIDNNFTPLNLNNRTIDYETPENYTNAKMAKWREKELHGRHLHDLEQTHVDLEASNQWLKLGSLFPETEGFMVAVQDQVINTKNYKKYIIKDVNMQNDNCRKCHHAPETIQHITSACPNLAQTDYTYRHNQVVQIIHQKIALKYKLIPPTVLPYYQYVPKPVLESKTHKIYFDRTILTDKTVHYNRPDITLIDKLKKYTFLIDIAVPNTHNLQKTIAEKIYKYTELKAEIIRIWKMNKVFIVPLVLSSTGVIPKNLKYYLEQIDLPFSIYMTMQKAVILNTCRIVRKFLQED

SEQ ID NO: 20336 - protein, 1364 aa, Jera tricuspidata
MRRSNRIKNYNSAQPATVAEITSDITSHTSSSVSSTHSLLQFGNTYNIETRSKRKLRGPLPRGDRQYTLIADADCHGIRTVSGKASSGRTSTGSSEFITVETRVETDRQTDKTSSPIEPYSPSTISYTPSVPSSPSTISNNDHQENTHIQDSNSFRLITPAEDVSQRAQATQPATTKAGKTRVRMQWNDEINTFIMRTYFHVTKLETDRTMYCKKLHDQFVIKYPHLKVSAQRIADQRRAILRNKMLPDDVINNIRKDISDQLRREENANSPFPFTFSSITHESTFQGALNTCITHTSHMDLPSTQQRLLTQAHVSTQTSEIPNILSITQQTERTQNTETITIDIPTQQLIDQLETALVQYTGVDPTVRPKLPRLKENKKLYGFIDIFNKQVLGNYFSIDSDINTIHTLIYCSALVICDKLGYKVRTHNLDTQHHYKPQKPAWQIRIETDIEKLRADIGRLTQYIKNNNRSRKVLAAVDNIFRKTKVHTIHECNNVRPEEFLDTLKQKLTLKSQRLARYLKALQRKEDNKTFSTNEKGFYRLLKNKSEQIKKSSEQIPQSHELKNYWTGLWKKQNDHNNSAEWIFGEDNRMLNVETMEFTNINMKDIQTTTKKLKNWKAAGIDSIHNFWYKKFSTLHYILAKNITELIKGEQDLPKFITKGITYMLPKGNYTINPSQYRPITCLPTIYKLITSLITLNINKHLKHNNILSEEQKGCRQSHKGCKEQLIIDTTILKHAHNQKRNLHISYIDYKKAFDSVPHSWLIRVLHIYKINPIIINFLENAMSNWRTTLYLSNGIDVITSNEIPIGNGIFQGDSLSPLWFCLALNPLSNLLNTSSGGYILNTNTSITHLMYMDDIKLFAKTDKCLKNLIEITARYSRDINMTFGLDKCRTLHIHQGKINSNINNMDEHNSFVSMEPSESYKYLGIHQSNTINHIKIKKELSSEYARRLNLICKKQLYSKNLFKAINTFAIPVLTYSFGVVKWTHTDINNLEIKTRTTLTKYNYLHPKSAIERISVKRHRGGRGLIDLTLLWKAQIHNLREFFFLKSATSTIHSSITQLDNNFTPLNLNNKDVIYKSPQLHTDEKIGRWRSKELHGRHLHDLEQPYVDAVSSNQWLKFGSLFPETEGFMIAIQDQVINTKNYKKIILKDPNTHNDKCRKCHRASETIQHITSACPNLAQTDYTHRHNQIAHIVHQKLAIKHKFITDKVVPYYQYAPKPVLESQTHKIYFDRAILTDKTVHNNRPDITMIDKINKHTYLIDIAVPNTHNLQKTITDKIHKYTELKEEIIRIWKMNKVYIVPLVVSSTGIIPKHLCHYLQQIHLPPNLYMTMQKAAILNTCRIVRKFLQEDIPEVQTSTNELHLA

SEQ ID NO: 20337 - protein, 764 aa, Agara michaeli
MAKVVTMEFTNINREDIQLTTTRMKNWKAAGIDRIHNFWYKKFSTLHSILAKNITELINGDQELPKFITKGITYMLPKSSDTAAPSQYRPITCLPTIYKLITSVITHKINKHLKHNNILSEEQKGCRQNHKGCKEQLVIDTTILKHAHTQKRNLHISYIDYKKAFDSVPHSWLIHILHIYKINPVIVNFLKNAMSNWRTTLYLSNGADAIITDEIPIGNGIFQGDSLSPLWFCLALNPLSNLLNTSPNGYKLNTGTSITHLMYMDDIKLFAKTAKCLKNLIEITAQYSQDINMTFGLDKCRTLHIRQGQIKNNSSLIDEPNSFITMDPSDSYKYLGIYQSNTINHIKIKNDLKSEYTKRLNLICKKQLYSKNLFKAINTFAIPVLTYTFGVVKWTRTDINKLEVKTRTTLTKHNYLHPKSAIERISVKRHKGGRGLIDLTSLWTTQIKNLRDFFYSKSTTSTLHSSIIQLDNKFTPLNLNNKELIHKSPQVHLQEKMGRWRSKELHGRHLHDLEQPHIDTISSNQWLKLGSLFPETEGFMLAIQDQIINTKNYKKIILKDPNTQNDKCRKCHRASETIQHITSACPNLAQTDYTHRHNQIAHIVHQKLSIKHKLITDKTIPYYQYVPKPVLENQSHKIYFDRAILTDKTVHNNRPDITIIDKINKNTYLIDIAVPNTHNLQKTITDKIHKYTELKEEIVRIWKMNKVYIVPLVLSSTGIIPKHLHHYLQLIGLPNHIYMTMQKAAILNTCRIVRMFMEEDAATY

SEQ ID NO: 20338 - protein, 1270 aa, Udranomia kikkawai
MAIQCTSTRNAVVVDHPSSLTTSDSSSPLSSQSSPISSPLSSPISSPLSSPISSILSIPTSPSINRNLTEKLENTHVNDNNSLSQISPAEDVSQEALATQPATTKAGKPRVRMQWNDEINTFIMRTYLYVTKLETDRTMYCKKLHDRFVIKYPHLKVSAQRIADQRRVIIRNNMLSDNVINKLRQEISEQLRREEDINTLSQESDFTQHTALTSPPHVSSTCLQQNAHVSQQTNIISNITKQSENTQNIENITLNIPTQHLIHQLETTLAKYTSINPTVRPRIPRLKENKKLYEFVAIFNKHILRNFFSIDSDINSIHTLIYCSALVICENLGYKIRQYNSSPNHKHSPQKPPWQIRLETDIKHLRADIGRLTQYTMKNNRSKKIIAAVEDIFRKTKVHTIHEKNNVRPEEYLDTLKQKLTLKSQRLARYLKALQKKEDNKTFVTNEKSFYRMLKINTSELNENTRKSDLPPSNDLKNYWAELWKKKNDHNDNAGWIVDEEQKMLNVETMEFTDILEKDIEIITKRLKNWKAAGIDSIHNFWYKKFSALHNILAKNISELIKGEQILPKFITQGITYMLPKSKDTSNPSQYRPITCLPTIYKLITSLITEKINIHLEHHSILTEEQKGCRRSHKGCKEQLLIDSTILKHVHSQKRNLHISYIDYKKAFDSVPHSWLIRVLHIYKINSIIINFLENAMSNWRTTLYLSNGVDKITTDEIPIENGIFQGDSLSPLWFCLSLNPLSNLLNTSSSGYKLNTNTTITHLMYMDDIKLFAKTDKSLKDLVDITTRYSRDINMTFGLDKCRSLHIQQGKIRNNNSNIDESNTFQIMEPTESYKYLGIHQSNTIDHIKLKKDLKIEYTKRLNLICKKQLYSKNLFKAINTFAIPVLTYSFGIVKWTRTDINNLEIKTRTTLTKNNYLHPKSAIERISIKRDKGGRGLIDLHLLWERQIQNLRIFFFNKSTTSRIHSAIIQLDDKFTPLNLRNRDLVYKLPQVHLNEKINRWRSKELHGRHLHDLEQPHVDLIASNQWLKLGSLFPETEGFMIAIQDQIINTKNYRKYIIKDPNVQNDNCRKCHRLPETIQHITSACPTLAQTDYTHRHNQVTHIIHQKLAIKQNLIANKITPYYQYQPKPVLENTRYKLYYDRAILTDKTIHNNRPDITLIDKQDKIVFLIDIAVPNTHNILRSITEKINKYTELKEEVLRIWKMKKVYIVPLVLSSTGVIPKHLMQSLKILNIPENTYITMQKAVILNTCRIVRKFLQEDLQHQPII

SEQ ID NO: 20339 - protein, 765 aa, Muschampia tessellum
MTYVETMEFININREDVETITSRMKNWKAAGIDNIHNFWYKKFRTLHNILAKNITELIKGEQELPKFMTKGITYMLPKGSDTANPSQYRPITCLPTIYKLITSLITHNINKHLKYYNILSEEQKGCRQGHKGCKEQLIIDSTILKQCHSQKRNLHISYIDYKKAFDSVPHSWLIRVLQIYKISPTIINFLIKTMSNWRTTLHLSKGNDNIITDEIPIETGIFQGDSLSPLWFCLALNPLSNLLNTSPNGYKLNTSTSITHLMYMDDIKLFSKNYKGLNNLIKITKQYSQDINMTFGLDKCRTLHIHQGKITNNSNNTEESDPFLSMEPHDTYKYLGMHQSNTINHTKIKQDLTCEYIRRLNVLCKKQLYSKNLFKAINTFAIPVLTYSFGVVKWTRTDINNLEIKTRTTLTKYNYLHPKSAIERISVKRDKGGRGLIDLTLLWEGQIQNLRDFFRNKSITSTIHLSIVELDKNFTPLNLNNKDLYFKSPQAHFEQKIGRWRSKEMHGRHLHDLEQPHVDPESSNKWLKLGCLFPETEGFMIAIQDQVIATKNYKKVILKDPETDNDKCRKCHRASETIQHITSACPNLAQTDYIHRHNQVANIIHQKLAIKHKLITDKSVPYYQYVPKPVLEDRSYKIYFDRAILTDKTIHNNRPDITMIDKVNKIAYLIDIAIPNSHNLQKTLTDKIHKYTELKEEVIRIWKMHKVFIIPLVLSSTGIIPKHLHHYLKQIDLPENIYITMQKAAILNTCRIVRKFLLQEPSLNC

SEQ ID NO: 20340 - protein, 831 aa, Hypermnestra helios
MKSLQRKKDNKLFNVNEKGFYRSFDSENNYNSDALPQADKLKDFWTELWKKQGDHNDNAEWIDREENRMANIETMELPEIACKDIEAVTRRLKNWKAAGVDGLHNFWYKKFFVLHDILAKNFTELIRGEQELPKFITKGVTFMIQKNTHDTVNPSQYRPITCLPTIYKLITSLITQTINKHLEQNNILFEEQKGCRQNHKGCKEQLIIDSTILKHANTKKRNLHISYIDYKKAFDSVPHSWLIRVLHLYKINSSIINFMENAMSNWRTTLYLSNNSGTITTDEIRIENGIFQGDSFSPLWFCLALNPLSNLLNSSTSGYKLNSKTSITHLMYMDDIKLFAKTNKDLQNLIEITTHFSQDINMQFGLDKCRILHIQRGKIDYRDASSEEPNTFKEMEPVDTYKYLGFHQKNIIDHQKIKKDLTIEYTRRLSLICNKQLYSKNLFKAINTYAIPVLTYSFGVIKWTSTDINNLEIKTRTTLTKHNYLHPKSAIERISIERQKGGRGLIDLKLLWQGQIQNIRDFFYSKTTTSDIHMAIIQLDNKYTPLNLNNRNIQYKLPQIYINEKVDRWRSKELHGRHLHDLEQAHVDLEASNKWLKLGSLFPETEGFIIAIQDQVINTKNYKKFIIKDPNSQSDKCRKCQSASETIQHITSGCPTLAQTDYTHRHNQVAHIVHQKLASKHNLIQTKTVPYYQYIPKPVLENQSYKIYFDRAILTDKTVHNNRPDITMIDKINKVTYLIDIAVPNTNNIQRTITEKIHKYTELKEEIIRIWKMQNVYIVPLILSSTGVVPKHLLYYLQQIDLPSNIFMTMQKAVILNTCRIVRKFLQEDIT

SEQ ID NO: 20341 - protein, 1327 aa, Ridens mephitis
METRLKRKLRGPLPGGDRRGTPGADAGCHSMQAVSGEELSRRAPTGSPENTSADQDNNDRLTDFITNSPIEPYSPSTISYTPSLQSLPSSTSSSPPTVSFRGPSKPVLDVAREVNTFLPASTKAGKPRVRMSWSQEVNIFIMRTYYQITKLETDMTTYRKRLHELFSRQYPHISVSEQRVSDQMRTIVRNKRLSQDTLNQLKEEVRKSLEEETNENSNLINMSQLTQNTSLQSLYQSQSVEQPYSSNLADITPTTSCISPNTQTLVTSITCTQKETFTQHASTQTNFSPEYVSQITHTTQLNETAQVDTTTQELISQLETALIQYTGTDPTARPKLPKLRENKKLYGLIDIFNKKILNRFYSIDSDLVSIHTLIYCSVYVISHNLGYKMRTHNPTTPNKSPNNSKPPWQTRLEVDIKNLRADIGRLTQFINNNRSKKVVKAVEAIFRKTKVHTIHEPNNVRPEEYLDTLKQKLTLKSQRLSRYLKALQRKEDNKLFTTNEKIFYRLSKDNRIQIDNYGTIPEPRELKNYWADIWEKRNDHNDNANWIEDERNRMIDIDEMELTDITPEDVAIVTSRMKNWKAAGIDNVHNFWYKKFLTLHNILAKNITELIRGEQPTPKFITKGITYMLPKNNDTRNPSQYRPITCLPTIYKLITSLITRYINSHLHRNNILSEEQKGCRQNHRGCKEQLIIDSTILKCTHTQKRNLCISYIDYKKAFDSVPHSWLIRILQIYKINPTIINFLKNAMSDWRTTLHLNNGTDMVSTNEIYIRNGIFQGDSLSPLWFCLALNPLSNLLNNTANGYKLNSDTAITHLMYMDDIKLFAKSEKCLQSLLKLTAQFSRDINMTFGLDKCRTLHIHNGKIVSNTNNADRPDAFESMGPTDTYKYLGIHQSHTIDHSKIKKDLSIEFIRRLNLICKKQLYSKNLFKAMNTFTIPVLTFSFGLVKWTRTDIRNIEIKIRTTLTKHNYLHPKSAIERISINREKGGRGLIDLNVLWEGQIQNLRNFFFSKITTSNIHSAIVDLDKNCTPLNLSNRNIIYKTPQNHITDKINKWRSKELHGRHLHDLEQTHVDLEASNKWLKLGSLFPETEGFMIAIQDQVINTKNFKKHILKDPTVQNDKCRKCHRASETIQHITSACPNLAQTDYTHRHNQVTHIIHQKLAIKHSLLPPKVVPYYQYVPKPVLENQRHKIYYDRAILTDKTIHNNRPDITIIDKQNKHAYIIDIAVPNTHNIQKTITEKIHKYTDLKDEIIRIWKMNKVYIVPLVLSSTGIIPAHLHHYLHQIELPTNTYMTMQKATILNTCRIVRKFLQEDINIEPCPSNETHLA

SEQ ID NO: 20342 - protein, 1296 aa, Urbanus evona
MRRSNRIKNKNSAQSETVAQIPSNITPNILSSLSDNNIDRQTDRTSSPIEPYSPSTISYTPSVPSSPSTVSNSDLLQNVHIDDIEDSNILRLDTLAEDVSQEAQATQPVTTKAGKPRVRMQWNDEINTFIIRTYLYVTKLETDRTMYCKKLYDQFTLKYPNLKVSAQRIADQRRAILRNKMLPDDVINNIKQEIKEQLRREEIENTPIQISNTVTFTSNTHESTSQVTPNTCTTNTTSISQSLTQAHVSTQTSTIPNIISILQQSENTQNIETEILDIPTLKIMEQLQSSLVQYTGIDPTVRPKLPRLKENKKLYQFIDVFNKKILSNFFSIESDINCIHTLIYCSALVICENLGYKIRTDNSRMRHTHTSQKPAWQIRLETDIKKLRADIGRLTQYIVKNNRSRKVVNAVENIFRNTKIHTRHESDNVRPEEYLDTLKQKLTLKSQRLARYLKALQRKEDNKIFATNEKSFYRMMKINDTQIDRNSEMPQSNELKNYWTNLWKKQNEHNNNAEWIDSEERRMSNVVTMEFDDISEEDIEIVTKRMKNWKAAGIDSIFNFWYKKFIALHNILAKNITELLKGEQELPQFITKGITYMLPKSNDTANPSQYRPITCLPTIYKLITSLITYNINKHLIQNNILSEEQKGCRQSHKGCKEQLVIDTTILKHAHTKKRNLHISYIDYKKAFDSVPHSWLIRVLQIYKINPILINFLENVMSNWRTSLFLSNGTNIITTDEIPIGNGIFQGDSLSPLWFCLALNPLSNLLNDSSNGYALNANTSITHLMYMDDVKLFAKTNKCLKNLIEITTQYSRDINMTFGLDKCRTLHIHQGKLKSNSNNIDDSNTFVSMDATDSYKYLGIHQSNTINHIKIKKDLTSEYITRLKLICKKQLYSKNVFKAINTFAIPTLTYSFGIIKWTRTDINNLEIKTRTTLTKYKYLHPKSAIERISVKRDRGGRGLIDLSLLWQGQIQNLRDFFYSKSTSSKIHSSIIQLDSNFTPLNLNNKNLSYKSPQIHSEEKMGRWRSKELHGRHLHDLEQPHVDAVASNKWLKLGSLFPETEGFMIAIQDQVINTKNYKKIILKDPNTQNDKCRKCHRASETIQHITSACPNLAQTDYTHRHNQISQIIHQKLAIKHKLITDKAVPYYQYIPKPVLEDQSHKMYFDRSILTDKTIHNNRPDITLIDKINKNTYLIDIAVPNTHNLQKTITDKIHKYTELKEEIIRIWKMNKVYIVPLVLSSTGIIPKHLHHYLQQIGLHANVYMTMQKAAILNTCRIVRKFLQEDIPNEHTLSNELHLA

SEQ ID NO: 20343 - protein, 1179 aa, Astraptes brevicauda
MRRSNRLKNKNSAQSETVAQIPPNITSHILSSLSVHDNDRQIDRTTSPIEPYSPSTISYTPSISSSPSTVSYNGHQQNTHIEDSNIFGLDTLAEDVSQEALATQPVTTKAGKPRVRMQWNEEINTFIIRTYLYVTKLETDRTMYCKKLHDQFTLKYPHLKVSAQRIADQRRAIIRNRMLSDDVIGNIREEIKEQLRREEIANTPIQVSNTMASSLITHESTTPITSIAPSSTQQSQAHLSTQTSTISNIISTIQQSEITQNMETETLNIPAHKIMEQLETSLVQYTGMDPTVRPKLPRLKENKKLYQYIDIFNKQILSNFFSVDSDINCIHTLIYCSALVICESLGHEIRTHNSLIRHTYTPRKPAWQIRLEADIIKLRADIGRLTQYIIKNNRSRKVVNAVENIFRNTKVHTKYERDNIRPEEYLDTLKQKLTLKSQRLARYRKALQRKEDNKTFASKEKSFYRILKNNDTKIDRNSDMPQPNELKNYWTNLWKKQNDHNNNAEWIDSEEKRMRNVETMEFTNISAEDIEIATRRMQNWKAAGIDGIFNFWYKKFSTLHNILAKNITELLKGEQELPQFITKGITYMLPKSNDTADPSQYRPITCLPTIYKLITSLITYNINKHIIYNGILSEEQKGCRQNHKGCKEQLVIDTTILKHAQTKKRNLHISYIDYKKAFDSVPHSWLIRILHIYKINPIIINFLKNAMSNWRTTLFLSNGTIKITTDEIFIGNGIFQGDSLSPLWFCLAMNPLSNLLNTSSSGYTLNATTSITHLMYMDDIKLFAKNDKCLKNLIKITTQYSQDINMTFGLDKCRTLHIYQGRLKSNSNNIDESNTFAPMDATDLYKYLGIQQSNTINHIKIKKNLTSEYIRRLKLICKKQLYSKNLFKAINTFAIPVLTYSFGVVKWTRTDINNLERVTRTTLTKYKYLHPKSAIERISVKRHNGGRGLIDLSLLWKGQIQNLRDFFYTKSTTSTIHSSIIELDNNFTPLNLSNKCVTYKTPQLHSEEKIGRWRSKELHGRHIHDLEQPHIDAAASNKWLKLGSLFPETEGFMIAIQDQVINTKNYKKFILKDPNTQNDKCRKCHRASETIQHITSACPNLAQTDYTHRHNQIAHIVHQKLAIKHKLVTDKPMPYYQYIPKPVLEDQSHKIYFDRSILTDKTIHNNRPDITLIDKINKN

SEQ ID NO: 20344 - protein, 1280 aa, Codatractus alcaeus
METRLQKKLRGPLPGGDRRGTPGADAGCHSMQAVSGEELSRRAPTGSPENTSADQDNNDRLTDFITNSRIEPYSPSTISYTPSLQSLPSSASSSPPVVSFRDPSTPVLDVAREVNTFLSASTKAGKPRVRMSWSKEVNIFIMRTYYQITKLETDMTTYRKRLHELFSRQYPHISVSIQRVSDQMRTIVRNKLLSQDTLNQLKEEVRKSLEEETNENSSLIKMSQLTQNIHLQSPHRSQSVEQSYSLNLADIEQITSCFNTNTQTLVTNISCTQQETFTQHASTQTNFSPESVSPITHNTQLNVTEQIDTITQDLINQVETALIQYTGTDPTARPKLPKLRENRKLYDLIHIFNKHILNRFYSIDSDLVFIHTLIYCSAYVISHNLGYKIRKHNSKTPNKYHNNSKPAWQTRLEVDIKHLRADIGRVTQYVNNNRSRKVVKAVEAIFRKTKVHTIHEPNNVRPEEYLDTLKQKLTLKSQRLSRYLKALQRKEDNKVFTTNEKIFYRLCRDNRIQNDNCSIVPEPHELENYWADIWEKRNVHNENAKWIDDERNRMIDVDEMELTDITTEDVAIVTSRMKNWKAAGIDNVHNFWYKKLFTLHNILAKNITELIRGEQPTPKFMTKGITYMLPKNNDTQNPSQYRPITCLPTIYKLITSLITRCINSHVHRNNILSEEQKGCRQNHRGCKEQLIIDSTILKCAQTHKKNLYISYIDYKKAFDSVPHTWLIRILQVYKINPTIINFLKNAMSDWRTTLQLNNGTDIISTSEIYIRNGIFQGDSLSPLWFCLALNPLSNLLNNTQNGYKLNSDTAITHLMYMDDIKLFAKSEKCLQSLLELTAHFSRDINMSFGLDKCRTLHIHKGKIVSDTNNADSPVAFESMGPTDTYKYLGIHQSNTIDHSKIKKDLSTEFIRRLNIICKKQLYSKNLFKAINTFTIPVLTFSFGVVKWTRTDIRNIEIKIRTTLTKHNYLHPKSAIERISISREKGGRGLIDLYVLWEGQIQNLRNFFFSKTTTSNIHSAIVDLDTNCTPLNLSNRNIIYKTPQNHITDKSNKWRSKELHGRHLHDLEQTHVDLDASNKWLKLGSLFPETEGFMIAIQDQVINTKNYKKYILKDTTVQNDKCRKCHRASETIQHITSACPNLAQTDYTHRHNQVTHIIHQKLAIKHDLLPRKFVPYYKYVPKPVLENRRHKIYYDRAILTDKTIHNNRPDITMVDKQNKHAYIIDTAVPNTHNIQRAITEKIHKYTDLKDEIIRIWKTNRVYIVPLVLPSTGIYLHTFTII

SEQ ID NO: 20345 - protein, 1144 aa, Muschampia proteus
MRRSNRIKNKNAQSETVAEITPNVIDGTSSPIESVSLSTTSYSLSISTSPSTVSNSSYQETNVLTRNNSSLTLAEDVSQAAPATQSATTKAGKPRVRMQWNADINTFIMRTYFYVTKMETDRTMYCKKLHDQFTIKYPHLNVSAQRIADQRRVILRNKLLSDDTINGIKLEISEMLRNEEISNVGSHTEELTTQDNTSHIIQTSHVSATSTHQNTPTHAHVFTQTTEISNIHSIMENIENTSNTEKTTKDLSTQKLTDQLETTLTQYTGIDPTVRPKLPKLKVNKRLHEYIDVFNKQILGNFFSFDSDINSVHTLIYCSALVICENLGYKIRTHNSGTRRNHIPQKPAWQIRIESDIQQLRADIGRLTQYIVNNIRTKKVVAAVETIFRKTKIHTIHERNNFRPEEYLDTLKQRLNLKAQRLRRYLKALQRKKDNKIFTTNEKGFYRTLNNNCTEININSKMPNSNELQNYWSDIWNRHSDHNNNSEWIINEENRMSYIETMEFTNINREDIEIATRRMKNWKAAGIDNIHNFWYKKFNALHNILAKNITELIKGEQELPKFMTKGITYMLPKGSDTANPSQYRPITCLPTIYKLITSLITHNINKHLKYYNVLSEEQKGCRQGHKGCKEQLIIDTTILKQCHSQKRNLHISYIDYKKAFDSVPHSWLIRVLQIYKICPTIINFLNKTMSNWRTTLHLTKDNDNIITDEIPIKTGIFQGDSLSPLWFCLALNPLSNLLNTSPNGYKLNTSTSITHLMYMDDIKLFAKSYNCLNNLIKITTQYSQDINMAFGLDKCRTLHIHQGKIKNNKNNTEESDPFVSMEPYDTYKYLGIHQSNTINHTKIKQDLTCEYIRRLNLICKKQLYSKNLFKAINTFAIPVLTYSFGVVKWTRTDINHLEIKTRTTLTKYNYLHPKSAIERISVKRDKGGRGLIDLTLLWEGQIQNLRDFFHNKSITSTIHLSIIELDKNFTPLNLNNKDLNFKSPQVHFEEKIGRWRSKELHGRHLHDLEQPHVEPESSNKWLKLGCLFPETEGFMIAIQDQVIATKNYKKVILKDPDTDNDKCRKCHRASETIQHITSACPNLAQTDYTHRHNQVAYIIHQKLAIKHKLITDKSVPYYQYVPKPVLENRSHKIYFDRAILTDKT

SEQ ID NO: 20346 - protein, 1258 aa, Hypena proboscidalis
MEMILRNKRIGPLSGGERRSTPGADAGCYSMRTVSGEELNRRAPSGSSENVTANTSSRRSSRAAAPAMAVSQEALATQPVTTKAGKPRVRMQWSDEINKFIIRTYFYITKLETDRTMYCKKLHDQFNLKYPHLNLSGQRIADQRRAIIRNRMLSETVINNLKEEVAEQLAREESENSQLQLSNQLPSLSNSLEASLITLENSSQTTQITPSEILHLQQNTTSITQQTESTQNSVAIHLDISAEDLITQIETALVLYTGTDPTVRPKLPRLKENKKLYGFIDICNKQVLPRFISLESDLIAIHTLLYCSALVISENLGYKIRYNSNTQYRTSTLRKPAWQVRLERDIDHLRSDIGRLTQYINNNRSRKVVAAAERIFKMTQIHTIHERNNIRPEEYLDTLKQKLTVKSQRLARYIKSLRRKEDNKNFTFNEKGFYRACKDNNTPTNVQCALPEVRELENYWADLWKKQYNHNDGADWIGKIESSMSNIDTMELYDITEEDVSVVTRRMKNWKAAGVDGVHNFWYKKIFALHSILAKNITDIISGHQELPKFLTKGITYMLPKSNDTHNPSQYRPITCLPTIYKLITSLITRSINSHIIRNNILSEEQKGCRQNHKGCKEQLIIDSTVLKNAHTHKRNLHISYIDYKKAFDSVPHSWLVKVLHIYKINPTIITFLENAMSEWRTTLHLRIGTDEITTDEIHIGNGIFQGDALSPLWFCLALNPLSHILNDTANGYKLNTNTSLTHLMYMDDIKLFAKSDKCLKNLLEITTQFSQDINMSFGLDKCKTLHIHKGKIKNSNLDESSSMAFEVMDPTDSYKYLGIHQSNVINHVQIKKRLTAQYFTRLNLISKKHLNSKNLFKAINTFAIPILTFSFGVVKWTRSDINNLEVNTRKILFKHSYLHPKSAIERVSVARLKGGRGLIDLKQLWEGQVKNLREFFCNKAIDSNIHSATIDLDSNFTPLNLKNKDIIYRKPQEHASDKLSRWCSKELHGRHFNDLQQPHVDSDASNQWLKLGSLFPETEGFMIAIQDQVINTKNYKKFILKDPSIRNDKCRKCHRASETIQHITSACPTLAQTDYTHRHNQVAHIVHQKLAIKHNLIPSKVTPYYQYTPKPVLENQSHKIYFDRAILTDKTIHNNRPDITLIDKENKHTYLIDIAVPNSHNLQKTITDKIHKYTELKEEIIRIWKMSKVSIVPLVLSSTGIIPKSLRHYLQQIDIPINIYMTMQKAVILNTCRIVRKFLQDDYNPNEPIPQHELHLV

SEQ ID NO: 20347 - protein, 1377 aa, Apodemia mormo
MRDTGDEALSRRAPVTQHTTANRRELNRRAYDVEATAEISGDDTTSLFSSILSTRPSYTTSQTSTSSSSMPDDVVQDVNLDTELASTSSIPQKRKRWTHEMNAYILRTYLQLTELDTDTKNYLELLHLKFTEKFPNIQVTRQRIGDQRRAIFRNKLLPQDTIEQIYSEVKNELDNLRVDLRTQHRIVDDALHVSAVALQAREMERVPSICKSQSQTKMKWTKDQNENIMRLYYRLTQLETNRTAYRKLLHKEFIKIYPLLSHLTEQHIADQRRAIITKKYISDTKLSAIKQQVTEELSLGSYIDDNVSNSTVSQIGQISPTIISPTQVFYTQSSTSFQNNTLSNIHESNTHNSQQSDALNSQTSELTETETTFNQLKKQLESTIIRYAHTDPTNRPKLPSLRENQKLYKLVEIFNKHLLNKYYSADSDLNTIHTLIYCTALVICENLGYKIQDQNLHTRHNNHKHQKPAWQRRIEKEIIDLRANIGRLTQYINNNRSKRVVATVEIIFRTIKIHSTYEKNNTRPEEYLDTLKQKLRLKSQRLARYLKALKRKEDNKLFQANEKFFYRTLKNENTHNNNESNTPIPAVNELKNYWSDLWKKREDHNDNATWIIDEEKRMFDIKTMELRDIIEEDVVAAIKSAKNWKAAGLDKVHNFWLKKFSTLHNILAKNIMAIIKGEQPLPKFLTTGITYMLSKGSDTANPSKYRPITCLPTIYKLITSIITHRIRNHLEQYNIISEEQKGCRQNHKGCKEQLVIDSIILKHTQVHKRNLYISYIDYKKAFDSVPHSWLLRVLRVYKIDSIIIKFLKNAMSDWRTKIYLSNGTETITTDEIPIENGIFQGDSFSPLWFCLALNPLSNLLNTSKNGYKLNINTSITHLMYMDDIKLFARTAKGLKTLENITSKYSQDINMCFGLDKCRTLYIHKGKITNSSASFEEASIFTSIDPTESYKYLGILESNKIDHSQIKKNLVSEYVKRIKLICKKQLYSKNLFKAINTFAIPVLTYSFGIIKWTHTDIHNLEIKTRTSLTKYNYLHPKSAIERISLKRQKGGRGLVDIKLLWQGQIRNLREFFYDKSKTCNLHNAAIDIDNNFTPLNLNNRTIDYETPENYTNAKMAKWREKELHGRHLHDLEQTHVDLEASNQWLKLGSLFPETEGFMVAVQDQVINTKNYKKYIIKDVTMQNDNCRKCHHAPETIQHITSACPNLAQTDYTYRHNQVVQIIHQKIALKYKLIPPTVLPYYQYVPKPVLESKTHKIYFDRTILTDKTVHYNRPDITLIDKLKKYTFLIDIAVPNTHNLQKTIAEKIYKYTELKAEIIRIWKMNKVFIVPLVLSSTGVIPKNLKYYLEQIDLPISIYMTMQKAVILNTCRIVRKFLQED

SEQ ID NO: 20348 - protein, 1258 aa, Hypena proboscidalis
MEMILRNKRIGPLSGGERRSTPGADAGCYSMRTVSGEELNRRAPSGSSENVTANTSSRRSSRAVTPAMAVSQEALATQPVTTKAGKPRVRMQWSDEINKFIIRTYFYITKLETDRTMYCKKLHDQFNLKYPHLNLSGQRITDQRRAIIRNRMLSETVINNLKEEVAEQLAREESENSQLQLSNQLPSLSNSLEASLITLENSSQTTQITPSEILHLQQNTTSITQQTESTQNSVAIHLDISAEDLITQIETALVLYTGTDPTVRPKLPRLKENKKLYGFIDICNKQVLPRFISLESDLIAIHTLLYCSALVISENLGYKIRYNSNTQYRTRTLRKPAWQVRLERDIDHLRSDIGRLTQYINNNRSRKVVAAAERIFKMTKIHTIHERNNIRPEEYLDTLKQKLTVKSQRLARYIKSLRRKEDNKNFTFNEKGFYRACKDNNTPTNVQCALPEVRELENYWADLWKKQYNHNDGADWIGKIESSMSNIDTMELYDITEEDVSVVTRRMKNWKAAGVDGVHNFWYKKCFALHSILAKNITDIISGHQELPKFLTKGITYMLPKSNDTHNPSQYRPITCLPTIYKLITSLITRSINSHIIRNNILSEEQKGCRQNHKGCKEQLIIDSTVLKNAHTHKRNLHISYIDYKKAFDSVPHSWLVKVLHIYKINPTIITFLENAMSEWRTTLHLRIGTDEITTDEIHIGNGIFQGDALSPLWFCLALNPLSHILNDTANGYKLNTNTSLTHLMYMDDIKLFAKSDKCLKNLLEITTQFSQDINMSFGLDKCKTLHIHKGKIKNSNPDESSSLAFEVMDPTDSYKYLGIHQSNVINHVQIKKRLTAQYFTRLNLISKKHLNSKNLFKAINTFAIPILTFSFGVVKWTRSDINNLEVKTRKILFKHSYLHPKSAIERVSVARLKGGRGLIDLKQLWEGQVKNLREFFYNKAIDSNIHSATIDLDNNFTPLNLKNKDIIYRKPQEHTSDKLSRWCSKELHGRHFNDLQQPHVDSDASNQWLKLGSLFPETEGFMIAIQDQVINTKNYKKFILKDPSIRNDKCRKCHRASETIQHITSACPTLAQTDYTHRHNQVAHIVHQKLAIKHNLIPSKVTPYYQYTPKPVLENQSHKIYFDRAILTDKTIHNNRPDITLIDKENKHTYLIDIAVPNSHNLQKTITDKIHKYTELKEEIIRIWKMSKVSIVPLVLSSTGIIPKSLRHYLQQIDIPINIYMTMQKAVILNTCRIVRKFLQDDYNPNEPIPQHELHLV

SEQ ID NO: 20349 - protein, 1161 aa, Curetis bulis
MYCKKLHEQFTIKYPHLNVSAQRIADQRRVIIRNKLLSDEKLNAIKQEVSEEIRNEDREIFSTLESEPISHIPALTPATLTDNLQYSSNTSIHYESYLHPETQQQVSVSQCHASTQTSTSINISSTIEEFNCLQTPSSTQVDISLQELIIQVETALIKYTGLDPSVRPKLPKLKENKKLYEYINIFNKHILEKFYSIQSDLTSIHTLIYCSALVISENLGYKIRTDNQGTQYKSRKPLKPAWQKRIEMDVEKLRADIGRLTQYINNNRSNKVVSAVQKIFEKNKIHTIHERNNIRPEEYLDTLKQKLTLKSERLARYVKAFERKEDNKKFLINEKGFYRSYKNNTQHSDNNPTEIPGVEELKDYWSDLWKKRNDHNDSAQWIGEEFSRMADIEPMELADITVEDITIITKRLKNWKAAGIDSLHNFWYKKFVTLHEILAKNITELINGNQEFPKFITKGITYMLPKSSDTANPSQYRPITCLPTIYKLITSLITRKINSHLERNNILAEEQKGCRQNHMGCKEQLLIDSIVLKHAYTNKKNLHISYIDYKKAFDSVPHSWLIRVLQIYKINPVIVNFLKNVMSDWRTTLHLSNGIRTILTEEISIGNGIFQGDSLSPLWFCLALNPLSSLLNNSDSGFKLDSSTSITHLMYMDDIKLFAKNGKCLKSLVDVTTEFSKDINMSFGFDKCRTLHIQKGKIVKNTNNIEPEIFENMEQSDSYRYLGILQSNVINHPQIKKDITVEYTKRLNFICKKHLHSKNLFKAINTFAIPVLTYSFGVVKWTSTDINKIEIKTRTTLTKHKYLHPKSAIERISIRRQKGGRGLIDLKQLWEGQIQNLRNFFYRKSTSSSIHASVIKLDNKFTPLNLLNNEIVYKTSQEHLNLKLNRWRTKELHGRHLHDLEQQHIDLEASNQWLKLGSLFPETEGFMIAVQDQVINTKNYKKFILKDRNLQNDKCRKCHRASETIQHITSACPSLAQNDYTHRHNQIAHIIHQKLAINHNLINTKAVPYYQYIPKPVLENRNHKMYFDRAILTDKTIHNNRPDITLIDKINKHTYLIDIAVPNTHNLQKTITDKINKYTELKEEITRIWQMNRVYIVPLVLSSTGIIPKHLHHYLQQIQIPSNTYMTMQKAAILNTCRIVRKFLQDDISPEHNPTNELHLV

SEQ ID NO: 20350 - protein, 1268 aa, Morvina fissimacula
MRRSTRIKNKTSAQLNTVAETSSDVSPEMINSLPSPIEPYSPSTISYTPSVPTSPSSLNNSDHRENTHSFKVNTVAADVSQKAHATQPATTKAGKPRVRMQWNDDINTFIMRTYFYVTKLESDRTMYCKKLHDQFTLKYPYLKVSAQRIADQRRVIIKNKMLSDDVINNLKQEIAEQLRREEIAHSQSQISETTTPLSPIQENVFQEPLNINITPTPHVSLPFTQQTLPLKSNVSTQTGEIPNVLITHETERTQNTEPIRLEISTQQLIDNLETTLTQYTGLDPTVRPKLPRLKENKKLYMLIDIFNKQVLGKFFSIDSDINTIHTLIYCSALVICENLGYKIRTHVLGTQHMNTTKKPPWQLRIETDIKILRTDIGRLTQYIVNNNRSRKVVAAVENIFKKTKVHTIHERNNVRPEEYLDTLKQKLKLKSQRLARYKKALHRKEDNKTFSINEKEFYRMLKNDKEQMNKNIDLPQANELKSYWADLWKKQSNHNASAEWIEDEESRMLNVESMEFSCYKGEDIEIATRRMKNWKAAGVDKVHNFWLKKFWSLHNILAKNITEIIKGEQELPNFITKGITFMLPKGKNSIDPSQYRPITCLPTIYKLITSLITYSINKHVTHNSILSEEQKGCRQNHKGCKEQLIIDSSILKQAQIKKKHLHISYIDYKKAFDSVPHSWLIQVLRIYKIHPNLIDFLKNAMSNWRTTLYLSNGTNAITTDEIPIENGIFQGDSLSPLWFCLALNPLSYLLNSSASGYALNSNTSITHLMYMDDIKLFAKTDKGLKNLIELVSQYSRDIKMIFGLDKCRTLHIQQGKIKNNSDAVNTFVAMEPSDTYKYLGIHQSNTINHIKIKKDLTSEYIRRINLICKRQLYSKHLFKAINTFAIPILTYSFGIIKWTRTDMNNLEIKTRTTLTKYNYLHPKSAIERISVERHKGGRGLIDLTLLWEGQIQNLRDFFYSKSTTSPIHSSIIHLDDNFTPLNLNNRALVFKSPKDYLREKTDKWRTKELHGRHLHDLEQAHVDILSSNKWLKLGSLFPETEGFMVAIQDQVIKTKNYKKVILKDPNTQNDKCRKCQRVSETIQHITSACPNLAQTDYLHRHNQIANIVHQKLAIKHKLVSNKAVPYYQYIPKPVLENQGHKIYFDRAILTDKTIHNNRPDITMIDKINKITYIIDIAIPNTHNIQKTIIEKIHKYTELKEEITRMWKMNKVYIVPLVLSSTGIIPKNLHHYLRQINLHTSLYITMQKAAILNTCRIVRKFLHEDLPPE

SEQ ID NO: 20351 - protein, 1103 aa, Operophtera brumata
MINNNNEVSEQLRCEEENNTNSTPITTPSLHLEENRIITQTSHDAQSLDSITSALPAPTMQLQISDSLDQSICDTSILQPSIDTPYIVEVTNKSLQELLDQFQTTLNLYSGTDPSSRPRLPRLRENKKLYEVVHAFNHEILGRFCSTDSNLTHLHTLVYCSAFVISTQLGYKISIDQSSHPRKPKSEKPPWQIRLETDIQKLRADIGRLTQYLNNNRHANLVKKVNLIFEKYKVHSTHERDNIRPEEFLDTLKQKLTLKSQRLARYIKALQRKVDNKLFDTNEKEFYRTLKNNPNNVSNEIPTEQELINYWSNVWKREKEHNEQAYWIKVEEEDAEKIEQMEFTEVSKLDIELITKKMKNWKAAGIDGVHNFWYKKFTVLHETLANTISDIIKGTQELPPFATKGITYMLPKSKNTAEPSHYRPITCLPTIYKLITSCITRKINNHLTCNNVLAEEQKGCRQSHKGCKEQLIIDSTILKHATTHSRNLNLTYIDYQKAFDSVPHSWLVRVLQIYKINPDIITFLENTMSTWRTTLSLRNNNTYVTTDEIPIENGIFQGDSLSPLWFCLALNPLSNLLNSSNYGYKLTTNVTISHLMYMDDIKLFAKSEKEMNNLINITSEFSKDINMKFGMEKCKTLNLRRGKVTGSSNSEDNPFEAMEENETYKYLGLHQGRVINHIQIKMDIRKEYFHRLNLICKRPLHSKNLFKAINTYAIPVLTYSFGIVKWSSTDIKKLEVKTRTTLTKHNYLHPKSAVERMTVNRIKGGRGLIDLKNLWAGQIQNLRNFFYEKANSSKIHLATVDSDKNFTPINLSDKELQFVKQNEHEKEKMDRWRGKELHGRHVKDLEQLHIDLQASNKWLKFGSLFPETEGFMVAIQDQVIKTRNYKKFILKSPNSQNDKCRKCHRQPETIQHITSACSSLTQTDYTHRHNQVAHIIHQKLATKHKLISGKLTPYYQYTPKPVLESDNFRMYFDRAILTDKTVHNNRPDITLIDKINKTTYLIDIAVPNTHNLQKTVTEKINKYTELKEEIIRIWNMNKVYIVPLVLSSTGVIPKALLHYLKVIDLQESTYVTMQKAAILNTCRTVRKFLQDDSTQIASDTHLV

SEQ ID NO: 20352 - protein, 1270 aa, Operophtera brumata
MESSNKYVRIGSLPGGESRGAPGADAGRSSMQAIGGEGNERPSAGEPEKCEFSRRYNLRPLTKSRSTSRAGPVLRSRTNDDVGAKRLAPIEEGSHQSRTDGAEEAQEALSSLSSPLSLFPSLPSSPPSYLMFHSETSSLSSPSPKSSASTKKPRRLSEQPIVTQNLGSRAVTPAEDVSQEASATQPVTTKAGKPRVRMKWNDEINTFILRTYFYVTNVETDRTMYCKKLFDQFKVKYPSFNVTSQRIADQRRVIIRNKLLTEEQIQRIKHEVSEQLRCEEEINTISTPLTTPSLHLEENRIITQTSHDAQSLDSITSALPASTMQLQISDSLDQSICDTSILQPSIDTPYIVQVTNKSLQELLDQFQTTLDLYSGTDPSSRPRLPRLRENKKLYEVVHAFNHEILGRFCSTDSNLTHLHTLVYCSAFVISTQLGYKISIDQSSHQRKPKSEKPPWQIRLETDIQKLRADIGRLKQYLNNNRHANLVKKVNLIFEKYKVHSTHERDNIRPEEFLDTLKQKLTLKSQRLARYIKALQLKVDNKLFDTNEKEFYRTLKNNPNNVSNEIPTEQELINYWSNVWKREKEHNEQAYWIKVEEEDAEKIEQMEFTEVSKLDIELITKKMKNWKDAGIDGVHNFWYKKFTVLHETLANTISDIIKGTQELPPFATKGITYMLPKSKNTAEPSHYRPITCLPTIYKLITSCITRKINNQLTCNNVLAEEQKGCRQSHKGCKEQLIIDSTILKHTTHSRNLNLTYIDYQKAFDSVPHSWLVRVLQIYKINPDIITFVENTTSTWRTTLSLRNNNTYVTTDEIPIENGIFQGDSLSPLWFCLALNPLSNLLNSSNYGYKLTTNVTISHLMYMDDIKLFSKSEKEMNKLINITSEFSKDINMKFGMEKCKTLNLRRGKVTGSSNSEDNPFEAMEENETYKYLGLNQGRVINHIQIKMDIRKEYFHRLNLICKRPLHSKNLFKAINTYAIPVLTYSFGIVKWSSTDIKKLEVKTRTTLTKHNYLHPKSAVERMTVNRVKGGRGLIDLKNLWAGQIQNLRNFFYEKANSSKIHLATVDSDKNFTPINLRDKEIQFVTQNEHEKEKMDRWRGKELHGRHVKDLEQLHIDLQASNKWLKFGSLFPETEGFMVAIQDQVIKTRNYKKFILKNPNSQNDKCRKCHRQPETIQHITSACSSLTQTDYTHRHNQVAHIIHQKLAIKHKLISGKLTPYYQYTPKPVLESDNFRMYFDRAILTDNTVHNNRPDITNIYIILLCQTPITFKKL

SEQ ID NO: 20353 - protein, 1242 aa, Operophtera brumata
MESSNKYVRIGSLPGGDRRGAPGADAGRSSMQAIGGEGNERPSAGEPEKCEFSRRYNLRPLTKSRSTSRAGPVLRSRTNDDVGVKRLAPIEEGSHRSRTDGAEEAQEALSSLSSPLSLFPSLPSSPPSYLMFHSETSSLSSPSPKSSASTKKPRRLSEQPIVTQNLGSRAVTPAEDVSQEASATQPVTTKAGKPRVRMKWNDEINTFILRTYFYVTNVETDRTMYCKKLFDQFKVKYPSFNVTSQRIADQRRVIIRNKLLTEEQIQIIKHEVSEQLRCEEENNTNSTPITTPSLHLEENRIITQTSHDAQSLDSISSALPASTMQLQISDSLDQSICDTSILQPSIDTPYIVQVTNKSLQELLDQFQTTLDLYSGTDPSSRPRLPRLRENKKLYEIVHAFNHEILGRFCSTDSNLTHLHTLVYCSAFVISTQLGYKISIDQSSHPRKPKSEKPPWQIRLETDIQKLRADIGRLTQYLNNNRHANLVKKVNLIFEKYKVHSTHERDNIRPEEFLDTLKQKLTLKSQRLARYIKALQRKVDNKLFDTNEKEFYRTLKNNPNNVSNEIPTEQELINYWSNVWKREKEHNEQAYWIKVEEEDAEKIEQMEFTEVSKLDIELITKKMKNWKAAGIDGVHNFWYKKFTVLHETLANTISDIIKGTQELPPFATKGITYMLPKSKNTAEPSHYRPITCLPTIYKLITSCITRKINNHLTCNNVLAEEQKGCRQSHKGCKEQLIIDSTILKHATTHSRNLNLTYIDYQKAFDSVPHSWLVRVLQIYKINPDIITFLENTMSTWRTTLSLRNNNTYVTTDEIPIENGIFQGDSLSPLWFCLALNPLSNLLNSSNYGYKLTTNVTISHLMYMDDIKLFAKSEKEMNKLINITSEFSKDINMKFGMEKCKTLNLRRGKVTGSSNSEDNPFEAMEENETYKYLGLNQGRVINHIQIKMHIRKEYFHRLNLICKRPLHSKNLFKAINTYAIPVLTYSFGIVKWSSTDIKKLEVKTRTTLTKHNYLHPKSAVERMTVHRIKGGRGLIDLKNLWAGQIQNLRNFSYEKANSSKIHLATVGSDKNFTPINLNDKELQFVTQNEHEKEKMDRWRGKELHGRHVKDLEQLHIDLQASNKWLKFGSLFPETEGFMVAIQDQVIKTRNYKKFILKSPNSQNDKCRKCHRQPETIQHITSACSSLTQTDYTHRHNQVAHIIHQKLAIKHKLISGKLTPYYQYTPKPVLESDNFRMYFDRAILT

SEQ ID NO: 20354 - protein, 1351 aa, Hydriomena furcata
MESRNKYVSIGSLPEGDRRGAPGADAGRYSMQAIGGGGNGRPSAGEPEQSESNRRYNLRPLTRSRSTSRTGKVITTKQDVGVVQLAPIEEGSHQSRIDRAEEPLETLSSFSSLSSLFPSLPSSPPSYLNLHSKSSSPSSLSPIFSATSGHARRQLSTDVENSNSRAAIRSTEDVSQEASVIQPATTKAGKPRVRMKWNTELNEFIMRTYFYVTNLETDRTMYCKKLFEQFKINYPDLDISSQRIADQRRVIIRNKLLSVDSINKIKHDVTEQLRLEKEINIISTPLVIASELESEHNIITHVTSLSQSLDKITTPTESPQESTIVSNFDTSTMRTSDSGDVLATNQSMQELLDHLKTALELYSGTDPTSRPRLPRLRENKYLYKFVHAFNQEILGRFFTPDSNLTHIHTLVYCSALVISTLLGYKISFDQSSHPKKPNNEKPSWQIRLENDIKKLRADIGRLTQYINNNRHSNLVKKVHLIFEKYKIHSIHEKDNKRPEEFLDTLKQKLTLKSQRLARYKKALQRKEDNKLFNTNEKGFYRALKNNPINNTSELPSEQDLKNYWATIWKKEKEHNEQAYWIKLEEDNAKKIEQMEFTEVSKSDIELITRKMKNWKAAGIDGVHNFWYKKFSVLHESFAKIITDIIVGNEELPPFATRGITYMLAKSNNTAEPSQYRPITCLPTIYKLITSCITRKIYNHLSCNNVLSEEQKGCRQNHRGCKEQLAIDSTVLKHATTHNRNLHLTYIDYQKAFDSVPHSWLVRVLQIYKINPDIITFLENTMSTWRTTLSLRNSIISITTDEISIENGIFQGDSLSPLWFCLALNPLSNLLNSSNFGYKLSTNATISHLMYMDDIKLFSKNEKDLKKMIKITTEFSNDINMKFGLDKCKTLNLRRGKVISSNDGEDNVFNVMEENETYKYLGLHQGRVINHIEIKADIRKEYFHRLNVLCKRPLHSKNLFKAINTYAIPVLTYSFGIVKWSFTDIKKLEIKTRTTLTKHNYLHPKSAIERMTLDRIKGGRGLIDLKNLWLGQIQNLRTFFYDKSNTSKIHLAIVNLDKNFTPINLNNKELQFKTSNENENEKLSRWRGKELHGRHVQDLEQPHIDLQASNKWLKYGSLFSETEGFMVAIQDQVINTRNYKKFILKSPNSQNDKCRKCHRHPETIQHITGACPSLTQTDYTHRHNQVVHIIHQKLAIKHKLISGKLTPYYQYTPKPVLESDSYRMYFDRAILTDKTVHNNRPDITLIDKIQNTTYLIDIAIPNTHNLQKTTTEKINKYTELKEEIIRMWQMNKVYIIPLVLSSTGVVPKNLLQYLKIIDLPENIYVTMQKAAILNTCRTVRKFLKDDSNTIQI

SEQ ID NO: 20355 - protein, 1199 aa, Meandrusa sciron
METRLKRKLRGPLPEGDRRGTPGADAGCFRMRTVSGEELSRRAPTDINATAETTDGVHDEDSRSSRSSCIRTTTPEEDVSQEAHATQPTTTKAGKPRLRMKWSDEINLFIMRTYFYVTKIETDRTMYCKRLHDQFNIQYPELKVSAQRVADQRRAIVRNKLLSDDTINNLKREMSEKLSNEEIRNTSQLTTNRDLNTQSKSNHQQIVSDQITVNVDSLLNQPPTPSFTQHTHITPVDESSVLWHHASTQTSILPNIVSITQLTLGHDNTTPVELNLPTQDLIDQLDTALAKYTGMNPTTRPKLPRLTENKKLYGLLDIFNKHILGRFFNIDSDINSLHTLIYCSALVISENLGYKIRTQNTGTQHKNKKQTKPAWQIRIELDIRKLRVDIGRLTQYINNNRSKRVVTEVEKIFKRTKTHTVHEKNNIRPEEFLDTLKQKLTLKSKRLARYTKALHRKEDNKLFTLNEKGFYRSLKYNTQVNDMNCHLPQADELKNYWAAIWKKENEHNDNADWLSNEASRFEHIESMEFTEIFRDDIDEVTRRMKNWKAAGIDNVHNFWFKKFIALHDILAKNITDLIKGNQEMPPFFTQGITYMLPKSKETSDPSQYRPITCLPTIYKLITSCITRIVNRHLQDNNILSEEQKGCRQNHQGCKEQLIIDSTVLKHATTHKRNLHISYIDYRKAFDSVPHSWLIRVLQIYKINSEIINFMKNSMSNWKTTLHLSIGIESVKSEEICIENGIFQGDSFSPIWFCLALNPLSYLLNNTSNGYKLNSETSISHLLYMDDIKLFAKTKKDLKNLLDITAQYSNDINMTFGLDKCRTLHIHRGKITCNNEGSAINDATTFVQMEPEETYKYLGIHQSNNINHIQIKKDLCTEYSKRLISICKKQLHSKNLFKAVNTFAIPILTYSFGIIKWSRTDINRLEIKTRTTLTRHNYLHPKSAIERISVKRQEGGRGLIDLKELWESQISKLRNFFYSKTPTSNMHLAIVDLDNNYTPLNLFNRNIYSIVPHTHKKEKLDRWRSKELHGRHLHDLEQAHVDAEASNKWLKCGYLFPETEGFMIAIQDQVINTKNYRKFIIKDRNIQNDKCRKCHKASETIQHITSACPSLAQTDYTHRHNQIAHIVHQKIAIKHKLIHPKTVPYYQYNPKPVLENQSHKVYFDRAILTDRTVHNNRPDITVIDKLNGLTYIIDIAVPNT

SEQ ID NO: 20356 - protein, 1186 aa, Spilosoma lubricipeda
MQWSKEINTFIMRTYLSITKLETDRTMYCKKLHDQFILRFPHLNVSAQRVADQRRVIVRNKLLPDNVIDMMKREIAEQLSREDIENTSPHISIISTPITQPQENMSSSGVPHVQTSPLTLNTQQTSLTHSHTSTQSNTLNNTESTTQIIEDSQVTHLPQIDISTQELINQLETAVILYTGTDPTTRPKLPKLRESKKLYGYVDIFNKQILCNFFSSVSDLNTLHTLIYCSALVICQNLGYKIINHNTNIRPQTHKPQKPPWQIRIETDIKNLRADIGRLTQYINNNRSKKVVAAVEIIFRRTKVHTIHERNNARPEEYLDTLKQKLTLKSQRLSRYLKALQRKEDNRLFTTNEKSFYRSFNGHGTQQNTCYDMPQPNELKNYWTKLWKREMDHNDSAKWISEEEYKMANTEIMELNDITLADIEIATRKMKNWKAAGIDSVHNFWFKKFFILHHKLANNINKIIKGEQQLPKFVTKGITYMLPKSNDTSNPSQYRPITCLPTIYKLITSIITQKISKHLESYNILSEEQKGCMQNHKGCKEQLVIDSTILKHSNKHKRNLYISYIDYKKAFDSVPHSWLVRVLHIYKINPILINFLENAMSDWRTTLHLSNGTNSIVTDEIPIENGIFQGDSLSPLWFCLALNPLSTLLNNTNTNGYKLDTNTSITHLMYMDDIKLFARTNKCLDHLLKITTQFSKDINMSFGLDKCRTLHIRNGKETTSKNTTSEVNVFLRMEPADTYKYLGIEQSHNINHIEIKKQLLTEYTRRLNLICKRQLHSKNLFKAINTFAIPVLTYSFGIVKWTRTDIHNLEIKTRTTLTKHKYLHQKSAIERIALKRQNGGRGLIDLTALWEGQIKNLRDFFYSKATLSEIHAAIIEIDANFTPLNLCNRDVTYKNSESFTKEKINRWRSKELHGRHLHDLEQSHIDLDSSNKWLQLGSLFPETEGFMIAIQDQVINTRNYSKFILKDPNVQNDKCRKCHRAAETIQHITSACPTLAQNDYTHRHNQIAHIIHQKLAVKHNLIPPKIIPYYQYSPKPVLENQSHKIYFDRAILTDKTIHNNRPDITLIDKYNKHTYLIDIAVPNTHNLQKTITDKIHKYTELKEEIIRIWKMTKVYIVPLVLSSTGVIPKHLHHFLRQIELPTNTYITMQKAGILNTCRIVRKFLQEDTTSQITYLVQNPSNELHLV

SEQ ID NO: 20357 - protein, 1300 aa, Urbanus esmeraldus
MRRSNRIKNKNSAQSETVAQIPSNITSNILSSLSDNNIDRQTDRTSSPIEPYSPSTISYTPSIPSSPSTVSNSDLLQNVHIDDVEDSNILRLDTLAEDVSQEAQATQPVTTKAGKPRVRMQWNDEINTFIIRTYLYVTKLETDRTMYCKKLYDQFTLKYPNLKVSAQRIADQRRAILRNRMLSDDVINNIKQEIKEQLRREEIENTPIQISNTVTFTSNTHESTSQVTPNTCTTTTTSISQSFTRQTQAHVSTQTSTIPNIISILQQTENTQNIETEILDIPTLKIMEQLQTTLVQYTGIDPTVRPKLPRLKENKKLYQFIDVFNKNILSNFFSIESDINCIHTLIYCSALVICENLGYKIRTDNSRIRHTHTSQKPAWQIRLETDIKKLRADIGRLTQFIVKNNRSRKVVSAVENIFRNTKIHTRHESDNVRPEEYLDTLKQKLTLKSQRLARYLKALQRKEDNKIFATNEKSFYRMMKINDTQIDRNSEMPQSNELKNYWTNLWKKQNEHNNNAEWIDSEERRMSNVVTMEFADISEEDIEIVTKRMKNWKAAGIDSIFNFWYKKFNALHNILAKNITELLKGEQELPQFITKGITYMLPKSNDTANPSQYRPITCLPTIYKLITSLITYNINKHLIHNNILSEEQKGCRQSHKGCKEQLVIDTTILKHAHTKKRNLHISYIDYKKAFDSVPHSWLIRVLQIYKINPILINFLENAMSNWRTSLFLSNGTSIITTDEIPIGNGIFQGDSLSPLWFCLALNPLSNLLNDSSNGYALNANTSITHLMYMDDVKLFAKTNKCLKNLIEITTQYSRDINMTFGLDKCRTLHIHQGKLKSNSNNIIDESNTFVSMDANDSYKYLGIHQSNTINHIKIKKDLTSEYIKRLKLICKKQLYSKNVFKAINTFAIPILTYSFGVIKWTRTDINNLEIKTRTTLTKYKYLHPKSAIERISVKRDRGGRGLTDLSLLWQGQIQNLRDFFYSKSTSSKIHSSIIQLDSNFTPLNLNNKDLSYKSPQVHFEEKVGRWRSKELHGRHLHDLEQPHVDAVASNKWLKLGSLFPETEGFMIAIQDQVINTKNYKKIILKDPNTQNDKCRKCHRASETIQHITSACPNLAQTDYTHRHNQISQIIHQKLAIKHKLITDKAVPYYQYIPKPVLEDQSHKMYFDRSILTDKTIHNNRPDITLIDKINKNTYLIDIAVPNTHNLQKTITDKIHKYTELKEEIIRIWKMNKVYIVPLVLSSTGIIPKHLHHYLQQIGLHTNVYMTMQKAAILNTCRIVRKFLQEDIPNEHTPLNELHLA

SEQ ID NO: 20358 - protein, 1082 aa, Spilosoma lubricipeda
MSSSGVPHVQTSPLTLNTQQTSLTHSHTSTQSNTLNNTDSTTQIIEDSQVTHLPQIDISTQELINQLETAVILYTGTDPTTRPKLPKLRESKKLYGYVDIFNKHILCNFFSSVSDLNTLHTLIYCSALVICQNLGYKIINHNTNIRPQTHKPQKPPWQIRIETDIKNLRADIGRLTQYINNNRSKKVVAAVEIIFRRTKVHTIHERNNARPEEYLDTLKQKLTLKSQRLSRYLKALQRKEDNRLFTTNEKNFYRSFNGHGTQQNTCYDMPQPNELKNYWTNLWKKQMDHNDSAKWISDEEYKMANTETMELNDITLADIEITTRKMKNWKAAGIDSVHNFWFKKFFILHHKLANNINEIIKGEQQLPKFVTKGITYMLPKSNNTSNPSQYRPITCLPTIYKLITSIITQKISKHLESYNILSEEQKGCRQNHKGCKEQLVIDSTILKHSNKHKRNLYISYIDYKKAFDSVPHSWLVRVLHIYKINPILINFLENAMSDWRTTLHLSNGTNSIVTDEIPIENGIFQGDSLSPLWFCLALNPLSTLLNNTNTNGYKLDTNTSITHLMYMDDIKLFARTNKCLDHLLKITTQFSKDINMSFGLDKCQTLHIRNGKKTTSNNTTSEVNVFLRMEPADTYKYLGIEQSHNINHIEIKKQLLTEYTRRLNLICKRQLHSKNLFKAINTFAIPVLTYSFGIVKWTRTDIHNLEIKTRTTLTKHKYLHQKSAIERIALKRQNGGRGLIDLTVLWEGQIKNLRDFFYSKATLSEIHAAIIEIDANFTPLNLCNRDVTYKNSESFTKDKINRWRSKELHGRHLHDLEQSHIDFDSSNKWLQLGSLFPETEGFMIAIQDQVINTRNYSKFILKDPNVQNDKCRKCHRASETIQHITSACPTLAQNDYTHRHNQIAHIIHQKLAVKHNLIPPKIIPYYQYSPKPVLENQSHKIYFDRAILTDKTIHNNRPDITLIDKYNKHTYLIDIAVPNTHNLQKTITDKIHKYTELKEEIIRIWKMTKVYIVPLVLSSTGVIPKHLHHFLRQIELPTNTYITMQKAGILNTCRIVRKFLQEDTTSQITYLVQNPSNELHLV

SEQ ID NO: 20359 - protein, 1315 aa, Spilosoma lubricipeda
METRSKKKLRGPLPGGDRRGTPGADAGCYSMRTVSGEELSRRAPTGSSESITADQYDETDRLTDRTISPIEPFSPSTISYSPSTATSPSVHSNRDEQDNIRVITLAEDVSQETLVTQSATTKAGKPRVRMQWSKEINTFIMRTYLSITKLETDRTMYCKKLHDQFILRFPHLNVSAQRVADQRRVIVRNKLLPDNVIDMMKREIAEQLSREDIENTSPHISINSTPITQPQENMLSSGVPHVQTSPLTLNTQQTSLTHSHTSTQSNTLNNTDSTTQIIEDSQVTHLPQIDISIQELINQLETAVILYTGTDPTTRPKLPKLRESKKLYGYVDIFNKQILCNFFSSVSDLNTLHTLIYCSALVICQNLGYKIINHNTNIRPQTHKPQKPPWQIRIETDIKNLRADIGRLTQYINNNRSKKVVAAVEIIFRRTKVHTIHERNNARPEEYLDTLKQKLTLKSQRLSRYLKALQRKEDNRLFTTNEKNFYRSFNGHGTQQNTCYDMPQPNELKNYWTNLWKKQMDHNDSAKWISEEEYKMANTEIMELNDITLADIEIATRKMKNWKAAGIDSVHIFWFKKFFILHHKLANNINEIIKGEQQLPKFVTKGITYMLPKSNDTSNPSQYRPITCLPTIYKLITSIITQKISKHLESYNILSEEQKGCRQNHKGCKEQLVIDSTILKHSNKHKRNLYISYIDYKKAFDSVPHSWLVRVLHIYKINPILINFLENAMSDWRTTLHLSNGTNSIVTDEIPIENGIFQGDSLSPLWFCLALNPLSTLLNNTNTNGYKLDTNTSITHLMYMDDIKLFARTNKCLDHLLKITTQFSKDINMSFGLDKCRTLHIRNGKKTTSNNTTSEVNVFLRMEPADTYKYLGIEQSHNINHIEIKKQLLTEYTRRLNLICKRQLHSKNLFKAINTFAIPVLTYSFGIVKWTRTDIHNLEIKTRTTLTKHKYLHQKSAIERIALKRQNGGRGLIDLTALWEGQIKNLRDFFYSKATLSEIHAAIIEIDANFTPLNLCNRDVTYKNSESFTKDKINRWRSKELHGRHLHDLEQSHIDLDSSNKWLQLGSLFPETEGFMIAIQDQVINTRNYSKFILKDPNVQNDKCRKCHRASETIQHITSACPTLAQNDYTHRHNQIAHIIHQKLAVKHNLIPPKIIPYYQYSPKPVLENQSHKIYFDRAILTDKTIHNNRPDITLIDKYNKHTYLIDIAVPNTHNLQKTITDKIHKYTELKEEIIRIWKMTKVYIVPLVLSSTGVIPKHLHHFLRQIELPTNTYITMQKAGILNTCRIVRKFLQEDTTSQITYLVQNPSNELHLV

SEQ ID NO: 20360 - protein, 1308 aa, Spilosoma lubricipeda
METRSKKKLRGPLPGGDRRGTPGADAGCFSMRTVSGEELSRRAPTGSSESITADQYDETDRLTDRTSSPIEPFSPSTISYTPSTATSPSVHSNRDEHDNNKFVTLAEDVSQETLVTQSATTKAGKPRVRMQWSKEINTFIMRTYLYITKLETDRTMYCKKLHDQFILRFPHLYISAQRVADQRRVIVRNKLLPDDEINKMKQEIADQLNREDTENTLPHTSTILTPITHTIVPDAQTLPTTSNTQQTLLTHSHTSTQTNTFNNTDTITQIIEDAQLSPLPQIDMSTQELINQLETALIFYTGTDPTTRPKLPKLRESKKLYGYVDTFNKQILGNFFSSVSDLNTLHTLIYCSALVICQNLGYKIISHNTNIRPQTHKLHKPAWQIRIETDIKNLRADIGRLTQYINNNRSRKVVAAAEIIFRKTKVHTIHEHNNVRPEEYLDTLKQKLTLKSHRISRYLKALRRKEDNKLFTTNEKSFYRSFNNPSTQQNTCHDIPQPSELTNYWTNLWKKQKDHNNSAEWIAEEEDKMINTEIMEFNDITLEDIEIATRKMKNWKSAGIDSVHNFWYKKFFVLHHKLANNINEIIKSEQELPKFVTKGITYMLPKSNDTSNPSQYRPITCLPTIYKLITSLITQKISKHLERYNILSEEQKGCRQNHKGCKEQLVIDSTILKHSNRHKRNLHISYIDYKKAFDSVPHSWLIRILHIYKINPILINFLKNAMSDWRTTLHLSNGTDSIVSEEIPIENGIFQGDSLSPLWFCLALNPLSTLLNSTTTNGYKLDTNTNITHLMYMDDIKLFARNSKCLDHLLSITTQYSQDINMSFGLDKCRTLHIHNGKIATNTDNTLESNLFLSMEPADTYKYLGIQQSHNINHIEIKKQLSSEYARRLNLICKKQLHSKNLFKAINTFAIPVLTYSFGIVKWTRTDINRLEIKTRTTLTEHKYLHNKSAIERIALQRQKGGRGLIDLTILWEGQLKNLKDFFYSKATKSNIHAAIIEIDANFTPLNLCNRDVTYKTPESLRKEKIDRWRSKELHGRHLHDLEQTHIDLDSSNKWLQLGSLFPETEGFMIAIQDQVINTKNYSKFILKDPNIQNDKCRKCHRSAETIQHITSACPTLAQNDYTHRHNQIAHIVHQKLAIKHNLIPPKIVPYYLYSPKPVIENQTHKIYFDRAILTDKTIHNNRPDITLIDKHNKHTYLIDIAVPNTHNLQKTITDKIHKYTELKEEIVRIWKMAKVYIVPLVLSSTGVIPKHLHHFLRQIELPTNTYITMQKAAILNTCRIVRKFLQEDTTSHITASVPHHTNELHLA

SEQ ID NO: 20361 - protein, 1315 aa, Spilosoma lubricipeda
METRSKKKLRGPLPGGDRRGTPGADAGCYSMRTVSGEELSRRAPTGSSESITADQYDETDRLTDRTISPIEPFSPSTISYSPSTASSPSVHSNKDEQDNIRVITLAEDVSQETLVTQSATTKAGKPRVRMQWSKEINTFIMRTYLSITKLETDRTMYCKKLHDQFILRFPHLNVSAQRVADQRRVIVRNKLLPDNVIDMMKREIAEQLSREDIENTSPHISIISTPITQPQENMSSSGVPHVQTSPLTLNTQQTSLTHSHTSTQSNTLNNTESTTQIIEDSQVTHLPQIDISTQELINQLETAVILYAGTDPTTRPKLPKLRESKKLYGYVDIFNKQILCNFFSSVSDLNTLHTLIYCSALVICQNLGYKIINHNTNIRPQTHTPQKPPWQIRIEIDIKNLRADIGRLTQYINNNRSKKVVAAVEIIFRRTKVHTIHERNNARPEEYLDTLKQKLTLKSQRLSRYLKALQRKEDNRLFTTNEKSFYRSFNGHDTQQNTCYDMPQPNELKNYWTNLWKKEMDHNDSAKWISEEEYKMANTEIMELNDITLADIEIATRKMKNWKAAGIDSVHNFWFKKFFILHHKLANNINEIIKDEQQLPKFVTKGITYMLPKSNDTSNPSQYRPITCLPTIYKLITSIITQKISKHLESYNILSEEQKGCRQNHKGCKEQLVIDSTILKHSNKHKRNLYISYIDYKKAFDSVPHSWLVRVLHIYKINPILINFLENAMSDWRTTLHLSNGTNSIVTDEIPIENGIFQGDSLSPLWFCLALNPLSTLLNNTNTNGYKLDTNTSITHLMYMDDIKLFARTNKCLDHLLKITTQFSKDINMSFGLDKCRTLHIRNGKETTSNNTTSEVNVFLRMEPADTYKYLGIEQSHNINHIEIKKQLLTEYTRRLNLICKRQLHSKNLFKAINTFAIPVLTYSFGIVKWTRTDIHNLEIKTRTTLTKHKYLHEKSAIERIALKRQNGGRGLIDLTALWEGQIKNLRDFFYSKATLSEIHAAIIEIDANFTPLNLCNRDVTYKNSESFTKEKINRWRSKELHGRHLHDLEQSHIDLDSSNKWLQLGSLFPETEGFMIAIQDQVINTRNYSKFILKDPNVQNDKCRKCHRAAETIQHITSACPTLAQNDYTHRHNQIAHIIHQKLAVKHNLIPPKIIPYYQYSPKPVLANQSHKIYFDRAILTDKTIHNNRPDITLIDKYNKHTYLIDIAVPNTHNLQKTITDKIHKYTELKEEIIRIWKMTKVYIVPLVLSSTGVIPKHLHHFLRQIELPTNTYITMQKAGILNTCRIVRKFLQEDTTSQITYLVQNPSNELHLV

SEQ ID NO: 20362 - protein, 1308 aa, Spilosoma lubricipeda
METRSKKKLRGALPGGDRRGTPGADAGCFSMRTVSGEELSRRASTGSSESITADQYDETDRLTDRTSSPIEPFSPSTISYTPSTATSPSVHSNRDEHDNNKFVTLAEDVSQETLVTQSATTKAGKPRVRMQWSKEINTFIMRTYLYITKLETDRTMYCKKLHDQFILRFPHLNISAQRVADQRRVIVRNKLLPDDEINKMKQEIADQLNREDTENTLPHTSTILTPITHTIVPDAHTLPTTSNTQQTLLTHSHTSTQTNTFNNNDTFTQIIEDAQLSPLPQIDMSTQELINQLETALIFYTGTDPTTRPKLPKLRESKKLYGYVDTFNKQILGNFFSSVSDLNTLHTLIYCSALVICQNLGYKIISHNTNIRPQTHKPHKPAWQIRIETDIKNLRADIGRLTQYINNNRSRKVVAAAEIIFRKTKVHTIHEHNNVRPEEYLDTLKQKLTLKSHRLSRYLKALRRKEDNKLFTTNEKSFYRSFNNPSTQQNTCHDIPQPSELTNYWTNLWKKQKDHNNSAEWIAEEEDKMINTEIMEFNDITLEDIEIATRKMKNWKSAGIDSVHNFWYKKFFVLHHKLANNINEIIKSEQELPKFVTKGITYMLPKSNDTSNPSQYRPITCLPTIYKLITSLITQKISKHLERYNILSEEQKGCRQNHKGCKEQLVIDSTILKHSNRHKRNLHISYIDYKKAFDSVPHSWLIRILHIYKINPILINFLKNAMSDWRTTLHLSNGKDSIVSEEIPIENGIFQGDSLSPLWFCLALNPLSTLLNSTTTNGYKLDTNTNITHLMYMDDIKLFARNSKCLDHLLSITTQYSQDINMSFGLDKCRTLHIHNGKIATNTDNTLESNLFLSMEPADTYKYLGIQQSHNINHIEIKKQLSSEYARRLKLICKKQLHSKNLFKAINTFAIPVLTYSFGIVKWTRTDINRLEIKTRTTLTKHKYLHNKSAIERIALQRQKGGRGLIDLTILWEGQLKNLKDFFYSKATKSNIHAAIIKIDANFTPLNLCNRDVTYKNPESLRKEKIDRWRSKELHGRHLHDLEQTHIDLDSSNKWLQLGSLFPETEGFMIAIQDQVINTKNYSKFILKDPNIQNDKCRKCHRSAETIQHITSACPTLAQNDYTHRHNQIAHIVHQKLAIKHNLIPPKIVPYYQYSPKPVIENQTHKIYFDRAILTDKTIHNNRPDITLIDKHNKHTYLIDIAVPNTHNLQKTITDKIHKYTELKEEIVRIWKMAKVYIVPLVLSSTGVIPKHLHHFLRQIELPTNTYITMQKAAILNTCRIVRKFLQEDTTSHITASVPHHTNELHLA

SEQ ID NO: 20363 - protein, 1109 aa, Spilosoma lubricipeda
MKQEIAEQLNREDIENTLPHTSTILTPITHTIVPHAQTLPATSNTQQTLLTYSHTSTQTDTFNNTDSITQIIEDAQLSPLPQIDMSTQELINQLETALIFYTGTDPTTRPKLPKLRESKKLYGYVDTFNKQILGNFFSSVSDLNTLHTLIYCSALVICQNLGYKIISHNTNIRPQTHKPHKPAWQIRIETDIKNLRADIGRLTQYINNNRSRKVVAAAEIIFRKTKVHTIHERNNVRPEEYLDTLKQKLTLKSQRLSRYLKALRRKEDNKLFTTNEKSFYRSFNNPSTQPNTCHDIPQPSELTNYWTNLWKKQMDHNDSAEWIAEEEDKMINTEIMEFNDFTLKDIETATRKMKNWKSAGIDSVHNFWYKKFFVLHHKLANNINEIIKGEQELPKFVTKGITYMLPKSNDTSNPSQYRPITCLPTIYKLITSLITQKISKHLERFNILSEEQKGCRQNHKGCKEQLVIDSTILKHSNRHKRNLHISYIDYKKAFDSVPHSWLVRILHIYKINPIFINFLKNAMSDWRTTLHLSNGTDSIVSEEIPIENGIFQGDSLSPLWFCLALNPLSTLLNSTTTNGYKLDTNTNITHLMYMDDIKLFARNSKCLNHLLTITTQYSQDIHMSFGLDKCRTLHIHNGKIATNTDNTLESNLFLTMEPADTYKYLGIHQSHNINHIEIKKQLSSEYARRLNLICKKNLHSKNLFKAINTFAIPVLTYSFGIVKWTRTDINRLEIKTRTTLTKHKYLHKKSAIERIALQRQKGGRGLIDLTTLWEGQLKNLKDFFYSKSTKSNIHAAIIEIDANFTPLNLCNRDVTYKNPESLRKEKIDRWRSKELHGRHLHDLEQTHIDLDSSNKWLQLGSLFPETEGFMIAIQDQVINTKNYSKFILKDPNIQNDKCRKCHRSAETIQHITSACPTLAQNDYTHRHNQIAHIVHQKLAIKHNLIPPKIVPYYQYSPKPVLENQTHKIYFDRAILTDKTIHNNRPDITLIDKHNKHTYLIDIAVPNTHNLQKTITDKIHKYTELKEEIVRIWKMAKVYIVPLVLSSTGVIPKHLHHFLRQIELPTNTYITMQKAAILNTCRIVRKFLQEDTTSHITASVPNHLNELHLA

SEQ ID NO: 20364 - protein, 1315 aa, Spilosoma lubricipeda
METRSKKKLRGPLPGGDRRGTPGADAGCYSMRTVSGEELSRRAPTGSSESITADQYDETDRLTDRTISPIEPFSPSTISYSPSTATSPSVHSNRDEQDNIRVITLAEDVSQETLVTQSATTKAGKPRVRMQWSKEINTFIMRTYLSITKLETDRTMYCKKLHDQFILRFPHLNVSAQRVADQRRVIVRNKLLPDNVIDMMKREIAEQLSREDIENASPHISIISTPITQPQENMSSSGVPHVQTSPLTLNTQQTSLTHSHTSTQSNTLNNTESTTQIIEDSQVTHLPQIDISTQELINQLATAVILYTGTDPTTRPKLPKLRESKKLYGYVDIFNKQILCNFFSSVSDLNTLHTLIYCSALVICQNLGYKIINHNTNIRPQTHKPQKPPWQIRIETDIKNLRADIGRLTQYINNNRSKKVVAAVEIIFRRTKVHTIHERNNARPEEYLDTLKQKLTLKSQRLSRYLKALQRKEDNRLFTTNEKSFYRSFNGHGTQQNTCYDMPQPNELKNYWTNLWKKEMDHNDSAKWISEEEYKMANTEIMELNDITLADIEIATRKMKNWKAAGIDSVHNFWFKKFFILHHKLAININEIIKGEQQLPKFVTKGITYMLPKSNDTSNPSQYRPITCLPTIYKLITSIITQKISKHLESYNILSEEQKGCRQNHKGCKEQLVIDSTILKHSNKHKRNLYISYIDYKKAFDSVPHSWLVRVLHIYKINPILINFLENAMSDWRTTLHLSNGTNSIVTDEIPIENGIFQGDSLSPLWFCLALNPLSTLLNNTNTNGYKLDTNTSITHLMYMDDIKLFARTNKCLDHLLKITTQFSKDINMSFGLDKCRTLHIRNGKETTSNNTISEVNVFLRMEPVDTYKYLGIEQSHNINHIEIKKQLLTEYTRRLNLICKRQLHSKNLFKAINTFAIPVLTYSFGIVKWTRTDIHNLEIKTRTTLTKHKYLHQKSAIERIALKRQNGGRGLIDLTALWEGQIKNLRDFFYSKATLSEIHAAIIEIDANFTPLNLCNRDVTYKNSESFTKEKINRWRSKELHGRHLHDLEQSHIDLDSSNKWLQLGSLFPETEGFMIAIQDQVINTRNYSKFILKDPNVQNDKCRKCHRAAETIQHITSACPTLAQNDYTHRHNQIAHIIHQKLAVKHNLIPPKITPYYQYSPKPVLENQSHKIYFDRAILTDKTIHNNRPDITLIDKYNKHTYLIDIAVPNTHNLQKTITDKIHKYTELKEEIIRIWKMTKVYIVPLVLSSTGVIPKHLHHFLRQIELPTNTYITMQKAGILNTCRIVRKFLQEDTTSQITYLVQNPSNELHLV

SEQ ID NO: 20365 - protein, 1308 aa, Spilosoma lubricipeda
METRSKKKLRGPLPGGDRRGTPGADAGCFSMRTVSGEELSRRAPTGSSESITADQYDETDRLTDRTSSPIEPFSPSTISYTPSTATSPSVHSNRDEHDNNKFVTLAEDVSQETLVTQSATTKAGKPRVRMQWSKEINTFIMRTYLYITKLETDRTMYCKKLHDQFILRFPHLNISAQRVADQRRVIVRNKLLPDDAINKMKQEIADQLNREDTENTLPHTSTILTPITHTIVPDAQTLPTTSNTQQTLLTHSHTSTQTNTFNNTDTITQIIEDAQLSPLPQIDMSTQELINQLETALIFYTGTDPTTRPKLPKLRESKKLYGYVDTFNKQILGNFFSSVSDLNTLHTLIYCSALVICQNLGYKIISHNTNIRPQTHKPHKPAWQIRIETDIKNLRADIGRLTQYINNNRSRKVVAAAEIIFRKTKVHTIHEHNNVRPEEYLDTLKQKLTLKSHRLSRYLKALRRKEDNKLFTTNEKSFYRSFNNPSTQQNTCHDIPQPSELTNYWTNLWKKQKDHNNSAEWIAEEEDKMINTEIMEFDDITLENIEIATRKMKNWKSAGIDSVHNFWYKKFFVLHHKLANNINEIIKSEQELPKFVTKGITYMLPKSNDTSNPSQYRPITCLPTIYKLITSLITQKISKHLERYNILSEEQKGCRQNHKGCKEQLVIDSTILKHSNRHKRNLHISYIDYKKAFDSVPHSWLIRILHIYKINPILINFLKNAMSDWRTTLHLSNGTESIVSEEIPIENGIFQGDSLSPLWFCLALNPLSTLLNSTTTNGYKLDTNTNITHLMYMDDIKLFARNSKCLDHLLSITTQYSQDINMSFGLDKCRTLHIHNGKIATNTDNTLESNLFLSMEPADTYKYLGIQQSHNINHIEIKKQLSSEYARRLNLICKKQLHSKNLFKAINTFGIPVLTYSFGIVKWTRTDINRLEIKTRTTLTKHKYLHNKSAIERIALQRQKGGRGLIDLTILWEGQLKNLKDFFYSKATKSNIHAAIIEIDANFTPLNLCNRDVTYKNPESLRKEKIDRWRSKELHGRHLHDLEQTHIDLDSSNKWLQLGSLFPETEGFMIAIQDQVINTKNYSKFILKDPNIQNDKCRKCHRSAETIQHITSACPTLAQNDYTHRHNQIAHIVHQKLAIKHNLIPPKIVPYYQYSPKPVIENQTHKIYFDRAILTDKTIHNNRPDITLIDKHNKHTYLIDIAVPNTHNLQKTITDKIHKYTELKEEIVRIWKMAKVYIVPLVLSSTGVIPKHLHHFLRQIELPTNTYITMQKAAILNTCRIVRKFLQEDTTSHITASVPHHTNELHLA

SEQ ID NO: 20366 - protein, 1109 aa, Spilosoma lubricipeda
MKQEIADQLNREDTENTLPHTSTILTPTTHTIVPHAQTLPATSNTQQTLLTHSHTSTQTDTFNNTETITQIIEDAQLSPLPQIDMSTQELINQLETALIFYTGTDPTTRPKLPKLRESKKLYEYVDTFNKQILGTFFSSVSDLNTLHTLIYCSALVICQNLGYKIISHNTNIRPQTHKPHKPAWQIRIETDIKNLRTDIGRLTQYINNNRSRKVVAAAEIIFRKTKVHTIHEHNNVRPEEYLDTLKQKLTLKSHRLSRYLKALRRKEDNKLFTTNEKSFYRSFNNPSTQQNTCHDIPQPSELTNYWTNLWKKQKDHNNSAEWIAEEEDKMINTEIMEFNDITLEDIEIATRKMKNWKSAGIDSVHNFWYKKFCVLHHKLAKNINEIIKSEQELPKFVTKGITYMLPKSNDTCNPSQYRPITCLPTIYKLITSLITQKISKHLERYNILSEEQKGCRQNHKGCKEQLVIDSTILKHSNRHKRNLHISYIDYKKAFDSVPHSWLVRILHIYKINPILINFLKNAMSDWRTTLHLSNGTDSIVSEEIPIENGIFQGDSLSPLWFCLALNPLSTLLNSTTTNGYKLDANTNITHLMYMDDIKLFARNSKCLDNLLSITTQYSQDINMSFGLDKCRTLHIHNGKIATNTDNTLESNLFLSMEPADTYKYLGIQQSHNINHIEIKKQLSSEYARRLNLICKKQLHSKNLFKAINTFAIPVLTYSFGIVKWTRTDINRLEIKTRTTLTKHKYLHNKSAIERIALQRQKGGRGLIDLTILWEGQLKNLKDFFYSKATKSNIHAAIIEIDANFTPLNLCNRDVTYKNPESLRKEKIDRWRSKELHGRHLHDLEQTHIDLDSSNKWLQLGSLFPETEGFMIAIQDQVINTKNYSKFISKDPNIQNDKCRKCHRSAETIQHITSACPTLAQNDYTHRHNQIAHIVHQKLAIKHNLIPPKIVPYYQYSPKPVIENQTYKIYFDRAILTDKTIHNNRPDITLIDKHNKHTYLIDIAVPNTHNLQKTITDKIHKYTELKEEIVRIWKMAKVYIVPLVLSSTGVIPKHLHHFLRQIELPTNTYITMQKAAILNTCRIVRKFLQEDTTSHITASVPHHTNELHLA

SEQ ID NO: 20367 - protein, 1315 aa, Spilosoma lubricipeda
METRSKKKLRGPLPGGDRRGTPGADAGCYSMRTVSGEELSRRAPTGSSESITADQYDETDRLTDRTISPIEPFSPSTISYSPSTATSPSVHSNRDEQDNIRVITLAEDVSQETLVTQSATTKAGKPRVRMQWSKEINTFIMRTYLSITKLETDRTMYCKKLHDQFILRFPHLNVSAQRVADQRRVIVRNKLLPDNVIDMMKREIAEQLSREDIENTSPHISIISTPITQPQENMSSSGVPHVQTSPLTLNTQQTSLTHSHTSTQSNTLNNTESTTQIIEDSQVTHLPQIDISTQELINQLETAVILYTGTDPTTRPKLPKLRESKKLYGYVDIFNKQILCNFFSSVSDLNTLHTLIYCSALVICQNLGYKIINHNTNIRPQTHKPQKPPWQIRIETDIKNLRADIGRLTQYINNNRSKKVVAAVEIIFRRTKVHTIHERNNARPEEYLDTLKQKLTLKSQRLSRYLKALQRKEDNRLFTTNEKSFYRSFNGHGTQQNTCYDMPQPNELKNYWTNLWKKEMDHNDSAKWISEEEYKMANTEIMELNDITLADIEIATRKMKNWKAAGIDSVHNFWFKKFFILHHKLANNINEIIKGEQQLPKFVTKGITYMLPKSNDTSNPSQYRPITCLPTIYKLITSIITQKISKHLESYNILSEEQKGCRQNHKGCKEQLVIDSTILKHSNKHKRNLYISYIDYKKAFDSVPHSWLVRVLHIYKINPILINFLENAMSDWRTTLHLSNGTNSIVTDEIPIENGIFQGDSLSPLWFCLALNPLSTLLNNTNTNGYKLDTNTSITHLMYMDDIKLFTRTNKCLDHLLKITTQFSKDINMSFGLDKCRTLHIRNGKETTSNNTTSEVNVFLRMEPADTYKYLGIEQSHNINHIEIKKQLLTEYTRRLNLICKRQLHSKNLFKAINTFAIPVLTFSFGIVKWTRTDIHNLEIKTRTTLTKHKYLHQKSAIERIALKRQNGGRGLIDLTALWEEQIKNLRDFFYSKATLSEIHAAIIEIDANFTPLNLCNRDVTYKNSESFTKEKINRWRSKELHGRHLHDLEQSHIDLDSSNKWLQLGSLFPETEGFMIAIQDQVINTRNYSKFILKDPNVQNDKCRKCHRAAETIQHITSACPTLAQNDYTHRHNQIAHIIHQKLAVKHNLIPPKIIPYYQYSPKPVLENQSHKIYFDRAILTDKTIHNNRPDITLIDKYNKHTYLIDIAVPNTHNLQKTITDKIHKYTELKEEIIRIWKMTKVYIVPLVLSSTGVIPKHLHHFLRQIELPTNTYITMQKAGILNTCRIVRKFLQEDTTSQITYLVQNPSNELHLV

SEQ ID NO: 20368 - protein, 1309 aa, Spilosoma lubricipeda
METRSKKKLRGPLPGGDRRGTPGADAGCYSMRTVSGEELSRRAPTGSSESITADQYDETDRLTDRTISPIEPFSPSTISYSPSTATSPSVHSNRDEQDNIRVITLAEDVSQETLVTQSATTKAGKPRVRMQWSKEINTFIMRTYLSITKLETDRTMYCKKLHDQFILRFPHLNVSAQRVADQRRVIVRNKLLPDNVIDMMKREIAEQLSREDTENASPHISIISTPITQPQENMSSSGVPHVQTSPLTLNTQQTSLTHSHTSTQSNTLNNTESTTQIIEDSQVTHLPQIDISTQELINQLETAVILYTGTDPTTRPKLPKLRESKKLYGYVDIFNKQILCNFFSSVSDLNTLHTLIYCSALVICQNLGYKIINHNTNIRPQTHKPQKPPWQIRIETDIKNLRADIGRLTQYINNNRSKKVVAAVEIIFRRTKVHTIHERNNARPEEYLDTLKQKLTLKSQRLSRYLKALQRKEDNRLFTTNEKNFYRSFNGHGTQQNTCYDMPQPNELKNYWTNLWKKEMDHNDSAKWISEEEYKMANTEIMELNDITLADIEIATRKMKNWKAAGIDSVHNFWFKKFFILHHKLANNINEIIKGEQQLPKFVTKGITYMLPKSNDTSNPSQYRPITCLPTIYKLITSIITQKISKHLESYNILSEEQKGCRQNHKGCKEQLVIDSTILKHSNKHKRNLYISYIDYKKAFDSVPHSWLVRVLHIYKINPILINFLENAMSDWRTTLHLSNGTNSIVTDEIPIENGIFQGDSLSPLWFCLALNPLSTLLNNTNTNGYKLDTNTSITHLMYMDDIKLFARTNKCLDHLLKITTQFSKDINMSFGLDKCRTLHIRNGKETTSNNTISEVNVFLRMEPADTYKYLGIEQSHNINHIEIKKQLLTEYTRRLNLICKRQLHSKNLFKAINTFAIPVLTYSFGIVKWTRTDIHNLEIKTRTTLTKHKYLHQKSAIERIALKRQNGGRGLIDLTALWEGQIKNLRDFFYSKATLSEIHAAIIEIDANFTPLNLCNRDVTYKNSESFTKEKINRWRSKELHGRHLHDLEQSHIDLDSSNKWLQLGSLFPETEGFMIAIQDQVINTRNYSKFILKDPNVQNDKCRKCHRAAETIQHITSACPTLAQNDYTHRHNQIAHIIHQKLAVKHNLIPYYQYSPKPVLENQSHKIYFDRAILTDKTIHNNRPDITLIDKYNKHTYLIDSAVPNTHNLQKTITDKIHKYTELKEEIIRIWKMTKVHMPLVLSCTGVIPKHLHHFLRQIELPTNTYITMQKAGILNTCRIVRKFLQEDTTSQITYLVQNPSNELHLV

SEQ ID NO: 20369 - protein, 1308 aa, Spilosoma lubricipeda
METRSKKKLRGPLPGGDRRGTPGADAGCFSMRTVSGEELSRRAPTGFSESITADQYDETDRLTDRTSSPIEPFSPSTISYTPSTATSPSVHSNRDEHDNNKFVTLAEDVSQETLVTQSATTKAGKPRVRMQWSKEINTFIMRTYLYITKLETDRTMYCKKLHDQFILRFPHLNISAQRVADQRRVIVRNKLLPDDEINKMKQEIADQLNREDTENTLPHTSTILTPITHTIVPDAQTLPTTSNTQQTLLTHSHTSTQTNTFNNTDTITQIIEDAQLSPLPQIDMSTQELINQLETALIFYTGTDPTTRPKLPKLRESKKLYGYVDTFNKQILGNFFSSVSDLNTLHTLIYCSALVICQNLGYKIISHNTNIRPQTHKPHKPAWQIRIETDIKNLRADIGRLTQYINNNRSRKVVAAAEIIFRKTKVHTIHEHNNVRPEEYLDTLKQKLTLKSHRLSRYLKALRRKEDNKLFTTNEKSFYRSFNNPSTQQNTCHDIPQPNELTNYWTNLWKKQKDHNNSAEWIAEEEDKMINTEIMEFNDITLEDIEIATRKMKNWKSAGIDSVHNFWYKKFFVLHHKLANNINEIIKSEQELPKFVTKGITYMLPKSNDTSNPSQYRPITCLPTIYKLITSLITQKISKHLERYNILSEEQKGCRQNHKGCKEQLVIDSTILKHSNRHKRNLHISYIDYKKAFDSVPHSWLIRILHNYKINPILINFLKNAMSDWRTTLHLSNGTDSIVSEEIPIENGIFQGDSLSPLWFCLALNPLSTLLNSTTTNGYKLDTNTNITHLMYMDDIKLFARNSKCLDHLLSITTQYSQDINMSFGLDKCRTLHIHNGKIATNTDNTLESNLFLSMEPADTYKYLGIQQSHNINHIEIKKQLSSEYARRLNLICKKQLHSKNLFKAINTFAIPVLTYSFGIVKWTRTDINRLEIKTRTTLTKHKYLHNKSAIERIALQRQKGGRGLIDLTILWEGQLKNLKDFFYSKATKSNIHAAIIEIDANFTPLNLCNRDVTYKTPESLRKEKIDRWRSKELHGRHLHDLEQTHIDLDSSNKWLQLGSLFPETEGFMIAIQDQVINTKNYSKFILKDPNIQNDKCRKCHRSAETIQHITSACPTLAQNDYTHRHNQIAHIVHQKLAIKHNLIPPKIVPYYQYSPKPVIENQTHKIYFDRAILTDKTIHNNRPDITLIDKHNKHTYLIDIAVPNTHNLQKTITDKIHKYTELKEEIVRIWKMAKVYIVPLVLSSTGVIPKHLHHFLRQIELPTNTYITMQKAAILNTCRIVRKFLQEDTTSHITASVPHHTNELHLA

SEQ ID NO: 20370 - protein, 1308 aa, Spilosoma lubricipeda
METRSKKKLRGPLPGGDRRGTPGADAGCFSMRTVSGEELSRRAPTGSSESITADQYDETDRLTDRTSSPIEPFSPSTISYTPSTAISPSVHSNRDEHDNNKFVTLAEDVSQETLVTQSATTKAGKPRVRMQWSKEINTFIMRTYLYITKLETDRTMYCKKLHDQFILRFPHLNISAQRVADQRRVIVRNKLLPDDEINKVKQEIADQLNREDTENTLPHTSTILTPITHTIVPDAQTLPTTSNTQQTLLTHSHTSTQANTFNNTDTITQIIEDAQLSPLPQIDTSTQELINQLETALIFYTGTDPTTRPKLPKLRESKKLYGYVDTFNKQILGNFFSSVSDLNTLHTLIYCSALVICQNLGYKIISHNTNIRPQTHKPHKPAWQIRIETDIKNLRADIGRLTQYINNNRSRKVVAAAEIIFRKTKVHTIHEHNNVRPEEYLDTLKQKLMLKSHRLSRYLKALRRKEDNKLFTTNEKSFYRSFNNPSTQQNTCHDIPQPSELTNYWTNLWKKQKDHNNSAEWIAEEEDKMINTEIMEFNDITLEDIEIATRKMKNWKSAGIDSVHNFWYKKFFVLHYKLANNINEIIKSEQELPKFVTKGITYMLPKSNDTSNPSQYRPITCLPTIYKLITSLITQKISKHLERYNILSEEQKGCRQNHKGCKEQLVIDSTILKHSNRHKRNLHISYIDYKKAFDSVPHSWLIRILHIYKINPILINFLKNAMSDWRTTLHLSNGTDSIVSEEIPIENGIFQGDSLSPLWFCLALNPLSTLLNSTTTNGYKLDTNTNITHLMYMDDIKLFARNSKCLDHLLSITTQYSQDINMSFGLDKCRTLHIHNGKIATNTDNTLESNLFLSMEPADTYKYLGIQQSHNINHIEIKKQLSSEYARRLNLICKKQLHSKNLFKAINTFAIPVLTYSFGIVKWTRTDINRLEIKTRTTLTKHKYLHNKSAIERIALQRQKGGRGLIDLTILWEGQLKNLKDFFYSKATKSNIHAAIIEIDANFTPLNLCNRDVTYKNPESLRKEKIDRWRSKELHGRHLHDLEQTHIDLDSSNKWLQLGSLFPETEGFMIAIQDQVINTKNYSKFILKDPNIQNDKCRKCHRTAETIQHITSACPTLAQNDYTHRHNQIAHIVHQKLAIKHNLIPPKIVPYYQYSPKPVIENQTHKIYFDRAILTDKTIHNNRPDITLIDKHNKHTYLIDIAVPNTHNLQKTITDKIHKYTELKEEIVRIWKMAKVYIVPLVLSSTGVIPKHLHHFLRQIELPTNTYITMQKAAILNTCRIVRKFLQEDTTSHITASVPHHTNELHLA

SEQ ID NO: 20371 - protein, 1082 aa, Spilosoma lubricipeda
MSSSGVPHVQTSPLTLNTQQTSLTHSHTSTQSNTLNNTESTTQIIEDSQVTHLPQIDISTQELINQLETAVILYTGTDPTTRPKLPKLRESKKLYGYVDIFNKQILCNFFSSVSDLNTLHTLIYCSALVICQNLGYKIINHNTNIRPQTHKPQKPPWQIRIETDIKNLRADIGRLTQYINNNRSKKVVAAVEIIFRRTKVHTIHERNNARPEEYLDTLKQKLTLKSQRLSRYLKALQRKEDNRLFTTNEKSFYRSFNGHGTQQNTCYDMPQPNELKNYWTNLWKKEMDHNDSAKWISEEEYKMANTEIMELNDITLADIEIATRKMKNWKAAGIDSVHNFWFKKFFILHHKLANNINEIIKGEQQLPKFVTKGITYMLPKSNDTSNPSQYRPITCLPTIYKLITSIITQKISKHLESYNILSEEQKGCRQNHKGCKEQLVIDSTILKHSNKHKRNLYISYIDYKKAFDSVPHSWLVRVLHIYKINPILINFLENAMSDWRTTLHLSNGTNSIVTDEIPIENGIFQGDSLSPLWFCLALNPLSTLLNNTNTNGYKLDTNTSITHLMYMDDIKLFARTNKCLDHLLKITTQFSKDINMSFGLDKCRTLHIRNGKETTSNNTTSEVNVFLRMEPADTYKYLGIEQSHNINHIEIKKQLLTEYTRRLNLICKRQLHSKNLFKAINTFAIPVLTYSFGIVKWTRTDIHNLEIKTRTTLTKHKYLHQKSAIERIALKRQNGGRGLIDLTALWEGQIKNLRDFFYSKATLSEIHAAIIEIDANFTPLNLCNRDVTYKNSESFTKEKINRWRSKELHGRHLHDLEQSHIDLDSSNKWLKLGSLFPDTEGFMIAIQDQVINTRNYSKFILKDPNVQNDKCRKCHRAAETIQHITSACPTLAQNDYTHRHNQIAHIIHQKLAVKHNLIPPKIIPYYQYSPKPVLENQSHKMYFDRAILTDKTIHNNRPDITLIDKYNKHTYLIDIAVPNTHNLQKTITDKIHKYTELKEEIIRIWKMTKVYIVPLVLSSTGVIPKHLHHFLRQIELPTNTYITMQKAGILNTCRIVRKFLQEDTTSQITYLVQNPSNELHLV

SEQ ID NO: 20372 - protein, 1315 aa, Spilosoma lubricipeda
METRSKKKLRGPLPGGDRRGTPGADAGCYSMRTVSGEELSRRAPTGSSESITADQYDETDRLTDRTISPIEPFSPSTISYSPSTATSPSVHSNRDEQDNIRVITLAEDVSQETLVTQSATTKAGKPRVRMQWSKEINTFIMRTYLSITKLETDRTMYCKKLHDQFILRFPHLNVSAQRVADQRRVIVRNKLLPDNVIDMMKREIAEQLSREDTENASPHISIISTPITQPQENMSSSGVPHVQTSPLTLNTQQTSLTHSHTSTQSNTLNNTESTTQIIEDSQVTHLPQIDISTQELINQLETAVILYTGTDPTTRPKLPKLRESKKLYGYVDIFNKQILCNFFSSVSDLNTLHTLIYCSALVICQNLGYKIINHNTNIRPQTHKPQKPPWQIRIETDIKNLRADIGRLTQYINNNRSKKVVAAVEIIFRRTKVHTIHERNNARPEEYLDTLKQKLTLKSQRLSRYLKALQRKEDNRLFTTNEKSFYRSFNGHGTQQNTCYDMPQPNELKNYWTNLWKKEMDHNDSAKWISEEEYKIANTEIMELNDITLADIEIATRKMKNWKAAGIDSVHNFWFKKFFILHHKLANNINEIIKGEQQLPKFVTKGITYMLPKSNDTSNPSQYRPITCLPTIYKLITSIITQKISKHLESYNILSEEQKGCRQNHKGCKEQLVIDSTILKHSNKHKRNLYISYIDYKKAFDSVPHSWLVRVLHIYKINPILINFLENAMSDWRTTLHLSNGTNSIVTDEIPIENGIFQGDSLSPLWFCLALNPLSTLLNNTNTNGYKLDTNTSITHLMYMDDIKLFARTNKCLDHLLKITTQFSKDINMSFGLDKCRTLHIRNGKETTSNKTISEVNVFLRMEPADTYKYLGIQQSHNINHIEIKKQLLTEYTRRLNLICKRQLHSKNLFKAINTFAIPVLTYSFGIVKWTRTDIHNLEIKTRTTLTKHKYLHQKSAIERIALKRQNGGRGLIDLTALWEGQIKNLRDFFYSKATLSEIHAAIIEIDANFTPLNLCNRDVTYKNSESFTKEKINRWRSKELHGRHLHDLEQSHIDLDSSNKWLQLGSLFPETEGFMIAIQDQVINTRNYSKFILKDPNVQNDKCRKCHRAAETIQHITSACPTLAQNDYTHRHNQIAHIIHQKLAVKHNLIPPKIIPYYQYSPKPVLENQSHKIYFDRAILTDKTIHNNRPDITLIDKYNKHTYLIDIAVPNTHNLQKTITDKIHKYTELKEEIIRIWKMTKVYIVPLVLSSTGVIPKHLHHFLRQIELPTNTYITMQKAGILNTCRIVRKFLQEDTTSQITYLVQNPSNELHLV

SEQ ID NO: 20373 - protein, 1308 aa, Spilosoma lubricipeda
METRSKKKLRGPLPGGDRRGTPGADAGCFSMRTVSGEELSRRALTGSSESITADQYDETDRLTDRTSSPIEPFSPSTISYTPSTATSPSVHSNRDEHDNNKFVTLAEDVSQETLVTQSATTKAGKPRVRMQWSKEINTFIMRTYLYITKLETDRTMYCKKLHDQFILRFPHLNISAQRVADQRRVIVRNKLLPDDEINKMKQEIADQLNREDTENTLPHTSTILTPITHTIVPDAQTLPTTSNTQQTLLTHSHTSTQTNTFNNTDTITQIIEDAQLSPLPQIDMSTQELINQLETALIFYTGTDPTTRPKLPKLRESKKLYGYVDTFNKQILGKFFSSVSDLNTLHTLIYCSALVICQNLGYKIISHNTNIRPQTHKPHKPAWQIRIETDIKNLRADIGRLTQYINNNRSRKVVAAAEIIFRKTKVHTIHEHNNVRPEEYLDTLKQKLTLKSHRLSRYLKALRRKEDNKLFTTNEKSFYRSFNNPSTQQNTCHDIPQPSELTNYWTNLWKKQKDHNNSAEWIAEEEDKMINTEIMEFNDITLEDIEIATRKMKNWKSAGIDSVHNFWYKKFFVLHHKLANNINEIIKSEQELPKFVTKGITYMLPKSNDTSNPSQYRPITCLPTIYKLITSLITQKISKHLERYNILSEEQKGCRQNHKGCKEQLVIDSTILKHSNRHKRNLHISYIDYKKAFDSVPHSWLIRILHIYKINPILINFLKNAMSDWRTTLHLSNGTDSIVSEEIPIENGIFQGDSLSPLWFCLALNPLSTLLNSTTTNGYKLDTNTNITHLMYMDDIKLFARNSKCLDHLLSITTQYSQDINMSFGLDKCRTLHIHNGKIATNTDNTLESNLFLSMEPADTYKYLGIQQSHNINHIEIKKQLSSEYARRLNLICKKQLHSKNLFKAINTFAIPVLTYSFGIVKWTRTDINRLEIKTRTTLTKHKYLHNKSAIERIALQRQKGGRGLIDLTILWEGQLKNLKDFFYSKATKSNIHAAIIEIDANFTPLNLCNRDVTYKNPESLRKEKIDRWRSKELHGRHLHDLEQTHIDLDSSNKWLQLGSLFPETEGFMIAIQDQVINTKNYSKFILKDPNIQNDKCRKCHRSAETIQHITSACPTLAQNDYTHRHNQIAHIVHQKLAIKHNLIPPKIVPYYQYSPKPVIENQTHKIYFDRAILTDKTIHNNRPDITLIDKHNKHTYLIDIAVPNTHNLQKTITDKIHKYTELKEEIVRIWKMAKVYIVPLVLSSTGVIPKHLHHFLRQIELPNNTYITMQKAAILNTCRIVRKFLQEDTTSHITASVPHHTNELHLA

SEQ ID NO: 20374 - protein, 1308 aa, Spilosoma lubricipeda
METRSKKKLRGPLPGGDRRGTPGADAGCFSMRTVSGEELSRRAPTGSSESITADQYDETDRLTDRTSSPIEPFSPSTISYTPSTATSPSVHSNRDEHDNNKFVTLAEDVSQETLVTQSATTKAGKPRVRMQWSKEINTFIMRTYLYITKLETDRTMYCKKLHDQFILRFPNLNISAQRVADQRRVIVRNKLLPDDEINKMKQEIADQLNREDTENTLPHTSTILTPITHTIVPDAQTLPTTSNTQQTLLTHSHTSTQTNTFNNTDTITQIIEDAQLSPLPQIDMSTQELINQLETALIFYTGTDPTTRPKLPKLRESKKLYGYVDTFNKQILGNFFSSVSDLNTLHTLIYCSALVICQNLGYKIISRNTNIRPQTHKPHKPAWQIRIETDIKNLRADIGRLTQYINNNRSRKVVAAAEIIFRKTKVHTIHEHNNVRPEEYLDTLKQKLTLKSHRLSRYLKALRRKEDNKLFTTNEKSFYRSFNNPSTQQNTCHDIPQPCELTNYWTNLWKKQKDHNNSAEWIAEEEDKMINTEIMEFNDITLEDIEIATRKMKNWKSAGIDSVHNFWYKKFFVLHHKLANNINEIIKSEQELPKFVTKGITYMLPKSNDTSNPSQYRPITCLPTIYKLITSLITQKISKHLERYNILSEEQKGCRQNHKGCKEQLVIDSTILKHSNRHKRNLHISYIDYKKAFDSIPHSWLIRILHIYKINPILINFLKNAMSDWRTTLHLSNGTDSIISEEIPIENGIFQGDSLSPLWFCLALNPLSTLLNSTTTNGYKLDTNTNITHLMYMDDIKLFARNSKCLDHLLSITTQYSQDINMSFGLDKCRTLHIHNGKIATNTDNTLESNLFLSMEPADTYKYLGIQQSHNINHIEIKKQLSSEYARRLNLICKKQLHSKNLFKAINTFAIPVLTYSFGIVKWTRTDINRLEIKTRTTLTKHKYLHNKSAIERIALQRQKGGRGLIDLTILWEGQLKNLKDFFYSKATKSNIHAAIIEIDANFTPLNLCNRDVTYKNPESLRKEKIDRWRSKELHGRHLHDLEQTHIDLDSSNKWLQLGSLFPETEGFMIAIQDQVINTKNYSKFILKDPNIQNDKCRKCHRSAETIQHITSACPTLAQNDYTHRHNQIAHIVHQKLAIKHNLIPPKIVPYYQYSPKPVIENQTHKIYFDRAILTDKTIHNNRPDITLIDKHNKHTYLIDIAVPNTHNLQKTITDKIHKYTELKEEIVRIWKMAKVYIVPLVLSSTGVIPKHLHHFLRQIELPTNTYITMQKAAILNTCRIVRKFLQEDTTSHITASVPHHTNELHLA

SEQ ID NO: 20375 - protein, 1308 aa, Spilosoma lubricipeda
METRSKKKLRGPLPGGDRRGTPGADAGCFSMRTVSGEELSRRAPTGSSESTTADQYDETDRLTDRTSSPIEPFSPSTISYTPSTATSPSVHSNRDEHDNNKFVTLAEDVSQETLVTQSATTKAGKPRVRMQWSKEINTFIMRTYLYITKLETDRTMYCKKLHDQFILRFPHLNISAQRVADQRRVIVRNKLLPDDEINKMKQEIADQLNREDTENTLPHTSTILTPITHTIVPDAQTLPTTSNTQQTLLTHSHTSTQTNTFNNTDTITQIIEDAQLSPLPQIDMSTQELINQLETALIFYTGTDPTTRPKLPKLRESKKLYGYVDTFNKQILGNFFSSVSDLNTLHTLIYCSALVICQNLGYKIISHNTNIRPQTHKLHKPAWQIRIETDIKNLRADIGRLTQYINNNRSRKVVAAAEIIFRKTKVHTIHEHNNVRPEEYLDTLKQKLTLKSHRLSRYLKALRRKEDNKLFTTNEKSFYRSFNNPSTQQNTCHDIPQPSELTNYWTNLWKKQKDHNNSAEWIAEEEDKMINTEIMEFNDITLEDIEIATRKMKNWKSAGIDSVHNFWYKKFFVLHHKLANNINEIIKSEQELPKFVTKGITYMLPKSNDTSNPSQYRPITCLPTIYKLITSLITQKISKHLERYNILSEEQKGCRQNHKGCKEQLVIDSTILKHSNRHKRNLHISYIDYKKAFDSVPHSWLIRILHIYKINPILINFLKNAMSDWRTTLHLSNGTDSIVSEEIPIENGIFQGDSLSPLWFCLALNPLSTLLNSTTTNGYKLDTNTNITHLMYMDDIKLFARNSKCLDHLLSITTQYSQDINMSFGLDKCRTLHIHNGKIATNTDNTLESNLFLSMEPADTYKYLGIQQSHNINHIEIKKQLSSEYARRLNLICKKQLHSKNLFKAINTFAIPVLTYSFGIVKWTRTDINRLEIKTRTTLTKHKYLHNKSAIERIALQRQKGGRGLIDLTILWEGQLKNLKDFFYSKATKSNIHAAIIEIDANFTPLNLCNRDVTYKTPESLRKEKIDRWRSKELHGRHLHDLEQTHIDLDSSNKWLQLGSLFPETEGFMIAIQDQVINTKNYSKFILKDPNIQNDKCRKCHRSAETIQHITSACPTLAQNDYTHRHNQIAHIVHQKLAIKHNLIPPKIVPYYQYSPKPVIENQTHKIYFDRAILTDKTIHNNRPDITLIDKHNKHTYLIDIAVPNTHNLQKTITDKIHKYTELKEEIVRIWKMAKVYIVPLVLSSTGVIPKHLHHFLRQIELPTNTYITMQKAAILNTCRIVRKFLQEDTTSHITASVPHHTNELHLA

SEQ ID NO: 20376 - protein, 1308 aa, Spilosoma lubricipeda
METRSKKKLRGPLPGGDRRGTPGADAGCFSMRTVSGEELSRRAPTGSSESITADQYDETDRLTDRTSSPIEPFSPSTISYTPSTATSPSVHSNRDEHDNNKFVTLAEDVSQETLVTQSATTKAGKPRVRMQWSKEINTFIMRTYLYITKLETDRTMYCKKLHDQFILRFPHLNISAQRVADQRRVIVRNKLLPDDEINKMKQEIADQLNREDTENTLPHTSTILTPITHTIVPDAQTLPTTSNTQQTLLTHSHTSTQTNTFNNTDTITQIIEDAQLSPLPQIDMSTQELINQLETALILYTGTDPTTRPKLPKLRESKKLYGYVDTFNKQILGNFVSSVSDLNTLHTLIYCSALVICQNLGYKIISHNTNIRPQTHKLHKPAWQIRIETDIKNLRADIGRLTQYINNNRSRKVVAAAEIIFRKTKVHTIHEHNNVRPEEYLDTLKQKLTLKSHRLSRYLKALRRKEDNKLFTTNEKSFYRSFNNPSTQQNTCHDIPQPSELTNYWTNLWKKQKDHNNSAEWIAEEEDKMINTEIMEFNDITLEDIEIATRKMKNWKSAGIDSVHNFWYKKFFVLHHKLANNINEIIKSEQELPKFVTKGITYMLPKSNDTSNPSQYRPITCLPTIYKLITSLITQKISKHLERYNILSEEQKGCRQNHKGCKEQLVIDSTILKHSNRHKRNLHISYIDYKKAFDSVPHSWLIRILHIYKINPILINFLKNAMSDWRTTLHLSNGTDSIVSEEIPIENGIFQGDSLSPLWFCLALNPLSTLLNSTTTNGYKLDTNTNITHLMYMDDIKLFARNSKCLDHLLSITTQYSQDINMSFGLDKCRTLHIHNGKIATNTDNTLESNLFLSMEPADTYKYLGIQQSHNINHIEIKKQLSSEYARRLNLICKKQLHSKNLFKAINTFAIPVLTYSFGIVKWTRTDINRLEIKTRTTLTKHKYLHNKSAIERIALQRQKSGRGLIDLTILWEGQLKNLKDFFYSKATKSNIHAAIIEIDANFTPLNLCNRDVTYKTPESLRKEKIDRWRSKELHGRHLHDLEQTHIDLDSSNKWLQLGSLFPETEGFMIAIQDQVINTKNYSKFILKDPNIQNDKCRKCHRSAETIQHITSACPTLAQNDYTHRHNQIAHIVHQKLAIKHNLIPPKIVPYYQYSPKPVIENQTHKIYFDRAILTDKTIHNNRPDITLIDKHNKHTYLIDIAVPNTHNLQKTITDKIHKYTELKEEIVRIWKMAKVYIVPLVLSSTGVIPKHLHHFLRQIELPTNTYITMQKAAILNTCRIVRKFLQEDTTSHITASVPHHTNELHLA

SEQ ID NO: 20377 - protein, 1308 aa, Spilosoma lubricipeda
METRSKKKLRGPLPGGDRRGTPGADAGCFSMRTVSGEELSRRAPTGSSESITADQYDETDRLTDRTSSPIEPFSPSTISYTPSTATSPSVHSNRDEQDNIRVITLAEDVSQETLVTQSATTKAGKPRVRMQWSKEINTFIMRTYLYITKLETDRTMYCKKLHDQFILRFPHLNISAQRVADQRRVIVRNKLLPDDEINKMKQEIADQLNREDTENTLPHTSTILTPITHTIVPDAQTLPTTSNTQQTLLTHSHTSTQTNTFNNTDTITQIIEDAQLSPLPQIDMTTQELINQLETALIFYTGTDPTTRPKLPKLRESKKLYGYVDTFNKQILGKFFSSVSDLNTLHTLIYCSALVICQNLGYKIISHNTNIRPQTHKPHKPAWQIRIETDIKNLRADIGRLTQYMNNNRSRKVVAAAEIIFRKTKVHTIHEHNNVRPEEYLDTLKQKLTLKSHRLSRYLKALRRKEDNKLFTTNEKSFYRSFNNPSTQQNTCHDIPQPSELTNYWTNLWKKQKDHNNSAEWIAEEEDKMINTEIMEFNDITLEDIEIATRKMKNWKSAGIDSVHNFWYKKFFVLHHKLANNINEIIKSEQELPKFVTKGITYMLPKSNDTSNPSQYRPITCLPTIYKLITSLITQKISKHLERYNILSEEQKGCRQNHKGCKEQLVIDSTILKHSNRHKRNLHISYIDYKKAFDSVPHSWLIRILHIYKINPILINFLKNAMSDWRTTLHLSNGTDLIVSEEIPIENGIFQGDSLSPLWFCLALNPLSTLLNSTTTNGYKLDTNTNITHLMYMDDIKLFARNSKCLDHLLSITTQYSQDINMSFGLDKCRTLHIHNGKIATNTDNTLESNLFLSMEPADTYKYLGIQQSHNINHIEIKKQLSSEYARRLNLICKKQLHSKNLFKAINTFAIPVLTYSFGIVKWTRTDINRLEIKTRTTLTKHKYLHNKSAIERIALQRQKGGRGLIDLTILWEGQLKNLKDFFYSKATKSNIHAAIIEIDANFTPLNLCNRDVTYKNPESLRKEKIDRWRSKELHGRHLHDLEQTHIDLDSSNKWLQLGSLFPETEGFMIAIQDQVINTKNYSKFILKDPNIPNDKCRKCHRSAETIQHITSACPTLAQNDYTHRHNQIAHIVHQKLAIKHNLIPPKIVPYYQYSPKPVIENQTHKIYFDRAILTDKTIHNNRPDITLIDKHNKHTYLIDIAVPNTHNLQKTITDKIHKYTELKEEIVRIWKMAKVYIVPLVLSSTGVIPKHLHHFLRQIELPTNTYITMQKAAILNTCRIVRKFLQEDTTSHITASVPHHTNELHLA

SEQ ID NO: 20378 - protein, 1308 aa, Spilosoma lubricipeda
METRSKKKLRGPLPGGDRRGTPGADAGCFSMRTVSGEELSRRAPTGSSESITADQYDETDRLTDRTSSPIEPFSPSTISYTPSTATSPSVHSNRDEHDNNKFVTLAEDVSQETLVTQSATTKAGKPRVRMQWSKEINTFIMRTYLYITKLETDRTMYCKKLHDQFILRFPHLNISAQRVADQRRVIVRNKLLPDDEINKMKQEIADQLNREDTENTLPHTSTILTPITHTIVPDDQTLPTMSNTQQTLLTHSHTSTQTNTFNNTDTITQIIEDAQLSPLPQIDTSTQELINQLETALIFYTGTDPTTRPKLPKLRESKKLYGYVDTFNKQILGNFFSSVSDLNTLHTLIYCSALVICQNLGYKIISHNTNIRPQTHKPHKPAWQIRIETDIKNLRADIGRLTQYINNNRSRKVVAAAEIIFRKTKVHTIHEHNNVRPEEYLDTLKQKLTLKSHRLSRYLKALRRKEDNKLFTTNEKSFYRSFNNPSTQQNTCHDIPQPSELTNYWTNLWKKQKDHNNSAEWIAEEEDKMINTEIMEFNDITLEDIEIATRKMKNWKSAGIDSVHNFWYKKFFVLHYKLANNINEIIKSEQELPKFVTKGITYMLPKSNDTSNPSQYRPITCLPTIYKLITSLITQKISKHLERYNILSEEQKGCRQNHKGCKEQLVIDSTILKHSNRHKRNLHISYIDYKKAFDSVPHSWLIRILHIYKINPILINFLKNAMSDWRTTLHLSNGTDSIISEEIPIENGIFQGDSLSPLWFCLALNPLSTLLNSTTTNGYKLDTNTNITHLMYMDDIKLFARNSKCLDHLLSITTQYSQDINMSFGLDKCRTLHIHNGKIATNTDNTLESNLFLSMEPADTYKYLGIQQSHNINHIEIKKQLSSEYARRLNLICKKQLHSKNLFKAINTFAIPVLTYSFGIVKWTRTDINRLEIKTRTTLTKHKYLHNKSAIERIALQRQKGGRGLIDLTILWEGQLKNLKDFFYSKATKSNIHAAIIEIDANFTPLNLCNRDVTYKNPESLRKEKIDRWRSKELHGRHLHDLEQTHIDLDSSNKWLQLGSLFPETEGFMIAIQDQVINTKNYSKFILKDPNIQNDKCRKCHRSAETIQHITSACPTLAQNDYTHRHNQIAHIVHQKLAIKHNLIPPKIVPYYQYSPKPVIENQTHKIYFDRAILTDKTIHNNRPDITLIDKHNKHTYLIDIAVPNTHNLQKTITDKIHKYTELKEEIVRIWKMAKVYIVPLVLSSTGVIPKHLHHFLRQIELPTNTYITMQKAAILNTCRIVRKFLQEDTTSHITASVPHDTNELHLA

SEQ ID NO: 20379 - protein, 1268 aa, Myrinia binoculus
MMETRSKKIRTGPLPGGNRRGTSVAGHGRDRMLASDSRLGGWAGVGDAGGRGMSSRTTAESGESSRSSRTPAADVSQEAHANKPATTKAGKPRVRMAWDDDMNLFIMRTYLEVTKLETDRTMYIKKLVDKFKIKYPHLNVSAQRIADQRRVIVRNKLLSDKVIEDIRKDISEQLNQEKVSLIITQSPAIHTSVTNHRHNPQSDQSSVETLTQSSMVELPSTLTSDASTQTLTLSHIHTTTVEIPDERSIDVTMNLIQQLEVTLTLYTGTDPTARPKLPKLKESKKLYHLVDIFNKQILGKFYSVNTDITELHTLIYCSALVISKNLGFTFEEEEYTTSRIFKSKSSSPAWQIRIENDIKHLRADIGRLTQYINNNRSKKVTKHVEKIFKVTKIHSSHENHNNRPEEYLDTLKQKLALKSQRLARYKKASQRKTDNKLFTNNEKEFYRSLRNETISKNYDLPNPVELKSYWTDVWKNKKHHNDTADWISDEENRWNHIEEMEFIDITGKDIELITKKTKNWKAAGIDGIHNFWYKKFSILHDVLAQIITELLKGTANLPNFITKGITYMLPKSNDTTNPSQYRPITCLPTIYKVITSCITHKINIHLTQHNILAEEQKGCRRYHRGCKEQLIIDSTVLKHAQTQNRNIHISYIDYQKAFDSVPHSWLIRVLQIYKINPTVINFLKNTMIEWKTRLVLFNSSQLISTEEIPIENGIFQGDSFSPVWFCLALNPLSYILNNENNGYRLTKETEISHLIYMDDIKLFSKSDKGLNKLIHKTTQFSKDINMSFGLDKCRTLHIHKGKIKNTNADTENSETNFTPMEVNDTYKYLGILQSKTINHTQIKIKLTGEYTRRLHSICKKSLLSKNLFKAINTYAIPVLTYSFGIIKWSRTDINSLEIKTRTTLTKYKNLHPKSAIERISVQRLKGGRGLIDLKVLWEGQLNNLRNFFYNKAETSDIHLAIVESDKNFTPLNLKTRDIEIRPPKTAETNKINIWRKKELHGRHLHELEQTHIDLEASNKWLKLGYLFPETEGTMIAIQDQVINTKNYRKHIIKDPNIHNDSCRKCHRQPETIQHITSACPTLAQTDYTHRHNQVTYIIHQKLAIQHKLIPDKTTPYYQYNPKPVLESTRYKLYYDRAILTDKTIHNNRPDITLIDKHDKIVFLVDIAVPNSHNILRTITDKINKYTELKEEIQRIWKMNKVYIIPLVLSSTGVIPKHLLQSLKMLNITENTYMTMQKAAILNTCRIVRKFLQEDLNHQPFMENETHLA

SEQ ID NO: 20380 - protein, 1252 aa, Pyrgus malvae
MRLRGRLIPQAGTREGESRPGPSGSGSPLYSGVGNVSHITAQPCAVAVDKPNHNSSHLVVRKDCRINRTVDNLAADVSQATNVNQPATTKAGKPRVRMMWDDDINKFIIRTYLEITKLEADRTMYCKKLFDKFKIEYPHLNVSSQRIADQRRVIIRNKLLSDKVIEDIKKEISEKIEKEETIIQPSITHHNSTLNSNHLSSQEEPFTQSQTQKTFLIMTTDASTQTITPTSLHTAATDNPQSNKSFLNASSQDLIHQLETTLTLYSGTDPTVRPKLPKLRGNKKLYQLVDIFNKEVLAKFYSFDTDFTQLHTLIYCSALVISKNLGFKIKEDRPSQQKTKPVSPAWQTRIENDIKLLRADIGRITQFMMNNRSKKLVKRVEKIFEKAKTHSSHEKNNIRPIEYLDTLKQKLSLKSQRLARYKKSLQRKNDNKLFTNNEKVFYRTLSSNKAADKNYDLPNEDSLTNYWADLWKKQKDHNKTADWIEYEENRWNHIEEMEFTDVTREEIQIITNKTKNWKAAGIDGIYNFWYKKFHTLHEALARIVTDLLRGTADLPSFVTKGITYMLPKGKDTTNPSQYRPITCLPTIYKIITSCITHKINIHLTKHNILAEEQKGCRQHHKGCKEQLIIDSIILKHAQTHNRNINISYIDYRKAFDSVPHSWLLHVLQIYKINPTIVTFLKNAMTGWKTRLVLSNSNQLINTNEIPIENGIFQGDSFSPLWFCLALNPLSHLLNTENSGYRLDQNTEISHLLYMDDIKLFSKSNKALTRLLEITAQFSDDINMSFGFDKCRTLHIHKGKVININNENDTSETNFIQMDPVDSYKYLGILQSKNINHTEIKNNIFKVYSHRLNLICKKSLISRNLFKAINTYAIPVLTYTFGIIKWSRTDINKLEIMTRTTLTKYNNLHPKSAIERISIKRSKGGRGLVDLKVLWEGQIKNLRDFFENKSKTSKIHLAIVDSDKNFTPLNLHSKEIHIRSPETAETDKINTWRKKELHGRHLHDLEQPHIDLEASNKWLKLGSLFPETEGFMIAIQDQVINTKNYRKYILKDRNVQSDKCRKCHRQPETIQHITGACPTLAQTDYTHRHNQIANIIHQKIATKHNLIPNKTTPYYQYNLKPVLENTSHKLYYDRAILTDRTIHNNRPDITLINKQDKTVFLIDIAVPNTHNLHRTITEKINKYTDLKDEVFKMWKMNKVYIVPLVLSSTGVIPKHLIQSLKTQYHRKYLYHNSESGNIEHMSYCPKISTGRLK

SEQ ID NO: 20381 - protein, 1271 aa, Heliopetes ericetorum
MRLRGRQLPQAGTREGESRPGPSGSGSPSYSGVGNVSHITAQSCTVAVDSTPSYPADSREIRSNSRSNNPVADVSQVAKVNQPATTKAGKPRVRMMWDDDINIFIMRTYFEVTRVEADRTMYCQKLYEKFKVRYPQLNVSAQRVADQRRVIIRNKLLPDKIIQDLKNEISEKLKQEETLANVTQTSVTHLSPNQREDIPHSENLFSQNEPSTLSRKQTLSTPTSDATTQTFTCTSYSYPINTETLDTPLTSTLTQNLIQQLETTLTLYTGTDPTVRPKLPKLKESKRLYHLVEIFNKEILGRFYSINTDITELHTLIYCSAIVIGKNLGFKIKKEENRNNNKNVKKMLDSPAWKIRIENDIKQLRADIGRVTQYINNNRSKKVVRHVEKIFKITKVHSTYEKNNIRPEEYLDTLKQKLAVKSQRLARYKKSLQRKNDNKLFTNNEKAFYRSLCNETTDKKYDLPNPDDLKNYWTDIWRQQSDHNNEADWIKEEESRWGHLRDMECTHITGEDIELIVNKTKNWKAAGIDSIHNFWYKKFFVLHHTIARIITELINGTAELPGFITTGITYMLPKSSETTDPSQYRPITCLPTIYKIITSCIAHKINIHITQHNILAEEQKGCRRHHKGCKEQLIIDTTVLKHAQTHKKNIHISYIDYRKAFDSLPHSWLIRILQIYKICPTIVAFLQSTMREWKTRLILSNSSQAISTDEIPIKNGIFQGDSFSPLWFCLALNPLSHILNTQKCGYSLSKDTEISHLLYMDDIKLFSKSDKALGKLIHKTSQFSNDINMSFGLDKCRTLHIQKGKIIDSHCDNTNEHINFKRMEPMDTYKYLGIFQSNTVNHTQIKNKLKVEYSRRLNLICKKSLLSKNLFKAINTYAVPVLTYTFGIIKWSRTDIYNLEILTRTLLTKYNNLHPKSAIERISIKRHKGGRGFIDLKVLWENQLNNLRNFFYDKSETSKIHLAIVNSDKNCTPLNLKAKDIQIRSPKTAEEEKLDTWRRKELHGRHLHDLEQPHIDTDASNKWLKMGYLFPETEGFMIAIQDQVINTKNYRKYIIKDPNTKNDNCRKCHRQPETIQHITSACPTLTQTDYTHRHNQIANIIHQKLAIANKLMPNKTSPYYQYKPKPVLESTRHKLYYDRAILTDKTIHNNRPDITLIDKQDKIVFLIDIAVPNTHNLHRTITEKINKYTELKEEIIRIWKMNKVYIVPLVLSNTGVIPKHLLQSLNLLNINVTTYYTMQKAAILNTCRIVRKFLQEDLNNQSVIINETHLA

SEQ ID NO: 20382 - protein, 1274 aa, Apyrrothrix araxes
MRLRNRQIPQAGTREGESRPGPSGSGCPTYSGGGNVSHRIAQSRTVAANSSPSYVISDSSKSTSESRSSNRADNPAEDVSQAASANQPATTKAGKTRVRMRWDYDINLFIMRTYLEVTKLETDRTMYCKKLYDQFKVRYPHLKVSAQRIADQRRVIIRNKLLTDKVIEDLRKDISEQLNQDQTLSTITDTPSIHPPITHNSLSPQSSHLSNQNTLSTNPITEEILSTLTSDASTQTLTLHNTHCTANQSVDQTTKYTNFNIQNLLHQIDATLTLYMGTDPTARPKLPRLKESKKLYHLVDIFNKEILYKYYTIDTDITKLHTLIYCSALVISENLGYKIRRIQQINTNKNSKANTAAWQIRIENDIKELRASIGRVTQYINNNRSKKLLKHVEKIFKVTKVHSSHEKDNIRPEEYLDTLKQKLALKSQRLARYKKALKRKNDNSLFSNNEKAFYRTLRNNEPGRYFDLPNPQDLKNYWADLWKKHKDHNDRANWIRDEEIRWSHIEEMQFTDITEEDIAIITRQTKNWKAAGIDGVHNFWYKKFSVLHNILARIISDLIKGIVDLPQFVTKGITYMLPKNNDTTNPSQYRPITCLPTIYKIITSCITHKINNHVIEHNIIAEEQKGCRQQHRGCKEQLIIDSTVLKHAQVHNRNIHICYIDYKKAFDSVPHSWLIRILQIYKINPTIITFLECIMTEWKTRLILSNYAQSMTTDEISIGNGIFQGDSFSPLWFCLALNPLTHLLNSEKSGYKLTTETEICHLMYMDDIKLFSRSEIALNKLIVKTTQYSNDINMSFGLDKCRTLHIHKGKIKNIITDTDNNETNFARMETNDTYKYLGILQSKTINHTQIKKKLSEEYTRRLNLICKTSLYSKSLFKAINTFAIPVLTYSFGVIKWSQTDINQLEIKTRTTLTKYNNLHPKSAIERMSIKRLKGGRGLIDLKVLWEAQISNLRIFFYHKAETSNIHLATLELDNYFTPLNLKTKNIPIRSPRSAETDKIDTWRRKELHGRHLHDLEQPHIDLEASNKWLELGSLFPETEGFMIAIQDQVINTKNYRKYIIKDPHMQNDNCRKCHRQPETIQHIIGACPTLTQTDYTHRHNQVTHIIHQKLAIKHKLLPSYTTPYYQYSPKPVLESTRHKMYYDRAILTDKTIYNNRPDITLIDKRDKIVYLVDIAVPNTHNLHRAITDKINKYTELKEEILRIWKMNKVYIVPLVLSSTGVIPKHLLQSLKIIDIPDNTYITMQKASILNTCRIVRKFLLEDNLQHVEHEAHLA

SEQ ID NO: 20383 - protein, 1175 aa, Microceris iphinous
MKWDYDINLFIMRTYLEVTKLGTDRTMYCKKLYDQFKIRYPHLKVSAQRVADQRRVIIRNKLLTDKVIGDLRKDISEQLNQKQALPTITHTPSIHPPITHNSLSPQSSHLSSQNTFSTNPITEEILSTLTADASTQTLTLHNTHCTANQSLDQTTEYTHFNIQNILHQIDTTLTLYTGTDPTARPKLPRLKESKKLYHLVDIFNKEILYKYYTIDTDITKLHTLIYCSALVISENLGYKIRRIQQINTNKNSKANTAAWQIRIENDIKELRASIGRVTQYINNNRSKKLLKHVDKIFKATKVHSSHVKDNIRPEEYLDTLKQKLALKSQRLARYKKALQRKNDNSLFSNNEKAFYRTLRNNESGRYFDLPNPQDLKNYWADLWKKHKDHNDKANWIRDEEIRWSHIEEMQFTDITAEDIAIITRKTKNWKAAGIDGVHNFWYKKFSVLHNILARIITDLMKGVADLPQFVTKGITYMLPKNNDTTNPSQYRPLTCLPTIYKVITSCITHKINNHVIQHNIIAEEQKGCRQQHRGCKEQLIIDSTVLKHAQVHNRNIHICYIDYKKAFDSVPHSWLIRILQIYKINPTIITFLECIMTEWKTRLILSNSAQSITTEEISIGNGIFQGDSFSPLWFCLALNPLTHLLNSEKSGYKLTTETEICHLMYMDDIKLFSRSEIALNKLIVKTTQYSNDINMSFGLDKCRTLHIHKGKIKNIITDTDNSETNFARMKTNDTYKYLGILQSKTINHTQIKKKLSEEYTRRLNLICKTSLYSKNLFKAINTFAIPVLTYSFGVIKWSQTDINQLEIKTRTTLTKYNNLHPKSAIERISIKRLKGGRGLIDLKVLWEAQISNLRIFFYHKAETSNIHLATVELDNYFTPLNLKTKNIPIRSPRSAETDKIDSWRRKELHGRHLHDLEQAHIDLEASNKWLELGSLFPETEGFMIAIQDQVINTKNYRKYIIKDPHMQNDNCRKCHRQPETIQHIISACPTLTQTDYTHRHNQVTHIIHQKLAIKHKLLPSYTTPYYQYSPKPVLESIRHKMYYDRAILTDKTIYNNRPDITLIDKQDKIVYVIDIAVPNTHNLHRAITDKINTYTELKEEILRIWKMNKVYIVPLVLSSTGVIPKHLLQSLKIIDIPDNTYITMQKASILNTCRIVRKFLLEHSLQHAEHEAHLA

SEQ ID NO: 20384 - protein, 1251 aa, Hyalothyrus neleus
MRRSKRIKNMNTAQPKTVAETSPDITVHVSSPSSTQSLFQSPCSTPHTFENLSSRSSTASPMSAVVEQEITNAELLASDVARGANAFLPASTKAGKPRVRMKWDNDINLFIMRTYLKITNLETDRTMYGKKLFGQFKLKYPHINVSAQRIADQRRVIIRNKLLSDDVMNDLRKEILEQINPDTSIHPGISSHSDLGPTQDLSVTNPITDEILLTPTTDATTQTLTRANIHNTTIEIMDQPLTDINNQNLTHQLETTLTLYTGIDPTARPKLPRLKESRKLYQLVDIFNKEILGKFYSIDTDLTELHTLIYCSALVISKKLGYKFTENHQNHGNYNNKAYTPAWQIRIENDIKELRANIGRLTQYINNNRSKKLIKHISKIFKYTKVHSTHEKHNIRPEEYLDTLKQKLALKSQRLARYKKALQRKNDNRLFSNNEKEFYRSLRNEGTNKNYDLPKQNDLENYWTDIWKRKKEHNDSAGWIRDEENRWNHIDEMEFADITEKDIEIITRKTRNWKAAGIDGIHNFWFKKLTILHDILARIISDVLKGVAILPKFVTKGITYMLPKSNDTSNPSEYRPITCLPTIYKIITSCITHKINTHLIKYNIIAEEQKGCRQYHRGCKEQLIIDCTVLKHAQTNNRNLHISYIDYKKAFDSIPHSWLIRTLRIYKINSTIINFLKTTMSEWKTRLILTNSDQSITTGEIPIENGIFQGDSFSPLWFCLALNPLSFLLNSENNGYKLTKETEISHLMYMDDLKLFSKSEKALRKLIVITEQFSTDINMSFGLDKCRILHTHKGKIIDTKDASDNDITNFARMETTDTYKYLGIIQSNAINHTLLKKKLSEEYTRRLNLICKKSLFSKNLFKAINTYAIPVLTYSFGIIKWSPTDINQLQIKTRTTLTKYNNLHPKSAIERISIKRMKGGRGLVDLNVLWKGQISNLRNFFYNKAETSSVHLATSMSDKNFTPLNLINRDIQIVSPKTAETDKIDTWRRKELHGRHLHDLEQAHVDLEASNKWLNLGTLFPETEGFIIAIQDQVINTKNYRKYIIKDPNTQNDSCRKCHKQSETIQHITSACSTLTQTDYLHRHNQITHIIHQKLAIKHKLIPSKTTPYYQYNPKSVLETTRHKLYYDRAILTDKTIHNNRPDITLIDKQDKIVFLIDIAVPNTHNLHKTISEKINKYTELKEEILRIWKMNKVYIVPLVLSSTGVIPKHLLQSLKVIDIPENTYITMQKAAILNTCRIVRKFLQEELNNP

SEQ ID NO: 20385 - protein, 1294 aa, Ennomos quercinarius
METRQRKLRIGPLPEGDRRGTSVAGRGRDSMLASGSRTDGCTGVGDAGGRGMSSRITADIIDGHDSCSNCSSAVTLAEDVSQEAHATHSATTKAGKPRVRMKWSDDINLFIMRTYFYITKLETDRTMYCKKLHDQFTLKYPDLNVSAQRIADQRRVIIRNKLLSDETITDIKKEVSRQLEQEENENSIPNTAHIFSLTSTTEDTIEPRNIQLHITPGTSSLTWQASTTQMPTTQEIAHASTQTSTFPSIASLTQQTEQEQNLEVTAIDTQELIDQLETAIAQFEGTDPASRPKLPRLKENKKLYGFVDVFNKRILGRYYTLDTDIHYIHTLIYCSALVISENLGYKIRHHTTSPQTSKPKLQKPCWQIRIEKDIKNLRADIGRLTQYINNNRSRKVVLAVEEIFKKTKAHSSHENNNSRPEEYLDTLKQKLALKSQRLNRYLKALQRKEDNKLFIKNEKGFYRNLRNHHSPSSSTNSELSKYEVPQPDELKNYWADIWKNQGDHDDQAEWISDEERRWENIELMEFSEITIDDIQAVTKKMKNWKAAGIDSLHNFWYKKFFVMHNILAKVITDVIKGQVEIPKFITKSITYMLPKSNDTVNPSQYRPITCLPTIYKLITSCISNRINSHLEFHNILSEEQKGCRRNHKGCKEQLVIDTSILKHANTKKRNLHITYIDYKKAFDSVPHSWLLRVLKIYKINTHIIDFLRSAMIEWRTSLHLSNNSTSISTDEIPIENGIFQGDALSPLWFCLALNPLSNILNSSNNGYRLTSSTSITHLMYMDDIKLFAKTKKDLKHLIDLTAQYSTQIKMTFGLEKCRTLNISKGKIEASTHNTQDTDSDTIFTVMNPTDTYKYLGIHQSNTINHTEIKNNLTTEYTRRLNKICKTQLNSKNLFKAINTYAIPVLTYSFGVVKWTATDINHLEIKTRTTLTKNNYSHPKSAIERMTVKREKGGRGLVDLKILWENQVKNLREFFYEKSNISHIHKAIVELDNKYTPLNLTQKDIQYKTAKDQEIEKIDRWRKKELHGRHIHDLEQAHIDMESSNKWLKLGSLFTETEGFMIAIQDQVINTKNYKKFIIRDPNIVNDKCRKCHRQSETIQHITSACPTLAQTDYTHRHNQVAHIVHQKLSIKHKLIEGTPKPYYQYTPKPVLESSTHKIYFDRAILTDKTIHNNRPDITIIDKINKLVYLIDIAVPNTHNLQKTITEKIHKYTDLKEEIVRIWKMKKVYIVPLVLSSTGVIPKYLHHGIGLLDLPKNIYITMQKAAILNTCRIVRKFLQEETSTEYNPENGLHLA

SEQ ID NO: 20386 - protein, 1273 aa, Hemaris fuciformis
METRNRKVRIGPLPEGDRRGTSVAGDGRDSMLASDSRLDGWVGVGDAGGRGMSSRITANALGRQQIDSNCTAAGTLAEDVSQEAQPTQPATTKAGKPRVRMKWSDDINIFIMRTYYYTTKLETDRTMYCKKLHDQFLIKFPHLNVSAQRIADQRRVIVRNKLLSDEVIENIKKEVSEKLDLEIRENTQIIDHNFSQNAESSHINSPEIINSPEPSSPDQPQISTLANTPGHIHTSTQTDMLPSISSITQGTEQETNHIQNIDISTQELIDQLETILTQYEGMDPTSRPKLPRLKENNKLYGLVDIFNKHILRKYFTIESDINRIHTLIYCSAFVISENLGYKIRNNNSSQHIRKSDLNKPPWQVRIEKDIKQLRVDIGRLTQYIKNNKSKKVIKAAKEILNKTRVHSSHENNNVRPVEHLDTLKQKLALKSQRLKRYLKSLKRKEDNKLFTNNEKEFYRKMRSDGKPIPDGIPETDDLKNYWAEIWKKQDGHNDQAEWIHEEVKRWENIEQMEAVELTADDIEAVTRKIKNWKAAGADGIHNFWFKKLSVLHNILAKNITDLINIQLELPKFITKGVTYMIPKSNKTSDPSQYRPITCLPTLYKLITACISSKITHHVESNNILAEEQKGCRKNHQGCKEQLIIDMTVLKHANTKKRNLHITYIDYRKAFDSIPHSWLLRVLKIYKINPQIIEFLKHAMASWRTSLRLSNTSCSISTDEIPIANGIFQGDALSPLWFCLALNPLSHLLNSGNNGYKLTPDTSLTHLMYMDDIKLFAKTKKDLQNLIDLTTLFSKDEKMSFGIDKCRTLNIIKGKIETTPNINLDTDHHTFAIMDPTETYKYLGIHQSNIINHIKIKQNLVTEYIRRLSKICKTQLHSKNLFKAINTFAIPVLTYSFGIIKWTATDINKLEIKTRTTLTKHNYLHPKSAIERMTIKRERGGRGLIDLKLLCDNQIQNLRHFFHKKADSSCIHKAIVDLDNNFTPLHLNNRDLYIKPAQLQEIEKTDKWRKKELHGRHLHDLEQSHIDIESSNKWLKLGSLFPETEGFLIAIQDQVINTKNFRKFIIKDPILQNDKCRKCHRLPETIQHITSACPALTQTDYTHRHNQVANIIHQKLAIKYKLSEDTTKPYYQYVPKPVLESASHKIYFDRAILTDKTIHNNRPDITLIDKINKIVHIIDIAIPNSHNIQKTITEKIHKYTELKEEIIRIWKMNKVYIVPLVISSTGIIPKYLHHSISLLDLPKNTFMTMQKAAILNTCRIVRKFLQEETREINT

SEQ ID NO: 20387 - protein, 1199 aa, Salatis canalis
METRSKKKRKESLPGGDRRGTPGADAGCHSMRSVSGEELSRRAPTGSSENATADNCDETDRLTDNNSPYSPSTISYTPSISSSPSTVSDPPIPILDVARKASAFLPASTKAGKPRVRMSWSKDVNIFIMRTYYQITKVETDMTTYRKQLHELFSRQYPDISVTEQRISDQRRTIIRNKLLPEVLLEKLKEEVRRQMQNDTNEEQTRALSPITHTYPPNMLHSNQIQSQAFTQHTSQFHILATQTNTHTSYTHSHASTQTSTLPNVISLTQVTEKTLDSEYTPIDISTQELINQVEATLAQYAGTDATVRPKLPKLREDKKLYSLIETFNKHILNRFHTIDSDLISIHTLIYCSALVICENLGCKIRTTNPNNQVKKRKPEKPEWQIRIESDIKKLRADIGRLTQYMNNNRSRKVVAAVESIFKRNKLHTVHERNNIKPEEYLDTLKQKLRLKSQRLARYVKALQRKEDNKLFKANEKGFYRSVKNVKVDIHNNRDKEMPKENELKNYWTELWKKQRDHNHSAEWIGKEESKFENITVMELSDITREDIELVTRRMKNWKAAGIDHIHNFWYKKFHVLHNILAKNITELIKGEQLLPKFITKGITFMLPKSSDTTDPSQYRPITCLPTIYKLITSLITRNITKHLEHNNILSEEQKGCRQRHRGCKEQLIIDSIVLKHANTHKRNLHISYIDYKKAFDSVPHSWLIQVLKLYKINPVLINFLENTMSDWRTTLYLSNGTSTITTHEIPIESGIFQGDSLSPLWFCLALNPLSSLLNSTKSGYKLNNISSISHLLYVDDIKLYARTDKELNNLIHITTQYSQDINMSFGLDKCRILHIRKGKIAHTSNLDEINAFEQMELTESYKYLGFFQSNTINHQQIKKDLSLEYARRLNLLCKRQLYSKNLFKAINTFAIPVLTYSFGVIKWTQTDINNLEIKCRTSLTKHNYLHPKSAIERISIKRNRGGRGLIDLKLLWEGQVQNLRNFFYNKSTTSNLHSDIIKLDNNYTPLNLNNKNIQFNSQETYTTNKINRWRSKELHGRHLHDLELTHVDLEASNKWLKLGYLFPETEGFMIAVQDQVINTKNYKKIILKDPQIHNDKCRKCHRVSETIQHITSACPNLAQSDYTHRHNQIVYIVHQKLAIKYNLLQPSKAVPYYKYLPKPVLESQTHKIYFDREILTDKTKNPNRPTSPLFKSKREYLI

SEQ ID NO: 20388 - protein, 1268 aa, Heliothis virescens
METRNRRLRIGPLPEGDRRGTSVAGVGRDSMLASDSQLDGWAGVGDAGGRGMSSRTTADGIDEQSSSNRAVTPAEDVSQEALATQPVTTKAGKPRVRMKWSEEINLFIMRTYFYITRLESDRTMYCKKLHDQFVLRYPELNVSAQRIADQRRVILRNKLLSDEVINQLKIDVSDQLDREERDNLALNTITLVPQPDNEQALTPTTNTQHSSPTQHAIINTQSTLTQSHASTQTNSPSIHTSTQQIDRQNVVINSDINTQELINALETALTQFQGTDPTVRPKLPRLKENKLLYSYVEIFNAEILGQYYSVDSDINTIHTLIYCSALVISEKLGYKVRNINQNRKYNKIHKPNWQIRIEIDIKKLRVDIARLTQYIKGNRSNKLVKKVQLIFNTFKIHSSHEKDNVRPEEFLDTLKQKLALKSQRLARYSKALNRKEDNKLFANNEKGFYRTLRTDSVLTPTEIPRLDELTNYWASIWKNQGEHNDQAEWIKTEENRFKDIGDMEFIDITVDEIEGIVKKTKNWKAAGVDSVYNFWYKKFFTLHEILAKNISDLISGRQELPTFVTKGITYMLPKSTNTIDPSQYRPITCLPTIYKLITSCITRKINSHVTHHNILAEEQKGCRQNHKGCKEQLTIDAVVLKQANSNKRNLHITYIDYKKAFDSVPHSWLLKILQIYKINPTIINFLKRAMSSWRTTLHLSNNNSTVVTEEIPIQNGIFQGDSLSPLWFCLALNPLSQLLNNTDAGYKITDNTTITHLLYMDDIKIFSKSELELQTLINITTEFSKDIKMQFGLDKCRTLHIHKGKIRNTSITTTEPTFTEMDPSDSYKYLGIQQSNIINHIQIKNKLTAEFNRRLNLICKRQLYSKNLFKAINTFAIPVFTYSFGVIKWTKTDISKLEIKIRTTLTKHNYLHPKSAIERISVKRQNGGRGLIDLKVLWDRQLQNLRKFFYDKSRNSKIHEAVATIDTNYTPLNLNDRDIQFTSQLDHENIKIGRWKAKELHGRHIHDLEQTHVDSEASNKWLKIGSLFPETEGFMIAIQDQVINTRNYRKFILKDPNIQNDKCRKCHRQSETIQHITSACPTLTQTDYTHRHNQVAHIVHQQLAIKHKLLSGPLIPYYQYTPKPVLESPTHKIYFDRAILTDKTVHNNRPDITLIQKNDKIVYLIDIAVPNTHNVQKTITEKIHKYTELKEEIIRIWKMNKVYIVPLVLSSTGVIPKYLHHGLQLLNLPKHIYITMQKAAVLNTCRIVRKFLQEDNTDQHTQPEIHLA

SEQ ID NO: 20389 - protein, 817 aa, Hyles vespertilio
MNITSDGAPQSHELKNYWAEIWNSQGDHNESAAWIHDEENKWENINQMEFSEFTIDDIVEATKKMKNWKAAGVDSVHNFWYKKFSMLHDILAKNITDIIKGQQESPTFITKGITYMIPKSKNTSNPSQYRPITCLPTLYKLITACLTNKINNHVQYHQILAEEQKGCKIGHKGCKEQLIIDMTVLKHANSKKQNLHVTCIDYQKAFDSVPHSWLLRVLKIYKINPYIIDFLKNAMTNWRTSLYLANASVSSITTDEIPIENGIFQGDALSPLWFCLALNPLSNLLNKTTNGYKLTADTSITHLMYMDDIKLFAKSKKDLKNLIRLTTQFSTDINMSFGLDKCRTLNIKKGKIETPINNLDTDEDNTIFEIMDSADTYKYLGIHQSNTINHIKIKHNVTNEYNFRINRICKTQLHSKNLFKAINTYAIPVLTYSFGVIKWTATDIKKLQIKTRTILTKHNYWHPKSATERMTVKRDIGGRGLIDLKILWENQVRNLREFFYSKSNGSNIHKAVVELDNKFTPLNLNARDVQFKSAKLQELEKTDRWRNKQLHGRHIHDLEQSHIDIESSNKWLKLGSLFPETEGFMIAIQDQVINTKNYRKCILKDPNIQNDKCRKCYRQSETIQHITSACPSLTQTDYTHRHNQVVNIIHQKLSIKYKLLVDKPKPYYQYTPKPVLESATHKIYFDRAILTDKTIHHNRPDITVIDKINKVVFLIDIAVPNTHNLQKTITEKIHKYTELKEEVMRIWKMNKVYIVPLVLSSTGIIPKYLLHSIKLLDLPKSIFITMQKAVILNTCRSVRKFLQEPTEINIETESHLA

SEQ ID NO: 20390 - protein, 1268 aa, Spodoptera frugiperda
METRNRRLRLGPLPEGRRGTSVAGVRRDSMLASDSRLDGWAGVGDAGGRGMSSRTTADLSDSNSSSSRAVTPAEDVSQEALATQPATTKAGKPRVRMKWSEEINLFIMRTYYYITRLETDRTMYCKKLHDRFVLEYPQLNVSAQRIADQRRVILRNKLLSDETIEKIKTEVANQLAEDEERNDLNTLTLNSLTQPCIDQLNSQVIQTTITSLHTSPNLDSSITIQPSHTQSHASTQTNYSNIPIDIQNLEENYDTNIQELLNALESALANYTGSDPTARPKLPRLKENKTLYKYVEIFNKHILGKYTSIESDINTIHTLIYCSALVITEKLGYNIIRNNGNSRKYKKLSKPSWQIRIESDIKKLRADIGRLMQYINGNRSYRLVERVEEIFNKTKKHSSHERENIRPEEFLDTLKQKLSLKSQRLARYTKALQRKEDNKLFANNEKSFYRTFREASTHHPTNNIPAENDLKDYWSKIWKNQGDHNDDAPWIYAEEDRISNIGPMEFKEITIEDIQYTTKRMKNWKAAGIDGVHNFWYKKFICLHSIFARFITDLITGQQQPPTFITKGITYMLPKSDDTSNPSQYRPITCLPTIYKLITSCITLRINKHITAHNLLSEEQKGCRQNHKGCKEQLTIDATVLKQAQINKRNLHIAYIDYKKAFDSVPHSWLIKVLQIYKIHPNIITFLQNTMSDWRTTLYLSTNNTTIKTDEIPIQNGIFQGDSLSPLWFCLALNPLSYLLNNTNSGYKLTTNTSLTHLLYMDDIKIFAKTQNDLQNLINITTTFSNDIKMEFGLDKCRTIHIQRGQIKTSSTIESNTFTEMEPSDTYKYLGILQSNIINHIQIKNKLIAEFTRRLNLICKKQLYSKNLIKAINTFAIPVLTYTFGIIKWTKTDINKLEIKIRTTLTKNNYLHPKSAIERMTVKRQNGGRGLVDLQLLWEQQVQSLRNFFYGKANSSKIHEAIINTDKNFTPLNLQNKEIQFKSIGDHQKIKLDRWRAKELHGRHIHDLEQPHIDFDASNKWLKLGSLFPETEGFMIAIQDQVINTKNYRKYILKDPNTQNDKCRKCHRQSETIQHITSACPTLTQTDYTHRHNQVAHIIHQHLATKHQLLTEPPKPYYQYIPKPVLESTNHKLYFDRAILTDKTVHNNRPDITLIDKVNRIVYIADIAIPNTHNLQKTITEKIHKYTELKEEILRIWRMNKVYIVPLVLSSTGVIPKYLHHGINLIDLPKNIYITMQKAAILNTCRIVRKFLQEDAVENESHHEVHLV

SEQ ID NO: 20391 - protein, 1277 aa, Grais stigmaticus
MRRSNRLKNKLKNKYFAQPEAVAETTPDFENINPIEPYSPSTISYTPSVSTSPSTNSSSDYQDNLLINPAEDVSQEAPANQPATTKAGKPRVRMQWNDDINTFIMRTYFYVTKLETDRTMYCKKLHDQFTLKYPHLKVSAQRIADQRRVILRNKMLSDDVMNNLRQEVAEQLKGEDIANSPLHVSDTITFSPHTEENTIQAIPSTHVTPTPDIFLPSTQQELLTLTHVSTQTCETPNIVSITQETESTQKYETSTLDIPLQQIIDQLETTLVQYSGMDPTVRPKLPKLKENKKLYELVDIFNKKILGNFYSIDSDINFIHTLIYCSAFVICENLGYKIRTQNSSTQRIHTPRKPAWQIRIEADIKKLRADIGRLTQYIVNNNRSRKVVAAVENIFRKTKVHTIHERNNIRPEEYLDTLKQKLILKSQRLARYLKALHRKDDNKMFAVNEKSFYRKLKDNSTQKNRNNELPQANELKNYWTNLWKKDKDHNDSAEWIVSEKNRMLEMETMEFSNINREDIEIITRRMKNWKAAGIDGIHNFWYKKFSPLHNILAKNITEIIKGEQDLPNFVTKGITYMLPKSNDTVNPSQYRPITCLPTIYKLITSLITHKINKHLTHNNILSEEQKGCRQNHKGCKEQLVIDTTILKHAHTQKRNLHISYIDYKKAFDSVPHSWLIQILHIYKINPVIINFLENAISKWRTTLYLSNGTDVITTDEIPIGNGIFQGDSLSPLWFCLALNPLSNLLNTSSSGYKLNNSTSITHLMYMDDIKLFAKTDKDLKNLIEITTQYSRDINMSFGLDKCRTLHIHQGKFKNHINNNIDEPNTFVSMDPSDSYKYLGIHQSNIVNHIKLKKDLTSEYIRRIKLICKTQLYSKNLFKAINTFAIPVLTYSFGVVKWTRTNINNLEIKTRTTLTKFNYLHPKSAIERISVERHKGGRGLIDLTLLWESQIQNLRDFFYSKSETSIIHSSIIKLDNNFTPLNLKNTNIVHKLAKDHVDNKINRWRSKELHGRHLHDLEQPHVDAISSNQWLKLGSLFPETEGFMIAIQDQVINTKNYKKIILKDPNTQNDKCRKCHRASETIQHITGACPNLAQNDYTHRHNQVAHIVHQKLAIKHKLITQKAVPYYQYVPKPVLEGRSHKIYFDRAILTDKTIHNNRPDITMIDKINKYTYLIDIAIPNTHNLQKTITEKIHKYTELKEEIIRIWKMKKVYIVPLVLSSTGIIPKHLHHYLKQIDLPTNLFKTMQKAAILNTCRLVRKFLQEDIPSESTPSNELHLA

SEQ ID NO: 20392 - protein, 1293 aa, Mimia chiapaensis
MRRSNRIKNKNSAQPEVVAEMTPNMMPYTASSVSPHTLYQFSKLLNIDTCTNDEIDGQTNRTTSPIEPVSPSTISYIPSVSSSPSTIVNSDHEEIHTQDNNTFKLAEDVSQQAHATQPATTKAGKTRVRMQWNDEINTFIIRTYFYVTKLETNRTMYCKKLHDEFTLQYPHLNVSAQRVADQRRAILRNKMLSDDIINDLKEEVAKQISREEITNSPLQVSEILLITQKSTPNTCATSRTYVPPASTQESITQTHDPTQPSATPNIVNDAQKTQSTINNVLITLNTTTQQLIEQLETTLSQYTGVDPIARPKLPRVKENRKLYGYIDIFNKQVLGNFFSADSDIISIHTLIYCSALVICENLGYKIRTQNLGSLNIHTLKKPAWQNRIETDIKKLRVDIGRLTQYITKNNRSKKVVATVENIFRNNKLHSKHERNNVRPEEYLDTLKQKLRLKSQRLARYLKALQRQNDNKTFVKNEKGFYRILQNNSAQIHKNRKMPQSNELKNYWANLWRKQTDHNNSADWVVAEEKRMLNVETMKFTTITGLDIELTTRRMKNWKAAGIDGIHNFWYKKFCTLHNVLANNINRLINGEQKLPNFVTKGITYMLPKGDDTGNPSQYRPITCLPTIYKLITSLITHIINKHLNHNNILSEEQKGCRKNHKGCKEQLVIDTTILKHAHTHKRNLHISYIDYKKAFDSVPHSWLIRVLHIYKINPNIINFLECAMSNWKTTLYLSNGTDTITTDEIPIGNGIFQGDSLSPLWFCLALNPLSNLLNTSLSGYKLNTSTSITHLMYMDDIKIFARTDKCLKKLEELTAQYSRDINMMFGLDKCRTLHIHQGRIKSNSNNINEPNTFVPLESSESYKYLGIEQSNTINHTKIKKDLTSEFVRRLNLICKKHLYSKNLFKAINTFAIPVLTYSFGVVKWTRTDINKLEIKVRTTLTKHNCLHPKSAIERISIKRNKGGRGLIDLTVLWEGQIQNLRDFFYSKSTTSAIHSSIIQLDNNFTPLNLYNKNLTFKSSQIHFDEKIGKWRSKELHGRHLHDLEQPHVDAESSNQWLKSGSLFPETEGFMIAIQDQVINTKNYKKIILKDPNTQNDKCRKCHRASETIQHITSACPNLAQTDYTHRHNQITHIVHQTLAIKHKLITDTIPYYQYVPKPVLEHQSHKIYYDRAILTDKTVHYNRPDITMIDKINKTTYLIDIAVPNTHNLQKTITDKINKYTELKEEVTRIWKMDKVFIVPLVLSSTGIIPKHLHHYLKQIDLPKYIYITMQKAAILNTCRIVRKFLQEDIISD

SEQ ID NO: 20393 - protein, 1342 aa, Deilephila porcellus
MEQNKKIVSLWSLPGGDRRGTSGADAGRYSMQAIGGEGNGRPSAGEPEQCEPNRRYNLRSLSRSQRTPAGTARRMTSIQDGGVTRLTPIEEWSQGSRTNMAEEFAEAISSSSSLSSPSSLFPSVPSSPPSYLSFNTNGSSFSPSSPESSVYSTVLRRQPEQVTHTRVTRSSSRAATPAEDVSQEALATQPATTKAGKPRVRMKWDSEINTFIMRTYLYVTKLETDKTMYCKKLYDKFKIQYPHIDVSSQRIADQRRVIIRNKLLSDAQIASLKQEVSEILRLEENNHISEPMSSPPLVEDSTETHTLDPSHLSETDTIRHTGTTVDSNQVQQLIDEFRSALTLYSGIDPSTRPKLPRLRENKKLYQLVHVFNCQILNKFFTLESNLVHLHTIIYCSAVVISTKLGYKIYPDASNKSKRQPNKPQWQIRLEKDITNLRADIGRLTQYINNNRHTSLVKKVNLIFEKYKVHSSHEAYNNKPAEFLDTLKQKLTLKSQRLARYKKALQRKNDNKIFKFNEKSFYRNLKNNPNNVNSDSSTPDKKDLKEYWSGIWKKGKDHNELAEWIKTEEFKSEIIEDMEFTDIDKVDIELITRRIKNWKAAGIDGVHNFWYKKFSVLHEILAKIITGIIRGTEELPNFVTKGITYMLPKSENTSDPSQYRPITCLPTIYKLITSCITLRINDHLIRYSVIAEEQKGCRQNHKGCKEQLIIDSTILKHATSHSRNLYLAYIDYKKAFDSVPHSWLIRVLQIYKINPVIITFLKAAMGKWRTTIFLSSNDTTITTDEIPIENGIFQGDSLSPLWFCLALNPLSSLLNNSNFGYKLTPNIAVSHLMYMDDIKLFAKSKKEIITLIETTAKFSEDINMSFGLDKCKRLNIQKGKIVGNSSEPARESCFDLMEENETYKYLGLREGKNINHIQIKKELRKEYYTRVNQICKKPLFSKNLFKALNTYAIPVLTYSFGIVKWSKTDIKKLEMKTRSTLTKHNFLHPKSAIERMTIERSKGGRGLIDLNNLWVGQIQKLRNFFYEKSNTSKIHLATIETDNNYTPLNLVNKTAQFATPNENLNNKLERWRSKEMHGRHIQDLEQPHVDIQASNKWLKFGSLFPETEGFMVAIQDQVINTRNYRKFILKDRTMQNDKCRKCHRMPETIQHIISACSNLTQTDYTHRHNQVAHIIHQKLALKHKLIPEKPVPYYQYSPMPVLESTSHRMYFDRAILTDKTIHNNRPDVTLIDKIGKIAYLIDIAVPNTHNLQKTVTEKINKYTELKEEILRIWKLNKVYIVPLVLSCTGVIPKCLHHYLRIIDIPENIYITMQKAAILNTCRIVRKFLQDDTNTPFQHDSHLA

SEQ ID NO: 20394 - protein, 1342 aa, Deilephila porcellus
MEQNKKIVSLWSLPGGDRRGTSGADAGRYSMQAIGGEGNGRPSAGEPEQCEPNRRYNLRSLSRSQSTPAGTARRMTSIQDGGVTRLAPTEEWSQGSRTNMVEEFAEAISSSSSLSSPSSLFPSVPSSPPSYLSFNSNGSSFSPSSPESSVYSTVLRRQPEQVTNTRVTRSSSRAATPAEDVSQEALATQPATTKAGKPRVRMKWDSEINTFIMRTYLYVTKLETDKTMYCKKLYDKFKIQYPHIDVSSQRIADQRRVIIRNKLLSDAQIASLKQEVSEILRLEENNDITEPMSSPPLVEDSTETHTLDPSHLSETDTIRHTGTTVDSNQVQQLIDEFRSALTLYSGIDPSTRPKLPRLRENKKLYQLVHVFNCQILSKFFSLESNLVHLHTIIYCSAVVISTKLGYKISPDASNKSKRQPNKPQWQIRLEKDITNLRADIGRLTQYINNNRHTSLVKKVNLIFEKYKVHSSHEAYNNKPAEFLDTLKQKLTLKSQRLARYKKALQRKNDNKIFKFNEKSFYRNLKNNPNNVNSDSSTPDKKDLKEYWSRIWKKGKDHNELAEWIKTEEFKSDIIDDMEFTDIDKVDIELITRRIKNWKAAGIDGVHNFWYKKFSVLHEILAKIITGIIRGTEELPNFVTKGITYMLPKSENTSDPSQYRPITCLPTIYKLITSCITLRINDHLIRYSVIAEEQKGCRQNHKGCKEQLIIDSTILKHATSHSRNLYLAYIDYKKAFDSVPHSWLIRVLQIYKINPVIITFLKAAMGKWRTTIFLSSNDTTITTDEIPIENGIFQGDSLSPLWFCLALNPLSSLLNNSNFGYKLTSNIAVSHLMYMDDIKLFAKSKKEIITLIETTAKFSEDISMSFGLDKCKRLNIQKGKIVGNSSEPARESYFDLMEENDTYKYLGLHEGKNINHIQIKKELRKEYYTRVNQICKKPLFSKNLFKALNTYAIPVLTYSFGIVKWSKTDIKKLEMKTRSTLTKHNFLHPKSAIERMTIERSKGGRGLIDLNNLWVGQIQKLRNFFYEKSNTSKIHLATIETDKNYTPLNLVNKTAQFATPNENLNNKLERWRSKEMHGRHIQDLEQPHVDIQASNKWLKFGSLFPETEGFMVAIQDQVINTRNYRKFILKDRTMQNDKCRKCHRMPETIQHIISACSNLTQTDYTHRHNQVAHIIHQKLALKHKLIPEKPVPYYQYSPMPVLESASHRMYFDRAILTDKTIHNNRPDVTLIDKIGKIAYLIDIAVPNTHNLQKTVTEKINKYTELKEEILRIWKLNKVYIVPLVLSCTGVIPKCLHHYLRIINIPENIYITMQKAAILNTCRIVRKFLQDDTNTPFQHDSHLA

SEQ ID NO: 20395 - protein, 1429 aa, Deilephila porcellus
MYKLLLSEFLPIHSSSQTARRGSKKLRSKKILHFRPFGPKNIYNNNNNKPLKAQPCVRADHLSHVRGGHSQRIYLASDKKGNGKPINMEQNKKIVSLWSLPGGDRRGTSGADAGRYSMQAIGGEGNGRPSAGEPEQCEPNRRYNLRSLSRSQSTPAGTARRMTSIQDGGVTRLAPIEEWSQGSRTNMAEEFAEAISSSSSLSSPSSLFPSVPSSPPSYLSFNTNGSSFSPSSPESSVYSTVFRRQPEQVTHTRVTRSSSRAATPAEDVSQEALATQPATTKAGKPRVRMKWDSEINTFIMRTYLYVTKLETDKTMYCKKLYDKFKIQYPHIDVSSQRIADQRRVIIRNKLLSDAQIASLKQEVSEILRLEENNDVSEPMSSPPLLEDSTETHTLDPSHLSETDTIRHTGTTVDSNQVQQLIDEFRSALTLYSGSDPSTRPKLPRLRENKKLYQLVHVFNCQILNKFFTLESNLVHLHTIIYCSAVVISTKLGYKISPDASNKSKRQPNKPQWQIRLEKDITNLRADIGRLTQYINNNRHTSLVKKVNLIFEKYKVHSSHEAYNNKPAEFLDTLKQKLTLKSQRLARYKKALQRKNDNKIFKFNEKSFYRNLKNNPNNVNSDSSTPDKKDLKEYWSGIWKKGKDHNELAEWIKTEEFKSEIIEDMEFTDIDKVDIELITRRIKNWKAAGIDGVHNFWYKKFSVLHEILAKIITGIIRGTEELPNFVTKGITYMLPKSENTSDPSQYRPITCLPTIYKLITSCITLRINDHLIRYSVIAEEQKGCRQNHKGCKEQLIIDSTILKHATSHSRNLYLAYIDYKKAFDSVPHSWLIRVLQIYKINPVIITFLKAAMGKWRTTIFLSSNDTTITTDEIPIENGIFQGDSLSPLWFCLALNPLSSLLNNSNFGYKLTPNIAVSHLMYMDDIKLFAKSKKEIITLIETTAKFSEDINMSFGLDKCKRLNIQKGKIVGNSSEPARESYFDLMEENDTYKYLGLREGKNINHIQIKKELRKEYYTRVNQICKKPLFSKNLFKALNTYAIPVLTYSFGIVKWSKTDIKKLEMKTRSTLTKHNFLHPKSAIERMTIERSKGGRGLIDLNNLWVGQIQKLRNFFYEKSNTSKIHLATIETDKNYTPLNLVNKTAQFATPNENLNNKLERWRSKEMHGRHIQDLEQPHVDIQASNKWLKFGSLFPETEGFMVAIQDQVINTRNYRKFILKDRTMQNDKCRKCHRMPETIQHIISACSNLTQTDYTHRHNQVAHIIHQKLALKHKLIPEKPVPYYQYSPMPVLESTSHRMYFDRAILTDKTIHNNRPDVTLIDKIGKIAYLIDIAVPNTHNLQKTVTEKINKYTELKEEILRIWKLNKVYIVPLVLSCTGVIPKCLHHYLRIIDIPENIYITMQKAAILNTCRIVRKFLQDDTNTPFQHDSHLA

SEQ ID NO: 20396 - protein, 1271 aa, Eantis tosta
MRRSIRIKNLKNKTSAQLNTVAEISPDRIHRIPSPIEPYSPSTISYTPSVPTSPSTLNNSDHSDNTQMHSSRVTTVAADVSQKAHATQPATTKAGKPRVRMQWNDDINTFIMRTYFYVTKLETDRTMYCKKLHEQFTLKYPHLKVSAQRIADQRRVILKNKMLADDVIKNLKQEIMEQLRREEIVHSQSQEMPLSPNQENAFQASLNINNTPIPHISLASIVQKLPTQSHVSTQTGEIPNMLITHQTDRTQNTESITLQISTQEITDQLETTLAQYTGLDPTIRPKLPRLKENKKLYMLIDIFNKQILDKFFSVDSDINTIHTLIYCSALVICEILGYKIRTQTQLKSHSRTQHTNTTKKPAWQVRIEADIHLLRTDIGRLTQYIVKNNRSRKVVAAVENIFKKTKVHTIHERNNVRPEEYLDTLKQKLKLKSQRLARYKKALHRKEDNKTFNTNEKEFYRTLKNDKEQINKNFELPQSNELKSYWTDLWRKQSDHNSNAEWIGHEESRMLKVENMEFSCFNKEDIEITTSKMKNWKAAGVDKIHNFWFKKFSALHNILAKNITEIIKGEQELPNFITKGITFMLPKSSNTTDPSQYRPITCLPTIYKLITSLITFSITKHVTHNSILSEEQKGCRQNHKGCKEQLIIDSTILKHAHVKKRHLHISYIDYKKAFDSVPHSWLIQVLQIYKIHPNLINFLKNVMSKWRTILYLSNGMDAISTDEIPINNGIFQGDSLSPLWFCLALNPLSYLLNSSTSGYALNSNTSLTHLMYMDDIKLFSKSEKDLKMLIEIVSQYSSDIKMTFGLDKCRTLHIRQGNIKNNYLDEVSPFEVMEPFDTYKYLGIYQSNTINHIKIKKDLSSEYIRRINLICKRQLYSKNLFKAINTFAIPILTYSFGIVKWTRTDINNLEIKTRTTLTKYNYLHPKSAIERISVKRHKGGRGLIDITLLWEGQIQNLRDFFYSKSTTSPLHSSIIQLDNNFTPLHLNNRTLVFKPPKDYLKEKTDKWRTKELHGRHLHDLEQTHVDTLCSNKWLKLGSLFPETEGFMIAIQDQVINTKNYKKIILKDPNTQNDKCRKCHRVPETIQHITSACPNLAQTDYLHRHNQIAHIVHQKLAIKYKLISNKALPYYQYVPKPVLESQSHKIYFDRAILTDKTVHNNRPDITLIDKINKHTYIIDIAVPNTHNLQKTITEKIQKYTELKEEIMRIWKMEKVYIVPLVLSSTGIIPKNLHHYLRQINLPINLYMTMQKAAILNTCRIVRKFLQEDLPPE

SEQ ID NO: 20397 - protein, 1275 aa, Phoebis sennae
MMETRNKLRKWPLPGGDRRGTSVAGNGRDSMLASDSRLQDGWVGAGDRGDGERSSRTTAAITDVQDRSNRSSCSRTTTPAEDVSQEAPATQPATTKAGKPRVRMKWTYDMNLFIMRTYLYITKLDTDRTMYVKTLYDEFRLKYPELDISSQRVADQRRVIIRNKLLSDSVINDLKSEVTRKLKEEESNFSLTSEKSQSNPMNNISQSSHTSAHDIIPTQLDSTDSTIIHQTLHASTQTNTFPSITDITLLEQELPTETTNISTQELIDQLETTLTQYTGLDPTSRPKLPRLKENKNLYSLVNIFNTQILKKFFTLDSDIHEIHSLIYCSAQVICKKLGYKIKNNSDTLFTRKQTKPGWQIRIENDIKNLRANIGRLTQYINNNRSRKVVKAVDEIFRKTKVHTSHEKNNTRPEEFLDTLKQKLTLKSQRLKRYLKALKRKDDNKLFKNNEKVFYRNLRSGTQLHTNEIPQVEELKNYWADVWKNRGNHNNEAAWIEAEKQKWENTEQMEFEDINIEDIERATTKMKNWKAAGIDHIHNFWLKKFVALHDILAKNITDLIKGHQILPTFMTRGITFMIPKSINTTDPSQYRPITCLPTLYKLITSCIAKKLNNHIEVNKILSEEQKGCRRNHRGCKEQIIIDSTVLKHANSHKKNLHITYIDYRKAFDSVPHSWLLQVLEIYKINALIINFLKNAMFHWKTSLYLSNNCTSITTDEIDINNGIFQGDALSPLWFCLALNPLSNILNSTESGYKLNPRASITHLMYMDDIKLFAKTKRDMNNLIKLVTQFSKNINMTFGIDKCKTLHILKGKIETLNDTNIVENNSFATMDPTETYKYLGIHQSNTINHIQLKNNLRLEYINRVNSICKSQLNSKNLFKAINTYAVPILTYSFGLVKWTTTDINRLQIKTRTTLTKHNYLHPKSAIERMTLKRDQGGRGLIDIKLLWLNQIKHLREFFYKKSFTSKIHEAIVKLDTKFTPLNLNEKDIQFQSDKEYNTEKVGRWRSKELHGRHIHAIEQSHIDTESSNQWLKLGSLFPETEGFMIAIQDQVVNTKNYRKYIIKDPNLQNDKCRKCHRHPETIQHITSACPTLTQTDYTHRHNQVSHIIHQRLSLKHKLLHDKPKPYYQYTPKPVLESSTHKIYFDRAILTDKTIHNNRPDITLIDKIEKIVYLIDIAIPNTHNIQKTITEKIHKYTELKEEIIRIWRMNKVYIVPMVLSCTGVIPKYLHHSIKLLDLPKTIYMTMQKAAILNTCRTVRKFLQEESTDLMPQHDLHLA

SEQ ID NO: 20398 - protein, 1298 aa, Phoebis sennae
MEKMMRRRKKMMETRNNKLSKWPLPGGDRRGTSAAGIGRDSMLASDSRLQDGWAGAGDRGDGERSSRTTAAITDVQDRSNRSSCSRTTTPAEDVSQEAPATQPATTKAGKPRVRMNWTYDMNLFIMRTYLYITKLDTDRTMYVKKLYDKFSLQYPELNISSQRVADQRRVIIRNKLLTDSVINDLKKEVADKLREEENNTTLMHSTNIFPESQTPLPDSMNNVDQSTFTNAHATISTQLNLTDSITTILHQSSHASTQTNILPSNASLTYLENETSLESVDTLTQDLIDQLKTALVQYTGSDPMSRPKLPRLRENRKLYDLVNIFNKHILHNFFTLDSDINDIHALIYCSALVISENLGYKIRNNSHILSRKRYQSKPSWQIRIENDIKTLRRNIGRLTQYINNNRSRKIVKAVEEIFKTTKVHSSHENNNSRPEEFLDTLKQKLTLKSQRLKRYLKALRRKEDNILFSSNEKGFYRNLKNGIQLHSREVPQVEDLKSYWADIWKHQGNHDTEASWIDVEKQKWKNTELMDFEEINIEDISLATRRMKNWKAAGIDHLHNFWFKKFVVLHDILAKNITDIINEQQILPSFMTRGITYMIPKSSDTVNPSQYRPITCLPTVNKLITSCLANKINKHIEINKILSEEQKGCRRNHKGCKEQLIIDSTILKHANSHKRNLHVTYIDYRKAFDSVPHSWLLQVLEIYKINPLIINFLKRSMMQWKTTLNLSNNSTSLTSDEIDIRNGIFQGDALSPLWFCLALNPLSNLLNSTQSGYKLNTQSSITHLMYMDDIKLFAKTKKDMTHLIKLTTEFSKNINMTFGIDKCKTLHIIKGKIKSLCDTNLNENNTFSIMDPTETYKYLGIHQSNNINHKQIKNNLSIEYLRRVNTISKTQLNSKNLFKAINTYAIPILTYSFGVVKWTTTDINRLEVKTRTTLTKHSYHHPKSAIERITIKRDRGGRGLIDIKLLWQNQIKYLRDFFYQKSFTSYIHDAITKLDNKYTPLNLSQREMPFQSAKDHETEKVGRWRSKELHGRHIHDIEQPHIDAESSNKWLKLGSLFPETEGFMTAIQDQVINTKNYRKYIIKDSNLQDDKCRKCHRQPETIQHITGACPTLSQTDYTHRHNQVSHIIHQKLSLKHKLLHDKPKPYYQYTPKPVLENSTHKIYFDRAILTDKTIHNNRPDITLIHKIEKIVYLIDIAIPNTHNIQKTITEKIHKYSELKEEIIRIWKMNKVYIVPMVLSSTGVIPKYLHHSIKLLDLPKNIYITMQKAAILNTCRTVRKFLQEDSTDLMSHQNEPHLA

SEQ ID NO: 20399 - protein, 1282 aa, Deilephila porcellus
MNMETSQRKLRIGPLPEGDRRGTSVAGHGRDSMLASGSRLDGWAGVGDAGGREMSSRITAENVEQVDSRSSCSTVNDPAESVSQVAQATQPATTKAGKPRVRMKWTDEINEFIMHTYYYVTKLETDKTMYCKKLHDQFISKYPHINVSAQRIADQRRVIIRNKLLSDEMLNNIKKEVSEILNEEIRDNDVAPIINNNPSQALIHCTYSIQHTTIPPLSNQSPIAEILNLDLIHASTQTDTLPSIVTLTQEIEQTSNLTNTDINIQELADQLETALTQYEGTDPTSRPKLPRLKENKNLYALVDIFNKHILSRFYTINSDINRIHTLIYCSALVISENIGYKVRNNHYPLHVRKFKSDKPPWQIRIENDIKILRADIGRLTQYVKNNRSKKVVKAVEKIFNRTKIHSTHENNNSRPMEYLDTLKQKLALKSQRLKRYLKALHRKEDNKLFVNSEKEFYRKIRSNSKLIPDGIPQKDEIKNYWANIWKNQGNHNEEVEWIYKEENKWKNIEQMEFLQLTKDDIEIATKKMKNWKAAGVDSVHNFWYKKFRVLHEILAKSITDLIIGQEVLPNFITKGITYLIPKSNETSNPSQYRPITCLPTIYKLITACISNAITKHIENNNILYEEQKGCRKRHKGCKEQLIIDMTVLKHANAKKKNLHITYIDYRKAFDSVPHSWLLHVLKIYKINPHIIDFLKDAMTKWRTSLFLSNSYASITTDEIPIENGIFQGDALSPLWFCLALNPLSNLLNSTDNGYKLTADTSITHLMYMDDIKLFAKSKKDLKHLLNLTTQFSKHINMTFGLDKCKILNIIKGKIENPNILDTDENHIFEIMDPTDTYKYLGIYQSNKINHLEIKNNLNNEYTRRLNKICKTQLHSKNLFKAINTFAIPILTYSFGVIKWTNTDIKRLQIKTRTTLTKHNYLHPKSATERMTVKREKGGRGLIDLKLLWEKQLQSLREFFYMKSNSSHIHKAIVELDSKYTPLNLNERDLEFKSATLQEIEKIDNWRKKELHGRHIHDLEQPHVDAEASNKWLKLGSLFPETEGFMIAIQDQIINTKNYRKFIIKDSNIQNDKCRKCHRQSETIQHITSACPSLTQTDYTHRHNQVVNIIHQKLSIKYKLSENTPKPYYQYVPKPVLESTTHKIYFDRAILTDKTIHHNRPDITLIDKINKIVYLIDIAIPNTHNIQKTITDKIHKYTELKEEITRIWKMNKVYIVPLVISSTGIVPKYLHHSIKLIDLPKNIYITMQKAAILNTCRIVRKFLQEESTEEPMELNFANETHLA

SEQ ID NO: 20400 - protein, 1309 aa, Myrinia binoculus
MRRSIRIKNKYSAQPNTVAEKTPDVMSSASSSLSTTHNLFQLDNPFNTRCKKTTDTSEECNRYTDRTTIPIKLSSPSTMSYTPSNATSPSSISDSENQESTHTPKSNSFILHTLAEDVSQEAHATQPVTTKAGKTRVRMQWNDDLNTFIMRTYFYITKLETDRTMYCKKLHEQFTLKYPHLKVSAQRVADQRRVILRNKMLSDEVIYKLRQEISEQLRREEIASSSSQVPDTTTFSISTQENTSQAKSNTCITPTSPASPPTTQHLLHTQTHVSSQISTTPNTETITQQTECSQHIETIPTDVYTQQLIDQLETTLVQYTGVDPTDRPKLPRLKENKTLYKLLDIFNKHILGNFYSIDSNISTIHTLIYCSALVICENLGYKIRTHNLGLQHKHKTQKPPWQIRIEADIKKLRADIGRLTQYIINNNRSKKVVAAVESIFRKTKVHTIHERNNIRPEEYLDTLKQKLTLKSQRLARYLKALQRKTDNRIFAANEKGFYRTLKENSVQIKNSQIPQSNELKNYWADLWKKQNDHNNNAEWIVSEERRMSDVQSMEFTNIDRADIEMTTKRMKNWKAAGIESIHNFWYKKFHTLHNILGKNITEIIKGEQELPKFITTGITYMLPKSSDTVNPSQYRPITCLPTIYKLITSLITCKINKHLKDNNILAEEQKGCRQSHKGCKEQLVIDSSILKHAHTQKRNLHISYIDYRKAFDSVPHSWLIRVLQIYKINPNVIDFLESAMSKWSTTLYLSNGTDVIKTDEIPIRNGIFQGDSLSPLWFCLALNPLSNLLNISSSGYALNTNTSITHLMYMDDIKLFAKTDKCLENLIEITIQFSHDINMTFGLDKCRTLHIHKGRLKSNSNIEEINTFTTMEPSDTYKYLGIHQSNIINHTKIKKDLTSEYNRRLNLICKKQLYSKNLFKAINTYAVPVLTYSFGVVRWTRTDLNNLQIKTRTTLTKHNYLHPKSAVERISIKRHKGGRGFIDLTLLWEGQIRNLRDFFYNKSVTSTIHYAISQLDNNFTPLNLNNTDVIFKSPQVHDDEKIGRWRAKELHGRHLHDLEQPHVDAVASNQWLKLGSLFPETEGFMIAIQDQVISTKNYKKIILKDPNTQNDKCRKCHRASETIQHITSACPALSQTDYTHRHNQIAQIVHQKLAIKHTLITDKTVPYYQYTPKAVLENKSHKIYFDRAILTDKTVHNNRPDITMIDKINKSTYLIDIAVPNTHNLQKTITDKIHKYTELKEEIIRIWKMSKVYIVPLVLSSTGIIPKHLHHYLQQIDLPTNLYMTMQKAAILNTCRIVRKFLQEDIPSE

SEQ ID NO: 20401 - protein, 1266 aa, Heliconius numata
METRNKNKRIGPLPGGERRGAPGADAGCLSMRSIGGRELSRRVPTDKNVTADPTYIPTDLTDSSSSRSLTPAEDVSQEALVNQPATTKAGKPRVRMQWTEEMNLFIMRTYFYITRLETDNTMYCKKLHDNFILKYPNINVSSQRIADQRRVIVRNKLLSDEIIKTLKKEIADLLSKEENSDSSQQLVRTHTSLSQKSLEPSSLVCPTQVSLHTQFSAIPSSHASTQTNTSLTTLQLEHEQNPEQSPYKMQLNINKLTNDLETALIQYTGIDPTARPKLPKLKENKRLYEYLDIFNKQILKQFYFIDSDLNHIHTLIYCSALVIAEHSGYNIRHLQSNLPTTNRKPQKPAWQIRLELDIKKLRADLGRVTQYINGNRSSKLVKKVQDIFKRLSVHSIHESKNSRPEEFLDTLKQKLSLKSQRLARYNKALRRKIDNVLFHNNEKVFYRNLNERQDAVNSEIPEKKALTNYWTDLWKKKESHNEEAEWLSDVENRWKGVSDMEFVQFTREDIEKVVRHVKNWKAAGIDGIHNFWYKKFHVLHDILANIITDIVNNKQVLPKFVTKGITYMLPKNSDTINPSQYRPITCLPTIYKLITACITQKINKHLIENSILAEEQKGSRQNHKGCKEQLIIDSIVLKHANTNKKNLHIAYIDYKKAFDSVPHSWLLKILKIYKINPSIVIFLQNAMAEWRTTLHLSVGNNKVMTDEIYIENGIFQGDSLSPLWFCLALNPLSHLLNAMSSCGYKLNNDTAITHLMYMDDIKIFAKTKKGLQTLLKITTQFSQDINMSFGVDKCKRIHINRGKIDSKVNNEENILFNLMESGDTYKYLGVHQSNSINHIQIKKQLNMEFNKRLNAICKRQLHSKNLFKAINTYAIPVLTYTFGVIKWTQTDIKRLQIKTRTTLTKYHYLHPKSAIERTNIKRIKGGRGLINLEALWEGQVKNLRHFFYTKSESTLHSAIIDLDDNFTPLNLKNRSISFKPLQDHVEQQFNNWRKKELHGRHLHDLEQVHIDSEASNKWLKLGSLFPETEGFMIAIQDQIIATKNYRKFIVRDRNIQNDKCRKCHRQPETIQHITSACSSLAQTDYTHRHNQVVQIVHQKLAIINKLIQDKPHPYYQYVPKPVLESPNCKMYYDRAILTDKTIHYNRPDITFIDKINKQTYLIDITIPNTHNLQKSITEKINKYTELKEEVTRIWKMNKVYIVPLVLSSTGVIPKSLLHYLEQIKLPINIYITMQKAAILNTCRIVRKFLQEDITSQPIPGNGPHLA

SEQ ID NO: 20402 - protein, 1263 aa, Dione vanillae
METRNRKSRIGPLPGGDRRGAPGADAGCLSMRTIGGRGLSRRVPTEKNVTADSTDSTDNRSRIVTLAEDVSQETLVNKPATTKAGKPRVRMQWTEDMNLFIMRTYYYITNLETDKTMYCKKLHDNFVLKYPDICVSAQRIADQRRVILRNKLLPDEVIKNLKKEVSEILSNEQNNDSPQHSVSTRTSLETSQERTTPLPLVEIPQLTSHAQCSIITSHASTQTTTTLPTLQLEHEQNQEHRLNQVQFNINKLTNDLETTLIKYTGIDPTARPKLPKLKDSRKLYEYLDIFNRQILKQFYSIDSDLNHIHTLIYCSALVIAVNLGYKISNCQSNFLHNRKQKFQKPAWQIRLELDIKKLRVDIGRVTQYVKNNRSPKLVKKVQDIFNRISVHSVHEKNNSRPEEFLDTLKQKLILKSQRLARYNKALQRRQDNISFYNNEKGFYRNLREKPDINNFEIPNKEALTNYWTDLWKKKGNHNEQANWLIDLENRWKDLKSMDVINFTSEDIEIVIRHMKNWKAAGVDGIHNFWYKKFYILHDILAHIVTDVVNGKQILPKFITKGITYMLPKSNDTADPSQYRPITCLPTIYKFITACITHKIKGHLVKNNILAEEQKGCRQNHKGCKEQLIIDSIVLKHSNIHKRNLHIAYIDYKKAFDSVPHSWLVKILNIYKIHPDIVHFLQSSMANWRTTLHLEIRNNKVTTEEINIENGIFQGDSLSPLWFCLALNPLSYLLNNLSSSGYKLNSNAAITHLMYMDDIKIFAKSKKDLKILLDSTTEFSNDIKMSFGINKCKTLHINRGKVDNITSTNKNNSFNAMQSGDTYKYLGIYQSNNINHNQIKTNLTTEYIKRLNVICKKQLHAKNLFKAINTFATPILTYTFGVIKWTRTDIKRLQIKTRTTLTRYNYLHPKSAIERMSINRRKGGRGLIDLEVLWLGQIKNLREFFYSKSESILHSTILELDSNFTPLNLKKRLLKFKTIQDHIEEKCNDWRKKELHGRQLHDLEQPHIHVEASNKWLKLGSLFPETEGFMIAIQDQVIQTKNFRKFIVKDLNTQSDKCRKCYRQPETIQHITGACSSLAQTDYTYRHNQIVQIVHQKLAVTFKLIQEKPQPYYQYIPKPVLESPNYKIYFDRAILTDKTIHYNRPDITLIDKINKQTYLIDITIPNTHNLQKSITDKITKYTELKEEVKRIWKMNKVYIVPLVLSSTGVIPNNLLHYLKLLKLPTNIYITMQKAAILNTCRIVRKFLQEDVAPQTTTNNGLHLA

SEQ ID NO: 20403 - protein, 1251 aa, Heliconius numata
METRNKNKRIGPLPGGERRGAPGADAGCLSMRSIGGRELSRRVPTDKNVTADPTYIPTDLTDSSSSRSLTPAEDVSQEALVNQPATTKAGKPRVRMQWTEEMNLFIMRTYFYITRLETDNTMYCKKLHDNFILKYPNINVSSQRIADQRRVIVRNKLLSDEIIKTLKKEIADLLSKEENSDSSQQLVKTHTSLSQESLEPSSLVCPTQVSLHTQFSAIPYSHASTQTNTSLTTLQLEHEQNPEQSPYKMQLNINKLTNDLETALIQYTGIDPTARPKLPKLKENKRLYEYLDIFNKQILKQFYFIDSDLNHIHTLIYCSALVIAEHSGYNIRHLQSNLPTSNRKPQKPAWQIRLELDIKKLRADLGRVTQYINGNRSSKLVKKVQDIFKRLSVHSIHESKNSRPEEFLDTLKQKLSLKSQRLARYNKALRRKIDNVLFHNNEKVFYRNLNERQDAVNSEIPEKKALTNYWTDLWKKKESHNEEAEWLSDVENRWKGVSDMEFVQFTREDIEKVVRHVKNWKAAGIDGIHNFWYKKFYVLHDILANIITDIVNNKQVLPKFVTKGITYMLPKNSDTINPSQYRPITCLPTIYKLITACITQKINKHLIENSILAEEQKGCRQNHKGCKEQLIIDSIVLKHANINKKNLHIAYIDYKKAFDSVPHSWLLKILKIYKITPSIVIFLQNAMAEWRTTLHLSVGNNKVMTDEIYIENGIFQGDSLSPLWFCLALNPLSHLLNAMSSCGYKLNNDTAITHLMYMDDIKIFAKTKKGLQTLLKITTQFSQDINMSFGVDKCKIIHINRGKIDSKVNNEENILFNLMESGDTYKYLGVHQSNSINHIQIKKQLNMEFNKRLNAICKRQLHSKNLFKAINTYAIPVLTYTFGVIKWTQTDIKRLQIKTRTTLTKYNYLHPKSAIERTNIKRIKGGRGLINLEVLWEGQVKNLRHFFYTKSESTLHSAIIDLDDNFTPLNLKNRSISFKPLQDHVEQQFNNWRKKELHGRHLHDLEQVHIDSEASNKWLKLGSLFPETEGFMIAIQDQIIATKNYRKFIVRDRNIQNDKCRKCHRQPETIQHITSACSSLAQTDYTHRHNQVVQIVHQKLAIINKLIQDKPHPYYQYVPKPVLESPNCKMYYDRAILTDKTIHYNRPDITFIDKINKQTYLIDITIPNTHNLQKSITEKINKYTELKEEVTRIWKMNKVYIVPLVLSSTGVIPKSLLHYLEQIKLPINIYITMQKAAILNTCRIVRKFLQE

SEQ ID NO: 20404 - protein, 1173 aa, Dione vanillae
MQWTEDMNLFIMRTYYYITNLETDKTMYCKKLHDNFVLKYPDICVSAQRIADQRRVILRNKLLPDEIIKKLKKEVSEILSNEQNNDSPQHSVNTRTSLETSQEPIAPLLLVDIPQLTSHAQCSIITSHASTQTTSTLPTLQLEHEQNQEHRLNQIQFDINKLTNDLEATLIKYTGIDPTARPKLPKLKDSRKLYEYLDIFNKKILKQFYSIDSDLNHIHTLIYCSALVITVNLGYKISHCQSNFLHNRKQKFEKPAWQIRLELDIKKLRVDIGRVTQYVNNNRSPKLVKKVQDIFNRISVHSVHEKNNNRPEEFLDTLKQKLILKSQRLARYNKALQRKKDNISFYNNEKGFYRNLRDKPDINNFEIPQKEALTDYWTDLWKKKGNHNEQAKWLIDLENRWKDLKSMDVINFTSEDIVIVIRHMKNWKAAGVDGIHNFWYKKFYILHDILAHVITDVVNGKQILPKFVTKGITYMLPKSNDTADPSQYRPITCLPTIYKFITACITHKIKEHLVKNNILAEEQKGCRQNHKGCKEQLIIDSTVLKHSNIHKRNLHIAYIDYKKAFDSVPHSWLIKILNIYKIHPDIVHFLQSSMANWRTILHLAIGNNKVTTEEINIENGIFQGDSLSPLWFCLALNPLSYLLNNLSSSGYKLNSNAAITHLMYMDDIKIFAKSKKDLKILLDSTTQFSNDIKMSFGINKCKTLHINRGNVDNITSTNQNNSFNTMESGDTYKYLGIYQSNNINHNQIKTNLTTEYIKRLNVICKKQLHAKNLFKAINTFAIPILTYTFGVIKWTQTDIKRLQIKTRTTLTKYNYLHPKSAIERISINRRKGGRGLIDLEVLWLGQIKNLREFFYSKSDSILHSAILELDSNFTPLNLKNRLLKFKTIQDHIDEKCNNWRKKELHGRHLHDLEQPHIDVEASNKWLKLGSLFPETEGFMIAIQDQVIQTKNFRKFIVKDLNTQSDKCRKCYRQPETIQHITGACSSLAQTDYTYRHNQIVQIVHQKLAVTFKLIQEKPQPYYQYVPKPVLESPNYKIYFDRAILTDKTIHYNRPDITFIDKINKQTYLIDITIPNTHNLQKSITDKITKYTELKEEVKRIWKMNKVYIVPLVLSSTGVIPNNLLHYLKLLKLPTNIYITMQKAAILNTCRIVRKFLQEDVAPQTTTNNGLHLV

SEQ ID NO: 20405 - protein, 1267 aa, Dryas iulia
METRNKRIRIGPLPGGERRGAPGADAGCHSMRSIGGRELNRRVPTDKNDTADPTYRPTDLTDSDSYRSVTPAEDVSQEAPANKPATTKAGKPRVRMQWTEEMNLFIMRTYYYITHLETDRTMYCKKLHDNFVLKYPHINVSAQRIADQRRAIIRNKFLSDEVIKNLKIEVSHTLHNEENNCSLQNSLVSHTSITQSVTYHSQEPSTASFNTQLSSHTHSSTKTCSHASTQTNTQCEIPQLENEQISDQRQINILTNKLISNLETALIQYTGTDPTARPKLPKLRENKKLYEYLDIFNKQILKQFYSIDSDLNHIHTLIYCSALVIAENLGYNIRHQQSSTPNRNRRHQKPAWQIRLELDIKKLRSDIGRITQYINNNRSPKLVKKVQDIFKRMSVHSIHEKNNSRPEEFLDTLKQKLVLKSQRLARYNKVLQRKQDNILFQNNEKRFYRNFQQKPDEVNYEIPEKEELKNYWTDLWKKKENHNEQAEWLAEVENRWKDIEHMEFINFTRDEIQIVVNRVKNWKAAGIDGIHNFWYKKFYILHDVLANVITDIINNEKILPKFATKGITNMLPKNSDTMNPSEYRPITCLPTIYKLITACIAHKINKHLIQNNILAEEQKGCRQNHKGCKEQLIIDSIILKHANIHKRNLHISYIDYKKAFDSVPHSWLVKILEVYKIHPAIVIFLQNVMADWRTTLHLSVGSDKIMTDEINIESGIFQGDSLSPIWFCLALNPLSHLLNTKSSSGYKLSSHASITHLMYMDDIKIFAKSKKDLQSLLNITTQFSQDIKMSFGLDKCKILHICKGKVNNNTATEINSFNLMESGDTYKYLGIFQSNNINHIQVKKNLITEFTKRLNSICKRQLHSKNLFKAINTYVIPVLTYTFGVIKWTQTDIKRLEIKVRTTLTKYNYLHPKSAVERMTMNRIKGGRGLIDLKVLWEGQVKNLRDFFYNKSDSIIHSAILELDNNFTPLNLKNRLLKFKSVEEHTEEKMSNWRKKELHGRHLHDLEQIHIDSEASNKWLKLGSLFPETEGFMIAIQDQVIQTKNYRKFIIKDSKIHSDKCRKCHRHSETIQHITGACPSLAQTDYTHRHNQVVQIVHQKLALTFKLIQDKPSPYYQYVPKPVLESPNYKMYFDRAILTDKTIHYNRPDITFIDKINKQTYLIDITIPNTHNLQKSITDKINKYTELKEEVTRIWKMNKVYIVPLVLSSTGVIPKNLLHYLNQIKLPKNIYITMQKAAILNTCRIVRKFLQEDFDSQLIPENEQHLA

SEQ ID NO: 20406 - protein, 1267 aa, Dryas iulia
METRNKRIRIGPLPGGERRGAPGADAGCHSMRSIGGRELNRRVPTDKNDTADPTYRPTDLTDSNSYRSVTPAEDVSQEAPANKPATTKAGKPRVRMQWTEEMNLFIMRTYYYITHLETDRTMYCKKLHDNFVSKYPHINVSAQRIADQRRAIIRNKFLSDEVIKNLKIEVSHTLHNEENNCSLQNSLVSHTSITQSVTYHSQEPSTASFNTQLSSHTHSSTKTCSHASTQTNTQCEIPQLENEQISDQRQINILTNKLISNLETALIQYTGTDPTARPKLPKLRENKKLYEYLDIFNKQILKQFYSIDSDLNHIHTLIYCSALVIAENLGYNIRHQQSSTPNRNRRHQKPAWQIRLELDIKKLRSDIGRITQYINNNRSPKLVKKVQDIFKRMSVHSIHEKNNSRPEEFLDTLKQKLVLKSQRLARYNKALQRKQDNILFQNNEKRFYRNFQQKPDEVNYEIPEKEELKNYWTDLWKKKENHNEQAEWLAEVENRWKDIEHMEFINFTRDEIQIVVNRVKNWKAAGIDGIHNFWYKKFYILHDVLANVITDIVNNEKILPKFATKGITYMLPKNSDTMNPSEYRPITCLPTIYKLITACIAHKINKHLIQNNILAEEQKGCRQNHKGCKEQLIIDSIILKHANIHKRNLHISYIDYKKAFDSVPHSWLVKILEVYKIHPAIVIFLQNVMADWRTTLHLSVGSDTIMTDEINIESGIFQGDSLSPIWFCLALNPLSHLLNTKSSSGYKLSSHASITHLMYMDDIKIFAKSKKDLQSLLNITTQFSQDIKMSFGLDKCKILHICKGKVNNNTATEINSFNLMESGDTYKYLGIFQSNNINHIQVKKNLITEFTKRLNSICKRQLHSKNLFKAINTYVIPVLTYTFGVIKWTQTDIKRLEIKVRTTLTKYNYLHPKSAVERMTMNRIKGGRGLIDLKVLWEGQVKNLRDFFYNKSDSIIHSAILELDNNFTPLNLKNRLLKFKSVEEHTEEKMSNWRKKELHGRHLHDLEQIHIDSEASNKWLKLGSLFPETEGFMIAIQDQVIQTKNYRKFIIKDSKIHSDKCRKCHRHSETIQHITGACPSLAQTDYTHRHNQVVQIVHQKLALTFKLIQDKPSPYYQYVPKPVLESPNYKMYFDRAILTDKTIHYNRPDITFIDKINKQTYLIDITIPNTHNLQKSITDKINKYIELKEEVTRIWKMNKVYIVPLVLSSTGVIPKNLLHYLNQIKLPKNIYITMQKAAILNTYHIVRKLLQEDFDSQLIPENEQHLA

SEQ ID NO: 20407 - protein, 1195 aa, Tiana niger
MRRSKRIKNKSSAQPETVAEISPDSTVTTSSSIGVSSSTIFNTSTGSTSPSTINSDGMENTHMYSFRPNTLAEDVSQEAHASQPATTKAGKPRVRIQWNDDINTFIIRTYFYVTKMETDRTMYCKKLHDKFSLRYPHLNVSAQRVADQRRAILRNKMLSDEIITKLRQEISEQLRKEEIANSHSQLSDIRTVTSITQESTFQGSHVAPSITHQNKFPYAHVSTQTSIIPNIVSITREADNIQNTEKERLDITTQQIIDQLETALVQYTGVDPTVRPKLPKLKENKKLYEYVDVFNKQVLGSFVSYDSDITSIHTLIYCSALVICENLGYKIRPHKLGTHHIHPPQKPPWQIRIEKDIKNLRANIGRLTQYIVNNNRSRKVVATVENIFRKTKVHTIHERNNIRPEEYLDTLKQKLTSKSQRLARYLKSLKRKVDNKIFVTNEKGFYRTLKNDTQINKRSKIPEINELKNYWNKLWKKQNDHNNSAEWILNEESRMSNIKTMEFTDINGEDIEMATKRMKNWKAAGIDNIHNFWYKKFKILHNTLAKNITELIKGEQELPKFITKGLTFMLPKSTDTVNPSQYRPITCLPTIYKLITSLIAHNINKHLKHYNILSEEQKGCRQSHKGCKEQLIIDSTILKHAHTQKRNLHISYIDYKKAFDSVPHSWLIRVLQIYKIDPNIINFLQNAMTNWRTTLYLSNSVDTITTDEIPIENGIFQGDSLSPLWFCLALNPLSNLLNTTLNGYKLNTSISITHLMYMDDIKLFAKTKKCLKSLIETTTQYSHDINMSFGLDKCRTLHIYKGKIKSNTNSTGESNTFVSMEPSDSYKYLGIHQSNIINHTKIKQELMSEYIRRLNLICKKQLYSKNLFKAINTFAIPVLTYSFGVVKWTRTDIKNLEIKNRTTLTKHNYLHPKSAIERTTVKRHKGGRGLIDLMALWEGQIHNLREFFYNKSTSSVIHSSIIQLDQNFTPLNLNSKDLTYKTTHDHLKEKICKWRSKELHGRHLHDLEQPYVDCIASNKWLKLGSLFPETEGFMIAIQDQIIATKNYKKIILKDPNTQNDKCRKCHRASETIQHITSGCPNLAQTDYMHRHNQVVHIVHQKLAIKHKLITDNSVPYYHYTPKPVLENQSHKMYFDRAILTDKTVYNNRPDITIIDKINKNTYLIDVAVPNTNNLQKTITDKIHKYTELKEEVNRI

SEQ ID NO: 20408 - protein, 1124 aa, Muschampia orientalis
MRRSNRIKNKNAQFETVAEITPNVVDGKSSPIESVSPSTTSYSLSISTSPSTVSNSSYQENNALTRNNSSLTLAEDVSQAAPAAQSATTKAGKPRVRMQWNADINTFIMRTYFYVTKMETDRTMYCKKLHEQFTIKYPHLNVSAQRIADQRRVILRNKLLSDDTINKLKQEISDILRREEISNLGSHTEEISTQDSSTNIIQTCYVSATSTHQSTPTHAHVFTQTTDISNIYSITENVENTSNVEKTIIDISTQQLTDQLETTLIQYTGIDPTVRPKLPRLKVNKRLHQYIDVFNNQILGKFFSFDSDINSVHTLIYCSALVICESLGYKIRTHNSGTRRNYTPRKPAWQIRIELDIKQLRADIGRLTQYIVNNIRSKKVVAAVETIFRKTTIHTIHERNNFRPEEYLDTLKQRLTLKTQRLRRYLKALQRKKDNKIFTTNEKGFYRTLNNNCTQINGDSEVPNSNELQNYWTDIWKRHSDYNISAEWIIDEENRMSYVETMEFININREDVEKITSRMKNWKAAGIDNIHNFWYKKFRALHNILAKNITELIKGEQELPKFMTKGITYMLPKGSDTANPSQYRPITCLPTIYKLITSLITHNINKHLKHYNILSEEQKGCRQGHKGCKEQLIIDTTILKQCHSQKRNIHISYIDYKKAFDSVPHSWLIRVLQIYKISPTIINFLNKTMSNWRTTLHLSKGNDNIITDEIPIETGIFQGDSLSPLWFCLALNPLSNLLNTSPNGYKLNTSTSITHLMYMDDIKLFSKNYKGLNNLIKITTQYSQDINMTFGLDKCRTLHIRQGKITNSSNNTEDTEPFLSMEPHDTYKYLGMHQSNTINHTKIKQDLTCEYIRRLNVLCKKQLYSKNLFKAINTLAIPVLTYSFGVVKWTRTDINNLEIKTRTTLTKYNYLHPKSAIERISFKRDKGGRGLIDLTLLWEGQIQNLRDFFRNKSITSTIHLSIIELDKNFTPLNLNNKDLYFKSPQAHFEEKIGRWRSKELHGRHLHDLEQPHVDPESSNKWLKLGCLFPETEGFMIAIQDQVIATKNYKKVILRDPDTDNDKCRKCHRASETIQHITSACPNLAQTDYIHRHNQVANIIHQKLAIKHKLITDKSVPYYQYVPKP

SEQ ID NO: 20409 - protein, 960 aa, Phalera bucephala
MFNKEILIKFFSIDLDIISIHTLIYCSALVICENLGYKIRKYNADTYVMPSRKSQKPEWEIRIEKNIKSLRADIGRLTQYMNNNRSRKVVTTVKSIFKRTKIHSTHERDNIRPEEYLDTLKQKLTLKSNRLARYLKSWQRKEDNKLFTTSEKSFYRACKSDSNQNNRNTGIPQTDELKKYWTKLWKEQKDHNDNAHWIREEEVRMENIEVMEFTEFTRLDIESVTKRMKNWKAAGIDSVQNFWYKKFVTLHDILPKNITEIIKGNQTLPKFVTKGITYMLPKSSDTVNPSQYRPITCLPTLSKFITSLTTHNITQHIDYNHILSEEQKGCRQNHKGCKEQLIIDSTILKHANSQKRNLHISYIDYKKAFDSVPHSWLIRVLHIYKISPVLINFLKNAMSDWRTTLYLSNGTDTITNDEICIGNGIFQGDSLSPLWFCLALNPLSNLLNRTTSGYKLNINTAITHLMYMDDIKLFAKTNKDLINLIEITEKYSQDINMTFGLDKCRVLHVSNGKIVGNNNINEPNIFENMEPEESYKYLGIHQSNIINHIMIKKNLTVEYTRRLNLICKKQLHSKNLFKAINTYAIPVLTYSFGVVKWTRTDINNLAIKTRTTLTKHHYLHPKSAIERVSVKRQDGGRGLIDLKIMWEGQVQKLREFFYNKSTTSAIHTALIDLDINYTPLNLSCKDIQFKTLQIQTKEKINRWRSKELHGRHIHDLEQVHVDLLASNAWLKLGSLFPETEGFMIAVQDQVINTKNYKTYILKDPTIQNDKCRKCHRASETIQHITGACPTLAQTDYTHRHNQIAQIVHQKLAIKHKLIPSKPVPYYQYTPRPVLEDQRYKMYFDRAILTDKTVHNNRPDITIIDKLNKCTYLIDIAVPNTHNLQKTITEKIHKYTELKEEIIRIWKMNKVLIVPLVLSSTGVIPKHLFHYLQQIELPVNHDNTKSRYFKYVPNSAKVLAR

SEQ ID NO: 20410 - protein, 1260 aa, Polygonus savigny
MRSVSGEELNRRAPTGSSENVTADFDETDRQTKSRSNSPYSPSTSSYTPSIPTSPSTVSDPPLPNLDVAREANAFLPASTKAGKPRVRMKWSKDVNMFIIRTYYQVTKLETDMTTYRKQLHELFSRQYPHVSVTEQRISDQRRAILRNKLLSQETLNQVKEEVSMQLKDDTENTTELSPITQIQPELYTHLPSQPQTLEEALPQINALTSHASTQTSTFSNIVPNSLAVNTQDSVHTEIDISTQELINHVETALAQYSGTDPTVRPKLPKLRENKSLHNLIDIFNKHILDRFYTIDSDLLSIHTLVYCCALVICEYLGCKIRTHDNLNKQTSRTQKLMKPAWQIRIENDVKKLRADIGRLTQYINKNRSRKVVAAVESIFKRNKLHTVYERNNVRPEEYLDTLKQKLRLKSQRLARYTKALQRKEANKLFAINEKGFYRTVKTGIQSTRVSELPRENELRNYWTEIWKKRKDHNHNAEWIGIEEARMENIEAMELFNVTREDIESVTRNLKNWKAAGVDSIHNFWYKKFYTLHTILAKNITELINGHQQVPTFITKGITYMLPKSEDTTNPSQYRPITCLPTIYKLITSLISRHINTHLEQNNILSEEQKGCRQKHKGCKEQLIIDSTILKHANVHKRNLHISYIDYKKAFDSVPHSWLIQVLKLYKINPVIINFLENVMSNWRTTLHLSIGTTTIRTDEIQIENGIFQGDSLSPLWFCLALNPLSNILNRTNSGYKLNNSNSITHLMYMDDIKLFARTDKALDNLIDITTQYSKDINMTFGLDKCRILHIRKGKATSSNSNLDNSNIFDLMEPSDSYKYLGFHQSNSINHSQIKKELILEFIRRINILCKKQLYSKNLFKAINTFAIPILTYSFGVVKWTQTDITNLEIKCRTSLSKHNFLHPKSAVERISIKRHKGGRGLIDLKLLWERQIHSLRDFFYTKSTTSNIHLDIIKLDNNYTPLNLNNRHINYNTQINYTNSKLDRWRSKELHGRHLHDLEQTHVDLEASNKWLKLGYLFPETEGFMLAIQDQVINTKNYKKYILKDPKIQNDKCRKCHRAPETIQHITSACSSLAQTDYTHRHNQIVHIVHQKIAIKYNFIEPSKVVPYYQYVPKPVLENQTHKMYFDRAILTDKTIHNNRPDITLVDKLNKQAYLIDIAIPNTNNLQKTITDKINKYTELKEEIGRIWKMKKVYIVPLVLSSTGIIPRHLLYYLNQIELPNNLFISMQKAAILNTCRIVRKFMLEDSPDENPQNDHHLA

SEQ ID NO: 20411 - protein, 1349 aa, Cephise aelius
MRLRSGYKLPQAGTGANRNGESRPEQSSSGSPTYSGGDTASQSSAQCHTVAEKKKSLPGGDRRGTPGADAGCHSMRSVSGEELSRRAPTGFTENVTADKYNEIDRQTDTRSNSPYSDSTTSYTPSIPTSPSSVSDTQTPTLAVAREANAFLPASTKAGKPRVRMSWSKDVNIFIIRTYYQITKLETDMTTYRKQLHERFSRKYPHVCVTEQRVSDQRRTIIRNKLLSQDLLNQLKEEVRRQLQDDSHHIRETGSSTHPQPDNALHSYEIQSQLSTQLPSQSHAHSSPLQTNIQISQNLTHTSTQTVIIPNIISPTQAAENAQNPELNQTDTILTQKLLNQLEATLVQYTGIDPTIRPKLPKLRENKKLYGLIEVFNKYILSRFCSTDSDIISIHTLIYCSALVISENLGCKIRTLDSNKQIRSRKDVKPAWQTRIESDVKKLRADIGRLTQYINNNRSRRVVAAVEDIFKQNKLHTIHERNNIRLEEYLDTLKQKLRLKSQRLVRYNKALQRKEDNKLFTANEKGFYRTVKTGIESSRDSEMPQENALKNYWTDIWQKEKHHNHKAQWIEREETNMKNIEGMELVDITKDDIESVTRRMKNWKAAGIDNVHNFWYKKFYTLHYILAKNITELINGEQQLPKFVTKGITFMLPKSNDTTDPSQYRPITCLPTIYKLITSLITRKINKHLEQYNILSEEQKGCRQNHKGCKEQLIIDSVVLKHASTYKRNLHISYIDYKKAFDSVPHSWLIQVLKLYKINPVIINFLENAMSDWRTTLHLSNGTSSITTDEIQIRCGIFQGDSLSPLWFCLALNPLSNLLNSCKSGYQLSNGNSITHLMYIDDIKIFGKTDKELNNLIDITTQYSQDINMTFGLDKCRILHIRKGKVSPTGGNLGESNIFDQMEPADSYKYLGFYQSNKLNHQQIKKDLSLEYTRRLNLLCKRHLGSKNLFKAINTFAIPVLTYSFGIVKWTKTDINNLEIKSRTSLTKHNYLHPKSAIERISIKRQRGGRGLVDLKLLWEGQIQNLRDFFYMKSITSSIHSNIIQLDNNFTPLNLSNRNIQNNTKETHLNNKLNRWRSKELHGRHLHDLELPHVDLEASNKWLKLGYLFPETEGFMIAVQDQVINTKNYRKNILKDPKITNDKCRKCHGASETIQHITSACSSLAQSDYTHRHNQIANIVHQKVAIKCNFIKPSEAVPYYQYIPKLVLENRTHKIYFDRAILTDKTIYNNRPDITLVDKLNKQTYLIDIAVPNTNNLQKTITEKINKYTNLKEEIIRIWKMKKVYIVPLVLSSTGVIPKHLLYYLKQVGLPSNLFITMQKAAILNTCRIVRKFLQEELHCENPQNELHLV

SEQ ID NO: 20412 - protein, 1180 aa, Telemiades fides
MTWSKDVNMFIIRTYYQITKLETDMTTYRKQLHEQFSRQYPLITVTEQRISDQRRAIVRNKLLSEQIMNQLKEEVRKQLEENTEQAPELNPIIQNYTCTNQTQSLLYTNLPPQPHTLGETLPQTNIVTSHTSLPTITLPNIAHTGITHTEIAHTEMPNIAHTSTEELISQVETALSQYSGTDPTMRPKLPKLRENKKLHVLIDNFNKHILNRFYSIDSDLLSIHTLIYCCALVISEHLGYKIHTHNSKKQMFRTRNLMKPAWQIRIESDVKKLRADIGRLTQYMNNNRSRKVVEAAENIFKHNKLHTVYERNNIRPEEYLDTLKQKLKLKSQRLARYTKAQKRKEANKLFTANEKGFYRTVKTNVESSNISELPQENELKNYWTDLWKKQKSHNHDAEWIGREEFRMEKVEVMELFEVSSKDMESVTRCLKNWKAAGIDNIHNFWYKKFYTLHNILAKNITELIKGDQQLPKFITKGITYMLPKSENTTNPSQYRPITCLPTIYKLITSLISRNINAHLEHNNILSEEQKGCRQNHKGCKEQLIIDSTILKHANTHKRNLHISYIDYKKAFDSVPHSWLIQVLKLYKINPVVINFLENAMSDWRTTLYLSNGTDTITTDEIRIENGIFQGDSLSPLWFCLALNPLSNFLNSTSNGYKLNNNNSITHLMYMDDIKLFAKTGKALQNLIDITTQYSNDINMTFGLDKCRILHIRKGKATCGSSNLGDSTTFDLMEPSDSYKYLGFYQSNLINHTKIKNTLTSEYIRRINILCKRQLNSKNLFKAINTFAIPILTYSFGVVKWTQTDIANLEIKCRTSLTKNNYLHPKSAIERIEIKRQRGGRGLIDLKSLWEQQIQSLRDFFYTKSTTSNIHLDIIKLDNNYTPLNLNNRNITYNTQEYHTNSKIDRWRSKKLHGRHLHDLEQTHVDLEASNKWLTLGCLFPETEGFMLAIQDQVINTKNYKKFILKDPKIQNDKCRKCYRASETVQHITSGCPSLAQTDYTHRHNQVAHIVHQKLAIKYNCIQPSKAVPYYQYTPNPVLENRTHKIYFDRAILTDKTIHNNRPDITVIDKLDKQAYLIDIAIPNTNNLQKTITDKINKYTELKEEIGRIWKMKKVYIVPLVLSSTGVVPKHLLYYLTQIGLPSNLFITMQKAAILNTCRIVRKFMQEDSPDENPLNDHHLA

SEQ ID NO: 20413 - protein, 1383 aa, Coccinella septempunctata
MEASETASGVGTAPGGRPAQSLVENSEASGATLRNGTTRPRRSNRIGGGNSLDRSTTQDNPAITQKPKRQHWTREMNVSLINAYFEATEGETKTKKYAEKLAGIWAESHPGKPFTGKHLIAQVKNIKTRKLLALDEIEAIKANIARNSMGGTVENIRRSIQRRSTTAQPPTEEDEREHQLIEPEFDEVARGMRTLYQQVTMKWEGIEIDRRPKIPRIDQNQNTRETVQAVNNALGPEFKNARNLEELCHTVYCAATVTSIILKIEDKKTTQVKRHQQRPPWEERIQKKIINLRKEIGVLHAYLNNTSPSTRVENKIKEYTRKLKLKKKEPQYKERIKTYTEGLKQRIAALGNRLRRYNKRTQRYRDNNLFANNQRQFFRKLDEDKNVQTTKTPSPTDMHKYWSKIWSNKGTHNTEATWIEQEKKKHANLQEMSTMNIEEEDVKNTIKRMKNWTTPGIDGIHNFWWKSFSHTHQTLARLIQEAIENPNKIPKYFTHGTTLMLPKKGDLTQPENYRPITCLPSAYKIITSTIGHKIRTHLKTNNIMAWEQAGCRENGRGSKELLMIDSILTRQAKRKLKNLSMAWIDYRKAYDSVPHSWLLEVLEIYKVDKKIIKLIESLRSMWRTTLTVNTERTKYNTEEIKIEKGIFQGDGLSPLLFCLALNPLSNMLNRSEYGYKIEEQKKITHLFYMDDLKLYARGKKQLEGELELVRRFSTDIGMRFSLEKCATVEVKRGKLVEGENIRLADGREMANMKAEDRYKYLGIQQTYEIKQQENKKAAETELIRRTRKIVNSQLSAKNKINAINIWAIPTFTYTAGILNWSKTDLENLDRRIRTTLTQQGMLHPNSAIERLYLPRKEGGRGLSSLEHTCLKEEKKLTQYFGKNNLPLHQWIAAQRRIASTSRNIQEEDPAEKLRNKWKSKALHGRFFNSLQQPEVDMTTSNTYLKQGYLFPQTEGTLQAIQDQVVPTRTYLKHILQQQVETTKCRLCNSAEETVQHLTSGCTTIANTKYLTRHDNMGKVVHQLICLQKELIPHFTPHHVYAPQTLKENEQFKIYWDLTIITDRRVVHNRPDMVIFDKVNKTAIIIDFAVPQDQNLTKTYTEKMTKYEALAQQIRDMWKLRDARIMPLIISANGLVHRKTTQHLLELKLPQNTIMWMQKAVILVASCLAALRRLFRLMRDNGYSNIFLKKLIYNAPRLPEPTEALNEVNNEENRVCFAKLPYIKEVTFELTKLFKKFINIKISRYNMVVARSLYKSTKDKLNISKIKNVIYKINCKHCPLFYIGQTSQGLDRRMALHKSDSVLRPERCALASHINNTGHAVDYDNIQVLDHEQEYQKRTFLEMCYINENKNSTMNKKTDTNNLSNIYSFLLTCDKKNRYSPNIS

SEQ ID NO: 20414 - protein, 951 aa, Zygaena filipendulae
MASNSLSSTCPLCPGSSRVFGPHGLSVHMGRMHKGVSGRGATTTDRAPILSASGPSVGPVRSLDDLSSLRNTVRVLKHIPRGARSTAAGKLYEIINNCVDKNQVDDWYSLLTFAYSALKTPDATGPGNLTSKVKSNVETVGTQSPQFDNVSGGSFSGRPSIWRTIEGKVFEGDIRGAARVLMSEDAVASASPEVLASLRAKHPSPSRPLVFPQAPDRSIPALTVSVEEVAQAVGSFHNASAAGLDGMRPAHLKELTSGSAGDNGRRLLESLTKLCNFLLSGQLNLEVCPYLYGASLCALTKKDGGVRPIAIGSSFRRLVGRLGCRSVRADLATYLQPHQLGFGTRLGCEAAIHATRTFAMERENAGAVIVKLDVRNAFNTVERDVLLTEVQEKTPTLYPFLFQAYRYPSYLFYNGTRILSQVGAQQGDPLGPLVFSLAIHKAVTELRSPLNVWYLDDATIGGRPEVVAQDLAKLLPCLREVGLVVHSSKCEFFPCGDIVRSVFSRFSSILPGLRELSPDNFNLLGSPIFPAAVPGAVEARRQLLLFTRERLRGVSTHVALTLLRMCCAMPKMTYLVRTAPTWLCPMEVDAFDRTLRDTMESILNVSLDSRQWDQATLPIRFGGLGVRSVGGVGLPAFLASAHGVADLVTVILPSVSDWEGIPLVAEAMAAWGALNPGAPVPATLSSQRAWDDIGVKRLLDQLIDESGGADLARLRAVSQPESGAWLHALPSPQLGTLLDGDSVRVAVALRLGCDVCEPHLCICGAMVEAKAHHALSCRRSAGRFPRHHALNDIVRRALVSANIPCVLEPPGLCRSDGKRPDGLTLVPWERGRCLLWDATCVSTVAASHLGRTVASAGAAADFAAQRKRDKYSQLERDYVFVPLAVETSGCWGKDTKQFITEIGRRLRESGGDPRSGSFLAQRLSVAIQRGNAASVRREQPRPAVFYDYDFY

SEQ ID NO: 20415 - protein, 950 aa, Zygaena filipendulae
MASNSPSSTCPLCPGSSRVFGPHGLSVHMGRMHKGVSGRGATTTDRAPILSASGPSVGPVRSLDDLSSLRNTVRVLKHIPRGARSTAAGKLYEIINNCVDKNQVDDWYSLLTFAYSALKTPDATGPGNLTSKVKSNVETVGTQSPQFDNVSGGSFSGRPSIWRTIEGKVFEGDIRGAARVLMSEDAVASASPEVLASLRAKHPSPSRPLVFPQAPDRSIPALTVSVEEVAQAVGSFHNASAAGLDGMRPAHLKELTSGSAGDNGRRLLESLTKLCNFLLSGQLNLEVCPYLYGASLCALTKKDGGVRPIAIGSSFRRLVGRLGCRSVRADLATYLQPHQLGFGTRLGCEAAIHTTRTFAMERENAGAVIVKLDVRNAFNTVERDVLLTEVQEKTPTLYPFLFQAYRYPSYLFYNGTRILSQVGAQQGDPLGPLVFSLAIHKAVTELRSPLNVWYLDDATIGGRPEVVAQDLAKLLPCLREIGLVVHSSKCEFFPCGDIVRSVFSRFSSILPGLRELSPDNFNLLGSPIFPAAVPGAVEARRQLLLFTRERLRGVSTHVALTLLRMCCAMPKMTYLVRTAPTWLCPMEVDAFDRTLRDTMESILNVSLDSRQWDQATLPIRFGGLGVRSVGGVGLPAFLASAHGVADLVTVILPSVSDWEGIPLVAEAMAAWGALNPGAPVPATLSSQRAWDDIGVKRLLDQLIDESGGADLARLRAVSQPESGAWLHALPSPQLGTLLDGDSVRVAVALRLGCDVCEPHLCICGAMVEAKAHHALSCRRSAGRFPRHHALNDIIRRALVSANIPCVLEPPGLCRSDGKRPDGLTLVPWERGRCLLWDATCVSTVAASHLGRTVASAGAAADFAARRKRDKYSQLERDYVFVPLAVETSGCWGKDTKQFIIEIGRRLRESGGDPRSGSFLAQRLSVAIQRGNAASVMGTFPPGATQTGGFL

SEQ ID NO: 20416 - protein, 950 aa, Zygaena filipendulae
MASNSLSSTCPLCPGSSRVFGPHGLSVHMGRMHKGVSGRGATTTDRAPILSASGPSVGPVRSLDDLSSLRNTVRVLKHIPRGARSTAAGKLYEIINNCVDKNQVDDWYSLLTFAYSALKTPDATGPGNLTSKVKSNVETVGTQSPQFDNVSGGSFSGRPSIWRTIEGKVFEGDIRGAARVLMSEDAVASASPEVLASLRAKHPSPSRPLVFPQAPDRSIPALTVSVEEVAQAVGSFHNASAAGLDGMRPAHLKELTSGSAGDNGRRLLESLTKLCNFLLSGQLNLEVCPYLYGASLCALTKKDGGVRPIAIGSSFRRLVGRLGCRSVRADLATYLQPHQLGFGTRLGCEAAIHATRTFAMERENAGAVIVKLDVRNAFNTVERDVLLTEVQEKTPTLYPFLFQAYRYPSYLFYNGTRILSQVGAQQGDPLGPLVFSLAIHKAVTELRSPLNVWYLDDATIGGRPEVVAQDLAKLLPCLREVGLVVHSSKCEFFPCGDIVRSVFSRFSSILPGLRELSPDNFNLLGSPIFPAAVPGAVEARRQLLLFTRERLRGVSTHVALTLLRMCCAMPKMTYLVRTAPTWLCPMEVDAFDRTLRDTMESILNVSLDSRQWDQATLPIRFGGLGVRSVGGVGLPAFLASAHGVADLVTVILPSVSDWEGIPLVAEAMAAWGALNPGAPVPATLSSQRAWDDIGVKRLLDQLIDESGGADLARLRAVSQPESGAWLHALPSPQLGTLLDGDSVRVAVALRLGCDVCEPHLCICGAMVEAKAHHALSCRRSAGRFPRHHALNDIVRRALVSANIPCVLEPPGLCRSDGKRPDGLTLVPWERGRCLLWDATCVSTVAASHLGRTVASAGAAADFAAQRKRDKYSQLERDYVFVPLAMETSGCWGKDTKQFITEIGRRLRESGGDPRSGSFLAQRLSVAIQRGNAASVMGTFPPGATRTGGFL

SEQ ID NO: 20417 - protein, 950 aa, Zygaena filipendulae
MASNSLSSTCPLCPGSSRVFGPHGLSVHMGRMHKGVSGRGATTTDRAPILSASGPSVGPVRSLDDLSSLRNTVRVLKHIPRGARSTAAGKLYEIINNCVDKNQVDDWYSLLTFAYSALKTPDATGPGNLTSKVKSNVETVGTQSPQFDNVSGGSFSGRPSIWRTIEGKVFEGDIRGAARVLMSEDAVASASPEVLTSLRAKHPSPSRPLVFPQAPDRSIPALTVSVEEVAQAVGSFHDASAAGLDGMRPAHLKELTSGSAGDNGRRLLESLTKLCNFLLSGQLNLEVCPYLYGASLCALTKKDGGVRPIAIGSSFRRLVGRLGCRSVRADLATYLQPHQLGFGTRLGCEAAIHATRTFAMERENAGAVIVKLDVRNAFNTVERDVLLTEVQEKTPTLYPFLFQAYRYPSYLFYNGTRILSQVGAQQGDPLGPLVFSLAIHKAVTELRSPLNVWYLDDATIGGRPEVVAQDLAKLLPCLREVGLVVHSSKCEFFPCGDIVRSVFSRFSSILPGLRELSPDNFNLLGSPIFPAAVPGAVEARRQLLLFTRERLRGVSTHVALTLLRMCCAMPKMTYLVRTAPTWLCPMEVDAFDRTLRDTMESILNVSLDSRQWDQATLPIRFGGLGVRSVGGVGLPAFLASAHGVADLVTVILPSVSDWEGIPLVAEAMAAWGALNPGAPVPATLSSQRAWDDIGVKRLLDQLIDESGGADLARLRAVSQPESGAWLHALPSPQLGTLLDGDSVRVAVALRLGCDVCEPHLCICGAMVEAKAHHALSCRRSAGRFPRHHALNDIVRRALVSANIPCVLEPPGLCRSDGKRPDGLTLVPWERGRCLLWDATCVSTVAASHLGRTVASAGAAADFAAQRKRDKYSQLERDYVFVPLAVETSGCWGKDTKQFITEIGRRLRESGGDPRSGSFLAQRLSVAIQRGNAASVMGTFPPGATQTGGFL

SEQ ID NO: 20418 - protein, 912 aa, Anentome helena
MLFIDCTVFPCLRRQHRLTLGRPTQRSARRIDRHELTQLWQSKQKRAIEIINNSVVETRADCPIDPVRLTEFFQSKSENCLQYPLSHPPWPDTINPPPPQSDVNLRPFTTAEVSSVVKSLKNNTAPGYDGAEYSVLKKKLSKIVDVLTAIFNVCWRNRRINIDWKHASIILLPKKEGNPDQPGDWRPISLLTSSYKIYMKLLQSRVLPWIVATGRLSDRQKGSLPRNGLQEHVFCLKSAIEDFKHISTSFFTTFVDIRDAYGSVDHQVMLDSMVRAGYPQHVIDVTADVYNGSTFQVQARGGLTPRITRHKGIVQGCPWLAIAFIQALDPWIRWMEQPFAADALPTPCQAYMDDVCAYKEGDIRSMMDKTEAFLDYTGMQVKHQKCAIIHAQRTGTNWSARDHTANVKLAVQGEAIPKFGKETPYTYLGFQVNVTGMASKDQAEKARDDFIATVDNISASPLPVNKKIDAVNVMAASKLNFYFSNLTFTEKILRQLEDCITNFVRELLKLNTSSTRAQIFTPRKCGGLGLLKPSTMFHAKRISFLLSALNSDDQHVRHAARESFALNMQKRRVPLAELDEDSFGGYTVDDRYRLQKQSRVYWPRSCWVELHELCSRLNAKLEYDEGNDLYGVVLPADDDDVIQFRYVDHQQLYSAIKRLEVSKDLQHFRSLQRQGRLQREALPHTDMSCSVGHLTNSGINDHLTRFVTKGRLQLLETYAVNSTYFPAEYTTACPLCAFQWDTNSHALNCCRRLKGLYTERHDRCVELVRRELEKTVVTDHVALYENQPISLDGGIYIDNSRPDLCLIDHSNSVAFIVELANPFDCFLDQCYRSKFDKYMPLCLLMKDQGFDTKVIVLVIGSLGSVHRRVVPGLRMLGLSQRQSKGLARYLSVSVMIGSRRVWCRRSCMVNNC

SEQ ID NO: 20419 - protein, 1191 aa, Paedocypris sp.
MSRKGIELDGASPSITRHHGEPRGRVNPIMARPPDVSYGTRRRAVGLGPLGTGFDETVGLRDCVVRLERIRPEQLRHLSIVEQASPVGTGSAGSPRVAEMTAVAPQRGVTEGTAAGIVVMLPLKGFRCPLCKKTLDRLWIVHSHFRIKHKRATVKYSCAKCGKTGDHSHPISCHVPKCRKRSIGTNGLHVCDLCSKGFKSIRALSTHERHTHPALRNEKRKRALSRAGDPEGLLAVDKMGISAGPSGLNALGEDKHSVKRARMEPGIDGTRQDALGIERADSVVTKHLKTVALMGSPNLIGEDEELIDILKLWAEGTVDVTQRADDLTQRILSIFVTTTQVRSLSRATQTWRSLKRLKKRKRLRVKLKAKRKAYHDQQKIFYKDPARLARQILDGKTSPMCTINKKEVWTAYKNKWATTAHFGGLGQFCKGATADNSHLCGALSLQEVTDALGSTKNDTAAGPDGITKQDILARDPQSRLLTILYNLWWFTGRVPKCCKTARTVLLPKSQDLGALESLNNWRPITIGSLLLRLFTKIVTKRLTRASTISVRQRGFRTAPGCSENIEILKSLVQDAKDKSRQLAVVAVDFAQAFDSVLHEHLWATLGASAVDRHVVGLIRNTYEGSQTVIELLGTKTPLIDMKVGVKQGDSLSPILFNLALDPLILTINELGEGYTIRGHTAATLAFADDLVLIGKSHDGMQRSLDLLGEFCLATGMKVNIGKCHGFLLTPTRGSFVVNACSPWSIAGNPLRHTGVGEVFKYLGVKLNPWAGVVKSDPVGMLERWVDKIEHCLLKPSQKVKILNIYAIPRLFYDLDHSDANRGVLLRLDGMIRKAVKGWLHLPTSTCDGLLYASKADGGLGIWKPSCHIPSTQARRIHRLARSDDAMTRAVMRDPRVEKRYRRCWLRAGGKETERPPLFEESADGTRGHDPDSVIAERPRPCRWRDDEFAKWAELSVQGRGIRNFKADKISNDWLRKPGGFRERHYIAALQLRANVYPTREFKQRGRQDAPATCRLCKAHTETATHILGECPAMVRSRTTRHNKICVLLAAEAVRLGWRVEREYGFEIGDGRARRLDLVFARAGRALAADVTVRYESSDDTLERARLEKMLHYGPFEHQIKSKLGVQSIQIFGFPIGARGLWPKKNHELLKALGLAGGRSRVFAKLLCRRAILGSLDILRDFDLECKARACT

SEQ ID NO: 20420 - protein, 1193 aa, Paedocypris sp.
MSRKGFELDGASPSITRHHGEPRGRVSPIMARPPDVSYGTRRRAVGLGPLGTGFDETVGLRECFVQLERIRPEQLRHLSNEELASPVGTGSAGSPRVAEMTAVAPQRGAPEGTAAGLVVMLPLNGFRCPLCNKALDRLWQVHSHYKIRHKRATVKYSCAKCGKTGDHSHPISCHIPKCRKRSKDTYASNICDLCNKGFKSTRALSTHERHTHPALRNEKRKRALSRAGDPEGLLAVDEMGTNAGPSGLNALGECTHSVKRARLKHGIDGTGREAQGDRQDSHPVTGNLKSIALRGSAALDGEDEELRKILRLWAEGQVDVTRLVYDLTRRILSIFKRGTRVASLPISAPSRRGLKKLRARGRIHRKLIRRRTAYHKEQRDFRKDPARLAKSILDGGDSPACTIKTLEVWTAFKKKWGEVSPYGGLGRFCVGAEADNSHLCGALSLQELTDALVATKNDSAAGPDGITKGDILAKDPQCRLLYKMFNAWWFTGIVPSTCKRARTVLIPKSTNPTSTESLKGWRPITIGSLLLRLFTKLVTKRLTEACAVSTRQRGFRTAPGCSENIEILKGLVHNAKTKGKTLAAVAVDFEQAFDSVSHDHLWDVLEMRKVDRHVVGLIKHVYEGSQTEIELSGTKTPPIDLLVGVKQGDPLSPILFNLALDPLLLTMEELGEGYTVRGHTATTLAFADDLVLVGESHEGMQRSLDLLSEFCLVTGMKVNIGKCHGFLLSPMRGSFTVNACLPWTISGTPLRHTGVNETFSYLGVKINPWAGVEGSEFAGRLGTWRTRIECSRLKPSQKVKILNDYAIPRLLFELDHCDAGRGVLLGLDGVIRRTVKGWLHLPMSTCDGLLYARKKDGGLGLWKLSRHVPSTQARRIFSLVKSDDAMTRAVMRDPRVEERFRRCWLRAGGKDMDRPPLFEEVQVGTDECDPVSRIASRSLPCKWRDDEFARWTELEVQGRGILNFKSDSISNGWLQKPGGFRERHYIAALQLRANVYPTLEWRNRGRWDTPVSCRLCMSRQETASHILGECREMVRSRYKRHNKICALLEAEAVRLGWEARREYGFDIGEGGTRRIDLVLIRAGRALAIDVTVRFESARDTLELARLEKLLHYGPFEHHIQSTLGVQSVTVYGFPVGARGLWPKTNNEVLEALGMKGRRLRFFAKLTSRRAILGSIDILKDFGLECKSRAGTPE

SEQ ID NO: 20421 - protein, 1041 aa, Sesamia nonagrioides
MYGRTSGLPQEPEVSALKPISPSARSPPPSRREEGDWTCPECSRAFRTKIGLGVHLRRAHPITANAAAAPPQVKRRWREEEGELLARTEARLIGAGSSASNINQLLVRELPQLGRSLEAIKGYRRKEAYRCLVQKCLEDLNERPPPCSPTVIMTAGTAESPISEQPIVRVEAPSEDTPVPVILQSPDLSSAVDPAKVVEELLMRSEARMARGAQDGKRRGRPRRESQTKSASAKISTRKRRRIEYARVQQLFKTCRSRAAAEVIDGQTRGVSHNLSELEAYWRPVMEAVSDAPGLTPEVLCALNRSEQYGGRRDYSQLWSPFTPEEVKMSRVDNKSAPGPEGIFPGAWNALGAVTQAEIFNAWLLAGEVPDKLRGCRTVFVPKTETPAGPGEYRPISIASVPLRHMHSVLARRLEACCPPDARQRGFICVDGPLENSAVLDAVLGDCGKKLRECHVAVLDFAKAFDTVSHAALIDLLRKRGLPEGFCDYVAKLYETSKTVLVANGVRSGPVSVGQGVRQGDPLSPLLFNMAMDVILASLPEGVGYRLEGDSVSALAYADDLVLLAGSQAGMQSSIDCVWRTGRMMGLFVSHAKSAVLSMVPDGKRKKVHYLTGRTFKVGSRWLRQVSCIERWRYLGVDFKASGCVRLEHDVKVALTNISKAPLKPQQRLEIVRTHLLPRFLHGLVLGGITDDRLRMLDVQIRRAVRSWLRLPKDVPVGYFHAATADGGLGIPSLRTWVPDLIKKRFGRLDSSKWSVARAAARSERIRRKLQWADKQLLKFSAVNPKSGERTTSAYWREVLHATVDGHELRESPRVPASTKWIREKCMQYTGRDFVQFVHTHINALPSRVRNTRGRRTGVLSELNCRAGCMVRETTAHTIQQCHRTHGGRIERHNCVVDVVSSAMADKGWTVVKEPRVKTAAGLRKPDIIASRHGVGVIVDAQVVSGQRPLDELHRVKRSKYGNHDELVEKVAAILGLPCKQSVHSTSCTLSWRGVWCHASYRELKRYVGLDEGVLANLPSLVLRGSHMNWSRFNRMTTRID

SEQ ID NO: 20422 - protein, 988 aa, Papilio dardanus
MNAEAAPQQVKRRWREEEVALMARTEARLLEETGNCTNVDLLNCLTGFDRTLEAIKGKRRGVDYRSLVQRCREELQTPVWGDKQNSRDSSQLVQETERPESPVQPQPSPCRSPPVADDPNPRDESVPGTSCASRIVDDLLSVAAARRARYELGAKSARRFRIKCPNVTQQADNALAGLSSRKRRRIEYARVQELFRKSKSRAAAEVIDGVHRRVGHTLEQLESYWRPVLERVSDASGPTPESLRALRRAEGGGVQRDYSDLWRPFTSDELKAASFDWQTAPGPDGIRPDEWRQVPWDLKAEIFNSWLSSGDVPEPLRQCRTVFVPKTDVPACPSDYRPISIASIPLRHMHSVLAKRLLDCCPPDVRQRGFVRADGTLENSAVLDAVLGDCRKKLRECHVAVLDFAKAFDTVSHKALIELLRARGLPVPFCDYICRLYETATTTLVVDGKSSKPAHVGRGVRQGDPLSPILFNMAMDVILASLPSEVGYRLEAERVSALAYADDLVLLAGSKVGLQESIDRVFEVASSMGLLINHKKSSVLSMVPDGKRKKHHYLTEKTFKVGRMWLPQTSCVERWRYLGVDFQASGCVTLEHDIKNVLSNITKAPLKPQQRLEIVRGHLIPRFLHGLVLGNISDNRLSLLDVQIRGAVRKWLRLPKDVPVGYFHADIKDGGLAIPSLRTVVPNLIIKRFGRLDSSSWSVARAAARSERISKKLRWAQKQSKRFTDGDPVTGVSSEARYWRKKLWSSVDGYELRESARTPASTKWIREECSRFTGRDFVQFVHTHINALPSRVRTSRGRGVDRESAWTCRAGCMASETTAHTIQQCWRTHGGRIERHNCVVRLVAEAMTSNQWSVKLEPHVKTARGLRKPDIVAAKGNVGVIVDVQVVSGQRPLDDAHREKRNKYGTHEELVEKVAGILGLPGKQNVRATSCTISWRGVWSHSSYKEMKSLLGLKESLFKALPSIVLRGSHINWTRFNQMTGTGAGTPV

SEQ ID NO: 20423 - protein, 964 aa, Papilio clytia
MARAEARLLEETGRCTNVDLLNCLTGFDRTLEAIKGKRRGGEYRSLVQACRDELRQPPRGDTQSRDSTQPETEGVELSVQPQAPPKTSSPVADDPSPRDESVPEMSCAARIVEDLLSAAAARRARHGLGAKSARRFRIKFNSNVTQADTALAGMSSRKRRRIEYARVQELFRKSKSRAAAEVIDGAHRRVGHGLEELESYWRPVLERVSDATGPTPGALRALRRVERDGGQRNYSGLWRPFTSEELKASSFDWQTAPGPDGIRPDEWRQVPVARKAEIFNSWLSSGEVPEPLRQCRTVFVPKTDVPAGPGEYRPISIASIPLRHMHSVLAKRLLDCCPPDVRQRGFIRADGTLENSAVLDAVLGDCRKKLRECHVAVLDFSKAFDTVSHKALVELLRARGLPVPFCDYICRLYETATTTLVVDGKSSKPARVGRGVRQGDPLSPILFNMAMDVILASLPSEVGYRLEAERVSALAYADDLVLLAGSKVGLQESIDRVFEVASSMGLTINHKKSSVLSMVPDGKRKKHHYPSEKTFKVGRMWLPQISCVERWRYLGVDFQASGCATLEHNIKNALNNISKAPLKPQQRLEIARGHLIPRFLHGLVLGNISDDRLSMLDVQIRGAVRKWLRLPKDVPVGYFHADIKDGGLAIPSLRAVVPDLIIKRFGRLDSSSWSVARAAARSERIRKKLRWAHKQSLKLTREDPVTGLRSVARFWREKLWNSVDGFELRESARTPASTKWIREECPRFTGRDFVQFVHTHINALPSRVRTSRGRRIDRESQLKCRAGCAANETTAHTIQQCWRTHGGRIERHNRVVRLVAEAMTSNQWSVTLEPHVKTASGLRKPDIVAAKGNVGVIVDVQVVSGQRRLDDAHREKRSKYGSHVELVEKVAGILGLPGKECVRATSCTISWRGVWSHSSYKEMKSLLGLKESTFRLIPSIVLRGSHMNWTRFNQMTGVDVGAPV

SEQ ID NO: 20424 - protein, 1070 aa, Papilio ambrax
MGAPGGRVCSPTANGSKTKATNPEHVSGHPDLPQESGSLTHSPATRTGASAQESVAGWSCAVCGRSFTTKTGLGVHKRRAHPIETNAEAAHASVKRRWREEEVALMARTEARLLEETGRCTNVDLLNCMTGFDRTLEAIKGKRRGNDYRSLVQKCRDELKLPPWGDNQSRDSLQPVQESERAESPVQPRPSPVRTPSVVDDPNPRDESIPSTSCASRIIDDLLTVAAARRARFELGAKSAKRFRINFSNVTEADNANVRLSSRKRRRIEYARVQELYRKSKSRAAAEVIDGAHRRVGHTLEQLESYWRPVLERVSDATGPTPGALRALRRAEQDGGQRDYSELWRPFTSDEVKASSFDWQTAPGPDGIRPGEWRLVSCDHKAEIFNSWLSAGEVPEPLRQCRTIFVPKKDVPADPSDYRPISIASIPLRHMHSILAKRLMDCCPPDVRQRGFVRADGTLENSAVLDAVLGDCRKKLRECHVAVLDFSKAFDTVSHEALVGLLRARGLPGAFCDYICRLYATATTKLVVDGKSSTPARVGRGVRQGDPLSPILFNMAMDLILASLPPEVGYRLEAERVSALAYADDLVLLAGSKVGLQESIDRVFEVASSVGLLINHKKSSVLSMVPDGKRKKHHYLTGKTFKVGRMWLPQTSCVERWRYLGVDFQATGCVTLEHDIKNALNNITKAPLKPQQRLEIVRGHLIPRFLHGLVLGNIKDDRLSMLDVQIRGAVRKWLRIPKDVPVGYFHADAKDGGLAIPSLRAVVPDLILKRFGRLDSSSWPVARAAARSERISKKLRWAQKQSKKLTKEDPVTGRRSVARYWRKKLWDSVDGYELRESARTPASTKWIREECTRFTGRDYVQFIHTHINALPSRVRTSRGRQIVRESASKCRAGCAANETTAHTIQQCWRTHGGRIERHNRVVRLVAEAMTSNQWSVTMEPHIKTAKGLRKPDIVASKGDLGVIVDVQVVSGQRPLDDAHREKRNKYGNHEELVERVAGILGLPGKENVRATSCTISWRGVWSHSSYKEMKALLGLKESTFVLLPSIVLRGSHMNWTRFNQLTSTCAGTPV

SEQ ID NO: 20425 - protein, 1052 aa, Hypermnestra helios
MEKRRNNLFCHPGLPQESGSLAQTSATQAGTSSSVSVVNSNWTCPVCERAFTTKTGLGVHKRRAHPEVANVEAAPNMVKRRWRDEELALMARTEARLLEETGRCTNVDLLNSLSGFERTLEAIKGKRRCGEYKRLVQACRDELQTPIMSSQASESRGSALPQSETVPPSVRPLPVEDESPVADDPSPRLEGVPVDTCADQIIAELLERAEVRRSRHDLGSRSARRHRIKPNVTRADTALTGMSSRKRRRIEYARVQELFKKCRSRAAAEIIDGVHRSVRHSLEELEAYWRPVLERVSDASGPTPEALNALRREEQHGGARDYSRLWMPFTTDEVKASTFDWQTAPGPDGIRPDEWRQVPAARKAEIFNSWLSNGVIPEPLRQCRTIFVPKTDDPAGPGDYRPISIASIPLRHMHSVLARRLLACCPPDARQRGFVHADGTLENSAVLDAVLGDCRKKLRECHVAVLDFSKAFDTVSHRALVELLRARGLPVAFCDYIHRLYDTAATTMVVGGQSSQPAKVGRGVRQGDPLSPILFNMAMDVILASLPKEVGYRLEMERVSALAYADDLVLLAGSKVGMQESIDCVFRVASTMGLMINHKKSSVLSMVPDGKRKKHHYLTGKNFRVGRMWLPQTSCVERWRYLGIDFQSSGCVALEHDVKVALTNITKAPLKPQQRLEIVRGNLIPRFLHGLVLGNISDDRLSMLDVQIRSAVRNWLRLPHDVPVGYFHADVKDGGLAIPSLRATVPDLILKRFGRLDSSSWPVAKAAARSERIRKKLSWADKQFRKFTNEDQVTGLRSVSRFWRDKLWNSVDGFELRESARTPASTKWIREESSHVSGRDFVQFVHTHINALPSRVRTSRGRRIGRESELNCRAGCAVRETTAHTIQQCWRTHGGRILRHDRVVRLVAQAMASDQWSVVMEPHVKTSKGLRKPDIVAAKGGVGVIVDVQVVSGQRPLDDAHREKRSKYGTHEELVEKVAGILGLPDKDCVRATSCTISWRGVWSHSSYKEMKRLLGLKESLFRTIPVLVLRGSHMNWTRFGQMTGAAAGGPE

SEQ ID NO: 20426 - protein, 975 aa, Parnassius imperator
MVKRRWRDEELALMARTEARLLEETGRCTNADLLKSLSGSERTLEAIKGKRRCGEYKSLVQACRAELKTPKICSQASESRGSARPESESVELAVQPLPAEDAPPVADDPSPHLGGVPDNTCADQIIADLLERAAVRRSRHGLGSRSARRRRISNVTRADTALAGMSSRKRRRIEYARVQELFQKCRSRAAAEVIDGVHRSVRHSLEDMEAYWRPVLERVSDAPGPTPSALNALRREEQYGGARDYSRLWVPFTTDEVKASKFDWQTAPGPDGIRPDEWRLVPAARKAEIFNSWLSSGVIPEPLRQCRTIFVPKMDDPAGPGDYRPISIASIPLRHMHSVLARRLLACCPPDARQRGFVRADGTLENSAVLDAVLGDSRKKLRECHVAVLDFAKAFDTVSHRALVELLRARGLPMAFCDYIHRLYDTATTTLDVGGQSSAPAKVGRGVRQGDPLSPILFNMAMDVILASLPKEVGYRLEMERVSALAYADDLVLLAGSKVGMQESIDRVFEVASSMGLLVNNNKSSVLSMVPDGKRKKHHYLTGKNFRIGRKWLAQTSCVERWRYLGIDFQASGCVTLEHNVKVALTNISKAPLKPQQRLEIVRGHLIPRFLHGLVLGNISDDRLCMLDVQIRGAVRNWLRLPKDVPVGYFHADIKDGGLAIPSLRATVPDLILKRFGRLDSSSWTVAKAAARSERIRKKLSWADRQIRKFTIEDSVTGLRSVARFWRERLWSSVDGFELRESARTPASTKWIREESSHVSGRDFVQFVHTHINALPSRVRTSRGRRIGREAELNCRAGCVVRETTAHTIQQCWRTHGGRIMRHDRVVGLVAEAMASDQWSVVLEPHVKTSKGLRKPDIVAAKGGVGVIVDVQVVSGQRPLDDAHREKRSKYGTHEELVEKVAGILGLPNKDCVHATSCTISWRGVWSHSSYKELKRLLGLKESLFRAIPVVVLRGSHMNWTRFSQMTGAAAGGPV

SEQ ID NO: 20427 - protein, 1089 aa, Meandrusa sciron
MGWAYVPAQVKSLFFGWGYTKAMGDSRRLGLQPDRNGQFFKQAIETNRGNIRHPDLPQESGSLAHSSATQPGAPAPESAVVNWTCPVCERTFTTKTGLGVHKRRAHPEIANAEAAPNMVKSRWRDEEVALMASTEARLLEETGRCTNVDLLKTLTGFKRTLEAVKGKRRGEAYRNLVQKCREEIRSSLASMSRGLASSESDSTVVSVQPQATEDIVTLASNDPVQRDEGVPEITCAARIVADLLARAEARKARHDLGAKSARRFRIKELTKADTAQLELSSRKRRRIEYARVQELYRKFRSRAAAEVIDGAHRRVRHSLQELESYWRPVLEAVSGAPGPTPEALRALQREERHGGERNYSRLWTPFSIEELKASSFDWHTAPGPDGIRPDEWRQVPVRHKAEIFNSWLTTGEIPEPLRQCRTVFVPKVDVPAGPGDYRPISIASVPLRHMHSVLAKRLLDCCPPDARQRGFVCADGTLENSAVLDAVLGECRKKLRECHVAVLDFSKAFDTVSHKALVELLRARGLPVAFCDYVCRLYDTATTTIVVDGKSGTPAHVGRGVRQGDPMSPILFNMAMDVILASLPAEVGFRLETERVSALAYADDLVLLAGSKVGMQESIDRVFRVAASMGLTINHKKSSVLSMVPDGKRKKHHYLTGRTFRAGRMWLPQITCVERWRYLGVDFQVSGCVTLEHDIKDALTNISKAPLKPQQRLEIVRGHLIPRFLHGLVLGNITDDRLSMLDVQIRGAVRKWLRLPKDVPVGYFHASIKDGGLAVPSLRAIVPDLILKRFGRLDSSSWSVARAAARSERIRKKLRWAHKQSGKFTRQDPVTGLRSVARFWQEKLWGSVDGFELRESARTPASTKWVREESARLTGRDYVQFAHTQINALPSRVRTSRGRRVGRESELNCRAGCAVRETTAHTIQQCWRTHGGRIERHDRVVRLVAEAMTSNQWSVVMEPKIHTSKGLRKPDIIAVKGGVGVIVDAQVVSGQRPLDDAHREKRNKYGTHEELVEKVAGRLGLPGRDSVRATSCTISWRGVWSHASYKEMKRLLGLKESTYNAITCFVLRGSHMNWTRFNKMTASGVVTPD

SEQ ID NO: 20428 - protein, 964 aa, Papilio slateri
MARTEARLLEETGRCTNVDLLNCLTGFDRTLEAIKGKRRGAEYRSLVQACRDEIKPPLWGDTQSRDSTQPETEGAELSVQPQSPPKTPPPVADDPSPRDESVPEMSCAARIVEDLLSVAAARRARHGLGAKSARRFRIISNSNVTQADTALAGMSSRKRRRIEYARVQELFRKSKSRAAAEVIDGAHRRVGHALEELESYWRPVLERVSDATGPTPGALRALRRVERDGGQRDYSGLWRPFTSEEVKASCFDWQTAPGPDGIRPDEWRQVPLARKTEIFNSWLSSGEVPEPLRQCRTVFVPKTDVPAGPGEYRPISIASIPLRHMHSVLAKRLLDCCPPDVRQRGFVRADGTLENSAVLDAVLGDCRKKLRECHVAVLDFSKAFDTVSHKALVELLRARGLPVPFCDYICRLYETATTTLVVDGKSSKPARVGRGVRQGDPLSPILFNMAMDVILASLPSEVGYRLEAERVSALAYADDLVLLAGSKVGLQESIDRVFEVASSIGLAINHKKSSVLSMVPDGKRKKHHYLTERTFKVGRMWLPQTSCVERWRYLGVDFQAAGCVTLEHNIKNALNNISKAPLKPQQRLEITRGHLIPRFLHGLVLGNISDDRLSMLDVQIRGAVRKWLRLPKDVPVGYFHADIKDGGLAIPSLRAVVPDLVIKRFGRLDSSSWSVARAAARSERIRKKLRWAHKQFMRLTREDPVTGLRSVARFWREKLWDSVDGFELRESARTPASTKWIREECSRFTGRDFVQFVHTHINALPSRVRTSRGRRVGRESQLKCRAGCAANETTAHTIQQCWRTHGGRIERHNRVVRLVAEAMTSNQWSVRLEPHVKTAIGLRKPDIVAAKGNVGVIVDVQVVSGQRRLDDAHREKRRKYGSHEELVEKVAGILGLPGKDNVRATSCTISWRGVWSHSSYKEMKSLLGLKESTFTLMPSIVLRGSHMNWTRFNQMTGTGVGAPV

SEQ ID NO: 20429 - protein, 1052 aa, Hypermnestra helios
MEKRRNNLFCHPGLPQESGSLAQTSATQAGTSSAVSVVNSNWTCPVCERAFTTKTGLGVHKRRAHPEVANAEAAPNMVKRRWRDEELALMARTEARLLEETGRCTNVDLLNSLSGFERTLEAIKGKRRCGEYKRLVQACRDELQTPIMSSQASESRGSALPQSETVPPSVRPLPVEDESPVADDPSPRLEGVPVDTCADQIIAELLERAEVRRSRHDLGSRSARRHRIKPNVTRADTALTGMSSRKRRRIEYARVQELFKKCRSRAAAEIIDGVHRSVRHSLEELEAYWRPVLERVSDASGPTPEALNALRREEQHGGARDYSRLWMPFTTDEVKASTFDWQTAPGPDGIRPDEWRQVPAARKAEIFNSWLSNGVIPEPLRQCRTIFVPKTDDPAGPGDYRPISIASIPLRHMHSVLARRLLACCPPDARQRGFVHADGTLENSAVLDAVLGDCRKKLRECHVAVLDFSKAFDTVSHRALVELLRARGLPVAFCDYIHRLYDTAATTMVVGGQSSQPAKVGRGVRQGDPLSPILFNMAMDVILASLPKEVGYRLEMERVSALAYADDLVLLAGSKVGMQESIDCVFRVASTMGLMINHKKSSVLSMVPDGKRKKHHYLTGKNFRVGRMWLPQTSCVERWRYLGIDFQSSGCVALEHDVKVALTNITKAPLKPQQRLEIVRGNLIPRFLHGLVLGNISDDRLSMLDVQIRSAVRNWLRLPHDVPVGYFHADIKDGGLAIPSLRATVPDLILKRFGRLDSSSWPVAKAAARSERIRKKLSWADKQFRKFTNEDQVTGLRSVSRFWRDKLWNSVDGFELRESARTPASTKWIREESSHVSGRDFVQFVHTHINALPSRVRTSRGRRIGRESELNCRAGCAVRETTAHTIQQCWRTHGGRILRHDRVVRLVAQAMASDQWSVVMEPHVKTSKGLRKPDIVAAKGGVGVIVDVQVVSGQRPLDDAHREKRSKYGTHEELVEKVAGILGLPDKDCVRATSCTISWRGVWSHSSYKEMKRLLGLKESLFRTIPVLVLRGSHMNWTRFGQMTGAAAGGPE

SEQ ID NO: 20430 - protein, 920 aa, Graphium sarpedon
MARAEARCILETGCCSNKELLRVLHGFGRTLEAVKGKRRDSKYKALVQRYQEEFNESKGLDEGESQPSEARNDPIESEEQPEPEMPATTPVSEAGEGLPPLCVDDPHPRPIGVPGPCGDQVVRELLERARARRSKHGLGSRSARSLRLPKETRADAALSGLSSRKRRRIEYALVQELYRKSRSRAAAEIIEGVHRRSKHSLGEMEAYWRPILEKVSEAEGPTPEALGAWRREWPKGGEHDLSQLWMPFSEEEIRASRFDWQTAPGPDGIRPDEWRLVPVRQKAEIFNSWLIGEVPEPLRQCRTIFVPKKDDPAGPGDYRPISIASIPLRHMHSVLAKRFQACCPPDVRQRGFIKADGTVENTVILDAVLGDCRSKLRECHMAVLDFSKAFDSVSHKALIGLLRERGLPEGFCDYLSRIYGTATTSMVVGGEYSAPVKVGQGVRQGDPLSPALFNMAMDVILASLPKDVGYRLEGERVSALAYADDLVLLAGSRVGMQESIDCVNRVADSMGLQINHRKSSVLSMVPNGKRKTHHYLTGKVFKVGRKWLTQTSCVERWRYLGVDFRAAGCVTIEHDIKTALTNISKAPLKPQQRLEILRGNLIPRFMHGLVLGKITDDRLRMLDVQIRGAVRKWLWLPKDVPVGYFHADTKDGGLAVPSLRSVVPDLILKRLGRLESSTWPAARGACRSKAIISKLRWANKQSGKFTSRDPVTGEESVARFWREKLWSSVDGFELRESRRTPASTKWLREESSRVSGRDFVQFVHTHINALPSRVRTSRGRRIGREAELNCRAGCQVRETTAHTIQQCFRTHGGRIERHDRVVRSVASAMASNAWSVVMEPRVATSKGLRKPDLIASKGDVGVIVDVQVVSGQRSLDEAHRLKRAKYGTHEELVEGVARLLGLPGRASIHATSCTVSWRGV

SEQ ID NO: 20431 - protein, 867 aa, Arctia plantaginis
MTELAAPLRSTPRAASVQLQSTETGDAEVLSELFELAERRNARSVTVRGRRRRHRTTDLRVTTLAGLSSRKRRRMEYARVQELWRKCPSRAAAEIIDGQSRGVRHSLDELEAYWRPIIETVSDAPGPAPEALRKAKHSAQHGELVDVERLMMPFSVEEVRASRVDGRSAPGPDGILPGDWNSIPAETQAALFNAWLARGEAPMRLRRSRTIFVPKTDEPSGPGDYRPISIASVPLRHMHSAMARRLESCCPPDARQRGFIRVDGTLENSGVLDAVLGDCRKRLRECHVAVLDFAKAFDTLSHRALVEVLRGRGLPEAFCSYIAILYNTAETVLAVDGVCSAPVRLGQGVRQGDPLSPLLFNLAMDIILSSLPREVGYRLENEQVSALAYADDLVLLAGSVVGMQSSIDSVVESERTMGLYVSHAKSSVLSMVPDGKRKKLHYLGGRTFRFGRRWVRQMDCVERWRYLGVDFQASGCVTLEHDIKRALNNISRAPLKPQQRLEIVRVHLIPRFLHGFVLGTITDDRLRMLDVQIRSVVRQWLRLPKDVPTGYFHAATKDGGLAVPSLRTCVPDLIVKRFGRMASSGWSVARAAARSDKIRRKLQWANKRLQKLTREGPTAGERTTAMYWREALYASNDGSELRESWNTTASTKWMRERSAEISGRDYVQFVHCHINALPSRVRNSRGRRCEGLELNCRAGCAVRETTAHCIQQCHRTHGGRILRHDKVAEVVSSGMAEVGWTVVREPRIKTALGLRKPDIIAARDGVGVIVDVQVVSGRQSLDGLHREKRNKYGSHVELVERTASLLGLSGPGCVTATSCTISWRGVWSPASYRSLRHVGLAKTLLGAIPPLVLRGSHTNWTRFNHMT

SEQ ID NO: 20432 - protein, 1075 aa, Phalera bucephala
MCHGRGQAVGLAPQPPRYYYINAMESTRRKINSRTPGLPQELGLARNITQGAGSESQRDMEDGWSCNICDRKFTTKTGLGVHKRRAHPVEANAEAAPAQAKRRWREEEIELMARTEAQLVTTGSRFLNEDIKKELPQLGRTLEAIKGCRRKPTYKALVQQYLAEGEAESAPLDGLEGNAGRVADEGTTDLPSLPAEEHPPISILEPVLPRLSVLQPPGALDHAGIVDDLLARAEARMARGVKGGSRKGERRQLLHSVLYCSTTKPLNARQRRRAEYARVQAMWKRCQYRAAAEVIDGACRKVRHSLQELDAFWRPVMEAVSGASGPTPEVRRALARTERYGGARDYSRLWTPFTPEEVRASRISPSSAPGPDGILPKDWNNIPAETQAEMFSCWMARGEIPERLRQCRTVFVPKKDEAADPGDYRPITIASVPLRHMHSVLARRLDSCSPPDARQRGFICADGTLENSAVLDAVLGDCRKYLRECHVAVLDFAKAFDTVSHAALVELLRLRGLPEGFSSYVARLYETATTTFAVNGVRTEPVRVGKGVRQGDPLSPWLFNVAMDAILAALPKEVGYRLESEKISALAYADDLVLVAGSRAGLQSSINCVERVAASLGLRLNTAKSSVLSMVPDGKRKKLHYLTDHTFKVGRRWLKQVSNVERWRYLGVDFKSTGCVTLEHDIKEALNNIKKAPLKPQQRLEIVRGNLIPRFLHGLVLGSITDERLKMLDVQIRKSVRDWLRLPQDVPIGYFHAPVKEGGLAIPSLRTAVPDLIVKRFGRLASSRWPAAVAASRSFRIRNKMRWANRQCRKFSTDEPATEVRSPTTYWGKALHASVDGFELRESVRVSASTKWIRDKCMQCSGRDYVQFVHTHINALPSRVRTSRGRRGGDESVTNCRAGCMCRETTAHTIQQCHRTHGGRILRHNCVVDHLGSDMVAKGWKVEKEPNIRTSVGLRKPDIIAVRGDVGVIVDAQVVSGQRPLDDLHREKRRKYGNHVELVEKVADRLGLASKDSVSVTSCTISWRGVWSIGSYKELKRLLGLDESTFQNVTSVVLRGSHTNWTRFNQMTSRADNLN

SEQ ID NO: 20433 - protein, 1033 aa, Phalera bucephala
MTLLYITQGAGSESQRDMEDGWSCNICDRKFTTKTGLGVHKRRAHPVEANAEAAPAQAKRRWREEEIELMARTEAQLVTTGSRFLNEDIKKELPQLGRTLEAIKGCRRKPTYKALVQQYLAEGEAESAPLDGLEGNAGRVADEGTTDLPSLPAEEHPPISILEPVLPRLSVLQPPGALDHAGIVDDLLARAEARMARGVKGGSRKGERRQLLHSVLYCSTTKPLNARQRRRAEYARVQAMWKRCQYRAAAEVIDGACRKVRHSLQELDAFWRPVMEAVSGASGPTPEVRRALARTERYGGARDYSRLWTPFTPEEVRASRISPSSAPGPDGILPKDWNNIPAETQAEMFSCWMARGEIPERLRQCRTVFVPKKDEAADPGDYRPITIASVPLRHMHSVLARRLDSCSPPDARQRGFICADGTLENSAVLDAVLGDCRKYLRECHVAVLDFAKAFDTVSHAALVELLRLRGLPEGFSSYVARLYETATTTFAVNGVRTEPVRVGKGVRQGDPLSPWLFNVAMDAILAALPKEVGYRLESEKISALAYADDLVLVAGSRAGLQSSINCVERVAASLGLRLNTAKSSVLSMVPDGKRKKLHYLTDHTFKVGRRWLKQVSNVERWRYLGVDFKSTGCVTLEHDIKEALNNIKKAPLKPQQRLEIVRGNLIPRFLHGLVLGSITDERLKMLDVQIRKSVRDWLRLPQDVPIGYFHAPVKEGGLAIPSLRTAVPDLIVKRFGRLASSRWPAAVAASRSFRIRNKMRWANRQCRKFSTDEPATEVRSPTTYWGKALHASVDGFELRESVRVSASTKWIRDKCMQCSGRDYVQFVHTHINALPSRVRTSRGRRGGDESVTNCRAGCMCRETTAHTIQQCHRTHGGRILRHNCVVDHLGSDMVAKGWKVEKEPNIRTSVGLRKPDIIAVRGDVGVIVDAQVVSGQRPLDDLHREKRRKYGNHVELVEKVADRLGLASKDSVSVTSCTISWRGVWSIGSYKELKRLLGLDESTFQNVTSVVLRGSHTNWTRFNQMTSRADNLN

SEQ ID NO: 20434 - protein, 913 aa, Choaspes benjaminii
MVQTLLSDSTPLPSNNSIQQVLGGAPGEITVEACQRGASGDAGSITPPVADQRQAETTDARCAAIVAELLERAATRGARQQGSMTARRYKKSIHTQTTEVRLTSRKKRRIEYARVQELFRKCPSRAAAEVIDGQCRGVRHDLSVLEAYWRPVLETVSRAPGPTPGVLRAIRHNELYGGTLDFSGLWMPFTEEEVRASSVDLRSAPGPDGIRSEEWRAVPAKAQAEIFSLWMSRGEIPEALRQCRTVFVPKKDDPAGPGDYRPISIASVPLRHMHAVLARRLEACCPPDARQRGFVRADGAAENSAVLDAVLGDCRKKLRECHIAVLDFSKAFDTVSHAALVEMLRGRGLPTEFCNYVEKLYKTATTSLAVGNSRSEPVVVGRGVRQGDPLSPLLFNLVMDVILAALPGEVGYRLEGEKISALAYADDLVLLAGSRVGMQEALGTVEEVGAMMGLQLNREKSSVLSMVPDGKRKKPHYVTERSFKLGRRWLRQVDCVEQWRYLGIDMCVSGCAMLEQGIKQALTNITRAPLKPQQRLEIVRTHLIPRFLHGLVLGRITDDRLRMLDVQIRHSVRQWLRLPADVPVAYFHASAKDGGLAIPSMRACVPDLIVRRFGRLDSSRWPVAKAAFKSERIRKKLKWANGQLRKFTLESPRTGVETTVQFWREGLHSSVDGRELRDSTKIPASTKWIRDKCGQYGGRDYVQFVHTHINALPSRIRTSRGRRDGRGLQLNCRAGCTTSETTAHTIQQCHRTHGGRIERHNCIVRFLASELGKKGWSVEQEPHIRTAVGLRKPDIIASRSDGSGVIIDVQVVSAQRPLDDAHRDKRNKYGNHDELMDLVSERLKVEKGRLTATSCTISWRGVWSPRSYKEMKGLLGLKESVYDTIPTLALRGSHMNWTRFNRMTGMSFCGTSA

SEQ ID NO: 20435 - protein, 1052 aa, Autographa gamma
MDDLQNITSRPPGLPQEPGNATSRCSGAGISAPPGREVSEWKCEVCLRLFRTKIGLGVHKRRAHPIESNKEAAPPQVKRRWRDEEVDLLARTEARLVRGGSSAASINQDLHKELPQLGRSLDAIKGYRRKEAYKSLVQACLAEEAPSDRTGEAENRPRSDPTEEQMMMDCGAVDITSSVRLPETRGMPTEVALDRVSRREKCPPEAPRWAGIVEDLLRGAETRKAKCGGKGRRHRRQRNQTEETTKISTRKRRRIEYARVQELYKVCRSRAAAEVIDGQCRGVRHSLAELEAYWRPVMEAVSEAPGPTPESLDALRRLDQYGGGRDYTQLWMPFTSDEVKACRVDNRSAPGPDGILPGAWNAVPADTQAEMFTAWMMAGEVPEQLRHCRTVFVPKTEKPACPAEYRPISIASVPLRHMHSVLARRLEACCPPDARQRGFVCADGTLENSGVLDAVLGDCRKKLRECHVAVLDFAKAFDTVSHAALVGLLRERGLPDGFCSYVARLYATSKTVLVVNGARSEPARVGQGVRQGDPLSPVLFNMAMDVILASLPRGVGYGLEAERVSALAYADDLVLLSSSRVGMQSSIDSVWSVGKSMGLFVSHAKSAVLSMIPDGKRKKLHYLSERTFKVGKRWVRQVSCVERWRYLGVDFKATGCVTLEHDIKEALNNIKRAPLKPQQRLEIVRTHLVPRFLHGLVLGTITDERLRMLDVQIRTAVRSWLRLPKDVPVGYFHAATSDGGLALPSLRTCVPDLIHKRFGRMASSKWSVARAAARSDKIRKKLAWADRQLRKFTAEHPSTGERTTAMYWRNRLHASVDGQELRESPRVPASTKWIRVRSMEVTGRDFVQAVHTHINALPSRVRNSRGRRGGDVSKLNCRAGCMVRETTAHTIQVCHRTHGGRIERHNCIADVVSSAMTGKGWKVVKEPRIKTADGLRKPDIIAVREGVGVIVDAQVVSGQRPLDDLHREKRKKYGNHVELVERVADILGLPSSNVIATSCTLSWRGVWSLASYKEMKRFLGLDEGLFSLLPSLVLRGSHMNWSRFNRMTNLKG

SEQ ID NO: 20436 - protein, 887 aa, Autographa gamma
MVMDCGAVDITSSVRLPETRGMPTEVALDRVSRREKCPPEAPRWAGIVEDLLRGAETRKAKCGGKGRRHRRQRNQTEETTKISTRKRRRIEYARVQELYKVCRSRAAAEVIDGQCRGVRHSLAELEAYWRPVMEAVSEAPGPTPESLDALRRLDQYGGGRDYTQLWVPFTSDEVKACRVDNRSAPGPDGILPGAWNAVPADTQAEMFTAWMMAGEVPEQLRHCRTVFVPKTEKPACPAEYRPISIASVPLRHMHSVLARRLEACCPPDARQRGFVCADGTLENSGVLDAVLGDCRKKLRECHVAVLDFAKAFDTVSHAALVGLLRERGLPDGFCSYVARLYATSKTVLVVNGARSEPARVGQGVRQGDPLSPVLFNMAMDVILASLPRGVGYGLEAERVSALAYADDLVLLSSSRVGMQSSIDSVWSVGKSMGLFVSHAKSAVLSMIPDGKRKKLHYLSERTFKVGKRWLRQVSCVERWRYLGVDFKATGCVTLEHDIKEALNNIKRAPLKPQQRLEIVRTHLVPRFLHGLVLGTITDERLRMLDVQIRTAVRSWLRLPKDVPVGYFHAATSDGGLALPSLRTCVPDLIHKRFGRMASSKWSVARAAARSDKIRKKLAWADRQLRKFTAEHPSTGERTTAMYWRNRLHASVDGQELRESPRVPASTKWIRVRSMEVTGRDFVQAVHTHINALPSRVRNSRGRRGGDVSKLNCRAGCMVRETTAHTIQVCHRTHGGRIERHNCIADVVSSAMTGKGWKVVKEPRIKTADGLRKPDIIAVREGVGVIVDAQVVSGQRPLDDLHREKRNKYGNHVELVERVADILGLPSSNVIATSCTLSWRGVWSLASYKEMKRFLGLDEGLFSLLPSLVLRGSHMNWSRFNRMTNLKG

SEQ ID NO: 20437 - protein, 788 aa, Autographa gamma
MVMDCGAVDITSSVRLPETRGMPTEVALDRVSRREKCPPEAPRWAGIVEDLLRGAETRKAKCGGKGRRHRRQRNQTEETTKISTRKRRRIEYARVQELYKVCRSRAAAEVIDGQCRGVRHSLAELEAYWRPVMEAVSEAPGPTPESLDALRRLDQYGGGRDYTQLWVPFTSDEVKACRVDNRSAPGPDGILPGAWNAVPADTQAEMFTAWMMAGEVPEQLRHCRTVFVPKTEKPACPAEYRPISIASVPLRHMHSVLARRLEACCPPDARQRGFVCADGTLENSGVLDAVLGDCRKKLRECHVAVLDFAKAFDTVSHAALVGLLRERGLPDGFCSYVARLYATSKTVLVVNGARSEPARVGQGVRQGDPLSPVLFNMAMDVILASLPRGVGYGLEAERVSALAYADDLVLLSSSRVGMQSSIDSVWSVGKSMGLFVSHAKSAVLSMIPDGKRKKLHYLSERTFKVGKRWLRQVSCVERWRYLGVDFKATGCVTLEHDIKEALNNIKRAPLKPQQRLEIVRTHLVPRFLHGLVLGTITDERLRMLDVQIRTAVRSWLRLPKDVPVGYFHAATSDGGLALPSLRTCVPDLIHKRFGRMASSKWSVARAAARSDKIRKKLAWADRQLRKFTAEHPSTGERTTAMYWRNRLHASVDGQELRESPRVPASTKWIRVRSMEVTGRDFVQAVHTHINALPSRVRNSRGRRGGDVSKLNCRAGCMVRETTAHTIQVCHRTHGGRIERHNCIADVVSSAMTGKGWKVVKEPRIKTADGLRKPDIIAVREGVGVIVDE

SEQ ID NO: 20438 - protein, 950 aa, Ptilodon capucinus
MAKTEARLTRAGSRFLNEDLLRELPDWGRTLEAIKGCRRKPAYKALVQSYLEAQAETTPLEALGRSSGPTTLPDAEQLPNEREAITEDEPVLLPRLRLLPPTPATDYDSVVDELLVRAEARLTRNANGDGGSRRRRRSRSAWTKPDNAKTQRRKEYARVQELFRKCPSRAAREVIDGECMSVKLSLQDLEAYWRPIMEAESNAPGPTPEATRALLRSQQYGGARDYSQLWTPITSDEVKASRVSNHSAPGPDGILPGEWNSVPVDTQAMILNSWMVSGVIPERLTKSRTIFVPKKIDADEPGDYRPISIASVPLRHFHSVLARRLEACCPPDIRQRGFICSDGTLEGSAVLDAVLGESRKYLRECHIAVLDFAKAFDTVSHDALISLLRQRGLPEEFCGYVAGVYGESHTILTLGTRRSQPVKVGKGVRQGDPLSPWLFNMVMDLVLTSLPSEVGFRLESERVSALAYADDLVLLAGSKAGLQESIDSVVRVGETMGLRLNTAKSAVLSMVPDGKRKKLHYLTDRTFKVGRRWLRQVSCVERWRYLGVDFKASGCVTLEHDIKQALHNISKAPLKPQQRLEVVRGYLIPRFLHGFVLGTITDDRLRMLDIQIRRSVRDWLRLPQDVPVAYFHALVKDGGLAIPSLRTAVPDLLLRRFGKLDSSRWPAAVAASRSNKIRNKLRWANRQFLRFSMEHPETGVRMVSVKWREALHTAVDGFELRESSRVSASTKWIRENSMQFTGRDYVQFVHTHINALPSRVRNTRGRRTEATMLNCRAGCMVRETTAHTIQQCHRTHGGRIERHDCVANILSSDMVKKGWTVEKEPHIRTSEGLRKPDIIAVRGGVGVIVDAQVVSGQRPLDDLHRAKRSKYGTHVELVEKVADKLGLASTNSVSATSCTLSWRGVWSLGSYKELKRLLGLDESTFANLSSVVLRGSHMNWSRFNKMTTQL

SEQ ID NO: 20439 - protein, 1069 aa, Atethmia centrago
MVANDRTKGKYGRTSGLPQEPEASTLKLVCPAARSPPQLRRVEDEWTCPECSRGFKTKTGLGVHKRRAHPVTANAAAAPPQVKRRWHEEEGELLAQTEARLVRAGGSAKTINQDLLRELPQLGRSLEAIKGYRRKESYKSRVQACLAELAQAPSSSTPGEASLPDRGTPIASTVEGSTPDRPTVRAESPTEDVPVPVSLQGPDLPQAPDHAGIVEELLASAEARMARGACGGKSRGRPRRKGQSPEETLTAFARLSARKRRRMEYARVQELYKTCRSRAAAEVIDGQTRGVRHSLAELETYWRPVMEAVSDAPGLTPEVLSALKRSEQYGGSRDYSQLWTPFTSEEVKACRVDNRSAPGPEGILPGAWNTGTVFQAPGRIPATQAEIFNAWMMTGEVPDRLRGCRTVFVPKTETPAGPGEYRPISIASVPLRHMHSVLAKRLEACCPPDARQRGFICADGTLENSAVLDAVLGDCGKKLRECHVAVLDFAKAFDTVSHAALIDLLRKRGLPEGFCNYVARLYATSETVLVVNGARSGPARVGQGVRQGDPLSPLLFNMAMDAILAALPREVGYRLEGESVSALAYADDLVLLAGSKVGMQSSIDCVWHTGRMMGLFVSHAKSAVLSMVPDGKRKKVHYLTDRTFKVGSRWLRQVSCVERWRYLGVDFKASGCVTLEHDIKEALINITKAPLKPQQRLEIVRVHLIPRFLHGLVLGVITDDRLRRLDIQIRRAVRTWLRLPKDVPVGYYHAATTDGGLAIPSLRTCVPDLIRKRFGRLDSSRWSVARAAARSERIRRKLQWADKQLRRLTRENPKSGERTTAMYWREALHAAVDGFELRESPRVPASTKWMRERSMQFTGRDFVQFVHTHINALPSRVRNTRGRRTGVASELNCRAGCMVRETTAHTIQQCHRTHGGRIERHNCIADVVSSAMIDKGWSVVKEPKVRTALGLRKPDVIASRNGVGVIVDAQVVSGQRPLDELHREKRNKYGNHGELVEKVADILGLPCKESVHSTSCTVSWRGVWSLASYKELKRFVGLDEGVLAGIPSLVLRGSHMNWTRFNQMTTRID

SEQ ID NO: 20440 - protein, 909 aa, Xestia xanthographa
MSSPDHPHGEAEMPGGAPSTDTAEVLIPDEPHVRAEIPSEPMPEPVSLQSPDASSALDLNKIVEDLWKGAEARMARGASGGKRRARPMREGQSLGTQSAGARLSARKRRRMEYARVQELYKTCRSRAAAEVIDGQTRGVKHSLAELEAYWRPVMEAVSDAPGLTPEALSALQRSEQHGGSRDYSQLWTPFTCEEVKACRVDNRSAPGPDGILPGAWNALPSATQAEIFTAWLMTGEVPDKLRGCRTVFVPKTENPAGPGEYRPISIASVPLRHMHSVLAKRLEACCPPDARQRGFICADGTLENSAVLDAVLGDCGKKLRECHVAVLDFAKAFDTVSHAALIDLLRKRGLPEGFCDYVARLYATSETVLVVNGARSGPTRVGQGVRQGDPLSPLLFNMAMDVILAALPREVGYRLEGESVSALAYADDLVLLAGSKVGMQSSIDCVWNTGRMMGLFVSHAKSAVLSMVPDGKRKKVHYLNDRTFKVGSRWLRQVTCVERWRYLGVDFKASGCVTLEHDVKEALTNITKAPLKPQQRLEIVRVHLIPRFLHGFVLGNISDDRLRLLDVQIRKAVRSWLRLPKDVPVSYFHAATTDGGLAIPSLRTCVPDLIRKRFGRLDSSRWPVAKAAARSEKIRRKLAWADKQLRKFTAVNPKSGERTTAMYWREALHATVDGFELRECPRVPASTKWMRERSVQHTGRDFVQFVHTQINALPSRVRNTRGRRTGVESELNCRAGCVVRETTAHTIQQCHRTHGGRIERHNCIVDVVSSAMVDKGWTVVKEPHVRTVLGLRKPDIIASRNGVGVIVDAQVVSGQRPLDELHREKRNKYGNHVELVEKVADRLGLPCKESVHSTSCTISWRGVWSLASYKELRRFVGLDEGVLAGIPSLALRGSHTNWTRFNRLTTRIG

SEQ ID NO: 20441 - protein, 1116 aa, Mythimna impura
MCSVLNPGQAQGLSLSGPDGGLRTPNLAARSGWDTRELWVNLVVGLAPPLHWILRAAFDNFCTNGRASDLPQESEVPTLKPTSPGARTPSPSGRGEGGWTCPECGRSFRSNIGLGQHVRLAHPTTANAAAAPPQVKRRWHDEEVELLAQTEARLVRAGGSASTINQLLMVELPNLGRSLDAVKGYRRKETYKSRVRACLAEMERSSSPSAPEVEVVLSGDTPVTVEVCAAESSTPERPVVEVEAPSEDVSVPVNLQSPIRSEAPDHAKIVEDLLAEAEARLARGARGTGRRGRPVRKGQIRTDNVPPAKLSARKRRRMEYARVQQLYKTCRSRCAAEIIDGQTRGVKHSLSELEAYWRPVMEAVSDAPGLTPDALGALQRQEQYGGRRDYSQLWQPFTSEEVKACRIDSRSAPGPDGILPGAWNTVSAVAQAEIFSAWMRNGEVPEKLRGCRTVFVPKTENPAGPGEYRPISIASVPLRHMHSVLARRLEACCPPDARQRGFICADGTLENSAVLDAVLGDCRKKLRECHVAVLDFAKAFDTVSHAALIDLLRKRGLPEGFCDYVARLYATSETVLVVNGARSGPARVGQGVRQGDPLSPVLFNVAMDAILAALPRGVGYGLEGETVSALAYADDLVLLAGSKVGMQSSIDSVWRTGQMMGLFVSHAKSAVLSMVPDGKRKKMHYLTDRAFKVGSRWLRQVSNVERWRYLGVDFKASGCVTLEHDLKVALENISKAPLKPQQRIELARVHLIPRFLHGLVLGNITDDRLRLLDVQIRRAVRKWLRLPGDVPIGYFHAATTDGGLAIPSFRSWVPDLIHKRFGRLDSSRWPVANAAARSDRIRRKLQWAERQLRHLTAEDPKSGERTTALFWREALHTAVDGLELRESPRVPASTKWMRARCAQYTGRDFVQFVHTHINALPSRVRNTRGRRTGDVSELNCRAGCMVRETTAHIIQQCHRTHGGRIERHNCVADVVSSAMQDKGWTVVKEPHVRTAIGLRKPDIIASRNGVGVIVDAQVVSGQRNLDELHREKRSKYGNHDELVEKVAGILGLPCKESVHSTSCTLSWRGVWSLASYKELKRFVGLDEGVLASVPSLVLRGSHMNWTRFNRMTTRID

SEQ ID NO: 20442 - protein, 837 aa, Amphipyra tragopoginis
MARGARDGGGKGRSRRKGRTPAKTQSASVRLSARKRRRMEYARVQDLYRTCRSRAAAEVIDGHCRGVGHSLSELEAYWRPVMEAVSEAPGLTPEALSALRHSEQYGGCRDYSQLWTPFTSEEVKACRVDNRSGPGPEGILPGAWNAVSAETQAEIFTAWMMAGEVPGVLRGCRTVFVPKTETPAGPAEYRPISIASVPLRHMHSVLARRLEACCPPDARQRGFICADGTLENSAVLDAVLGDCGKKLRECHVAVLDFAKAFDTVSHAALIDLLRKRGLPEGFCSYVARLYDTSETVLVVNGACSGPARVGQGVRQGDPLSPLLFNMAMDVILAALPREVGYRLETERVSALAYADDLVLLAGSKVGLQSSIDSVWRTGMMMGLFISHAKSAVLSMVPDGKRKKLHYLTDRTFKVGKRWLRQVSCVERWRYLGVDFQASGCVTLEHDIAQALINIKRAPLKPQQRLEIVRVHLIPRFLHGLVLGTITDDRLRMLDVQIRRAVRTWLRLPKDVPVGYFHAATTDGGLAIPSLRTCVPDLIGKRFGRLDSSRWPVACAAARSERIRRKLQWADRQLRKFTRENPKSGERTTALYWREVLHTSVDGLELRECPRVPASTKWIRERSMQYTGRDFVQFVHTHINALPSRVRNTRGRRTGAVSELNCRAGCMVRETTAHTIQQCHRTHGGRIERHNCVADVVCSAMTDKGWTVVKEPKVRTALGLRKPDIVAARNGVGVIVDAQVVSGQRPLDELHREKRNKYGNHDELVEKVADILGLPCKESIHSTSCTLSWRGVWSLAAYKELKRFVGLDEGVLAGIPSLVLRGSHMNWTRFNRMTTRID

SEQ ID NO: 20443 - protein, 943 aa, Mythimna ferrago
MAELPTFGRTLESIKGQRRKEEYKSRVRECLAEMERSPSPIEVLPSGGTPEVIIACVAEGSELEQPAVGVGIPSEDVPVSVSLQSPIRSEALDHAKIVDDLLAGAEARLARGARDTGRRGRPRREGQTRADVPSVRLSARKRRRMEYARVQQLYKTCKSRCAAEVIDGQTRGVGHSLAELEAFWRPVMEAVSDAPGLTPEALSALQHQERHGGRRDYSQLWQPFTPEEVKACRIDNRSAPGPDGILPGAWNTVSAVAQAEIFSAWMRNGEVPEKLRGCRTVFVPKTESPAGPGEYRPISIASVPLRHMHSVLARRLEACCPPDARQRGFICADGTLENSAVLDAVLGDCRKKLRECHVAVLDFAKAFDTVSHAALIDLLRKRGLPEGFCSYVARLYATSETVLVVNGARSGPARVGQGVRQGDPLSPVLFNMAMDAILAALPRGVGYRLEGESVSALAYADDLVLLAGSKVGMQSSIDSVWRTGQMMGLFVSHAKSAVLSMVPDGKRKKMHSLTDRTFKVGKRWLRQVSNVERWRYLGVDFKASGCVTLEHDLKVALENISKAPLKPQQRLELARVHLIPRLLHGLVLGNITDDRLRLLDVQIRRAVRDWLRLPKDVPIGYFHAATTDGGLAIPSLRAWVPDLIYKRFGRLESSRWPVANAAARSDRIRRKLLWAERQLRRLTAEDPKSGERTTALFWREALHTAVDGLELRESPRVPASTRWIRARCEQYTGRDFVQFVHTHINALPSRVRNTRGRRTGDVSELNCRAGCMVRETTAHIIQQCHRTHGGRIERHNCVADVVGSAMKDKGWTVVKEPHVMTAVGLRKPDIIASRNGVGAIVDAQVVSGQRNLDDLHREKRNKYGNHDELVEKVAGILGLPCKESVHSTSCTLSWRGVWSRASYRELKRFVGLTEGVLASIPSLVLRGSHMNWTRFNRMTTRSD

SEQ ID NO: 20444 - protein, 1107 aa, Amphipyra tragopoginis
MARVEIPEWPRWRSSDLQSSSSYGWGRRELRVVLVVGLAALPSTKFKVAFDNNKELYGRASGLPQEPEVATLKPVSPVARSPPLSRRGESAWTCPECSRAFGTKTGLGVHKRRAHPVAANAEAAPPQVKRRWREEEGELLARTEARLARAGSSANTINKELLRELPQLGRSLDAIKGYRRKESYKSLVQAYLADLARTPSPVTPGEATLPIRGTPIAGTADSSTPERSSVRAESPLEVVPVSVSLPNPNLSEASDCARIVAELVESAAARMARGARDGGGKGRSRRKGRTPAKTQSASVRLSARKRRRMEYARVQDLYRTCRSRAAAEVIDGHCRGVGHSLSELEAYWRPVMEAVSEAPGLTPEALSALRHSEQYGGCRDYSQLWTPFTSEEVKACRVDNRSGPGPEGILPGAWNAVSAETQAEIFTAWMMAGEVPGVLRGCRTVFVPKTETPAGPAEYRPISIASVPLRHMHSVLARRLEACCPPDARQRGFICADGTLENSAVLDAVLGDCGKKLRECHVAVLDFAKAFDTVSHAALIDLLRKRGLPEGFCSYVARLYDTSETVLVVNGACSGPARVGQGVRQGDPLSPLLFNMAMDVILAALPREVGYRLETERVSALAYADDLVLLAGSKVGLQSSIDSVWRTGMMMGLFISHAKSAVLSMVPDGKRKKLHYLTDRTFKVGKRWLRQVSCVERWRYLGVDFQASGCVTLEHDIAQALINIKRAPLKPQQRLEIVRVHLIPRFLHGLVLGTITDDRLRMLDVQIRRAVRTWLRLPKDVPVGYFHAATTDGGLAIPSLRTCVPDLIGKRFGRLDSSRWPVACAAARSERIRRKLQWADRQLRKFTRENPKSGERTTALYWREVLHTSVDGLELRECPRVPASTKWIRERSMQYTGRDFVQFVHTHINALPSRVRNTRGRRTGAVSELNCRAGCMVRETTAHTIQQCHRTHGGRIERHNCVADVVCSAMTDKGWTVVKEPKVRTALGLRKPDIVAARNGVGVIVDAQVVSGQRPLDELHREKRNKYGNHDELVEKVADILGLPCKESIHSTSCTLSWRGVWSLAAYKELKRFVGLDEGVLAGIPSLVLRGSHMNWTRFNRMTTRID

SEQ ID NO: 20445 - protein, 909 aa, Noctua pronuba
MARSPETLGEAEMPGSAPIVDTAESSMPERPLVGGECPSVIGPASVSLQSPDLSSAPDLVKIVEDLVERAEARMARGASGGERRGRPRRKDQSLATQSAGAKLSARKRRRMEYARVQELYRTCRSRAAAEVIDGQTRGVKHELTELEAYWRPVMEAVSDAPGLTPEVLSALKRSEQHGGSRDYSQLWTPFTSEEVKACRVDNRSAPGPEGILPGTWNTLPSATQAEIFNAWLMAGEVPDKLRGCRTVFVPKTENPAGPGEYRPISIASVPLRHMHSVLAKRLEACCPPDARQRGFICADGTLENSAVLDAVLGDCGKKLRECHVAVLDFAKAFDTVSHAALIDLLRKRGLPEGFCDYVARLYATSETVLDVNGARSGPARVGQGVRQGDPLSPLLFNMAMDAILAALPREVGYRLEGESVSALAYADDLVLLAGSKVGMQSSIDCVWNTGRMMGLFISHAKSAVLSMVPDGKRKKVHHLTDRTFKVGSRWLRQVTCVERWRYLGVDFKASGCVTLEHDIKQALTNITKAPLKPQQRLEIVRVHLIPRFLHGLVLGNISDDRLRLLDVQIRKAVRSWLRLPQDVPVGYFHAATTDGGLAIPSLRTCVPDLIRKRFGRLDSSRWPVAKAAARSERIRRKLQWADKQLRKFTSENPTSGVRTTAMYWREALHATVDGFELRECPRVPASTKWMRERSMQHTGRDFVQFVHTHVNALPSRVRNTRGRRTGVESELNCRAGCMVRETTAHTIQQCHRTHGGRIERHNCIADVVSSAMVDKGWSVVKEPHVRTVLGLRKPDIIGSRNGVGVIVDAQVVSGQRPLDDLHREKRNKYGNHVELVEKVADILGLPCKESVHSTSCTISWRGVWSLASYRELKRFVGLDEGVLAGIPSLALRGSHTNWTRFNRLTTRTN

SEQ ID NO: 20446 - protein, 1041 aa, Eupsilia transversa
MTLLTLKPISPVARSPPQSGRGEGEWTCPECSRSFRTKTGLGVHRRRAHPVTENAAAAPPQVKRRWREEEGEVLAQAEARLIRAGSSANSINHALMRELPHLGRSLEAIKGYRRKEAYKSRVQECLAEVAMISAPVTPGEVETPVSSTPIAGTTSSSTPERPFVRAESPSEDVSDPVSQQSPNLPVTPDHVRIVEELLVSAEARMARDTHGGGRRGRPRRKGQSPEETQTAKAKMSARKRRRMEYARVQEVYKTCRSRAAAEVIDGQTRGVRHSLAEMEAFWRPMMEAVSGAPGLTPEVLSALQRSEQHGGARDYSQLWTPFTPEEVKAARVDSRSAPGPEGILPGSWNTLSAVTQAEIFNAWLVAGEVPDKLRGCRTVFVAKKETPADPGEYRPISIASVPLRHMHSVLAKRLEACCPPDARQRGFICADGTLENSAVLDAVLGDCGKRLRECHVAVLDFAKAFDTVSHAALVDLLRKRGLPGLFCDYVARLYATSETVLVVNGARSEPARVGQGVRQGDPLSPLLFNMVIDAILAALPRGVGYGLEGEIVSALAYADDLVLLAGSKVGMQSSIDCVWNTGKMMGLFVSHAKSAVLSMVPDGKRKKLHYLTDRTFKVGARWLRQVSCVERWRYLGVDFKASGCVTLEHDIKVALTNISKAPLKPQQRLEIVRVHLVPRFLHGFVLGIISDDRLRMLDVQIRRAVRTWLRLPKDVPVGYFHAATTDGGLAIPSLRTCVPDLIKKRFGRLGSSQWTVARAAARSERIQRKLKWADKQLRKFTAENPRSEERTTTRYWREALHASVDGLELRESPRVPASTKWMRERSMQYTGRDFVQFVHTHINALPSRVRNTRGRRTGVASELNCRAGCMVRETTAHTIQQCHRTHGGRIERHNCVAEVISSAMVDKGWTVVKEPKVKTALGLRKPDIIASRNGVGVIVDAQVVSGQRPLDELHRVKRSKYGNHGELVEKVAGILGLPCKESVHSTSCTISWRGVWSLASYKELKRLVGLDEGVLAGIPSLVLRGSHMNWARFNRMTTRID

SEQ ID NO: 20447 - protein, 946 aa, Eupsilia transversa
MRELPHLGRSLEAIKGYRRKEAYKSRVQECLAEVAMISAPVTPGEVETPVSSTPIAGTTSSSTPERPFVRAESSSEDVSDPVSQQSPNLPVTPDHVRIVEELLVSAEARMARGTHGGGRRGRPRRKGQSPEETQTAKAKMSARKRRRMEYARVQEVYKTCRSRAAAEVIDGQTRGVRHSLAEMEAFWRPMMEAVSGAPGLTPEVLSALQRSEQHGGARDYSQLWTPFTPEEVKAARVDSRSAPGPEGILPGSWNTLSAVTQAEIFNAWLVAGEVPDKLRGCRTVFVAKKETPANPGEYRPISIASVPLRHMHSVLAKRLEACCPPDARQRGFICADGTLENSAVLDAVLGDCGKRLRECHVAVLDFAKAFDTVSHAALVDLLRKRGLPGLFCDYVARLYATSETVLVVNGARSEPARVGQGVRQGDPLSPLLFNMVIDAILAALPRGVGYGLEGENVSALAYADDLVLLAGSKVGMQSSIDCVWNTGKMMGLFVSHAKSAVLSMAPDGKRKKLHYLTDRTFKVGARWLRQVSCVERWRYLGVDFKASGCVTLEHDIKVALTNISKAPLKPQQRLEIVRVHLVPRFLHGFVLGIISDDRLRMLDVQIRRAVRTWLRLPKDVPVGYFHAATTDGGLAIPSLRTCVPDLIKKRFGRLGSSQWTVARAAARSERIQRKLKWADKQLRKFTAENPRSEERTTTRYWREALHASVDGLELRESPRVPASTKWMRERSMQYTGRDFVQFVHTHINALPSRVRNTRGRRTGVASELNCHAGCMVRETTAHTIQQCHRTHGGRIERHNCVAEVISSAMVDKGWTVVKEPKVKTALGLRKPDIIASRNGVGVIVDAQVVSGQRPLDELHRVKRSKYGNHGELVEKVAGILGLPCKESVHSTSCTISWRGVWSLASYKELKRFVGLDEGVLAGIPSLVLRGSHMNWARFNRMTTRID

SEQ ID NO: 20448 - protein, 895 aa, Noctua janthe
MPVGSPCGDTVEGSMTERPLVGAERPSEIRPASVSLQSPDLSSALDLVKIVEDLVERAEARMARGASGGKRRERPRRKGQSAQSANARLSARKRRRMEYASVQELYRTCRSRAAAEVIDGQTRGVKHSLAELETYWRPVMEAVSDAPGLTPEVLGALQRSEQHGGSRDYSQLWAPFTSEEVKACRVDNRSAPGPEGILPGAWNTVPSATQAEIFNAWLMAGEVPDKLRGCRTVFVPKTENPAGPGEYRPISIASVPLRHMHSVLAKRLEACCPPDARQRGFICADGTLENSAVLDAVLGDCGRKLRECHVAVLDFAKAFDTVSHAALIELLRKRGLPEGFCDYVARLYATSETVLVVNGARSDPARVGQGVRQGDPLSPLLFNMAMDVILAALPREVGYRLEGESVSALAYADDLVLLAGSKVGMQSSIDCVWNTGRMMGLFISHAKSAVLSMVPDGKRKKVHHLTGRTFKVGSRWLRQVTCVERWRYLGVDFKASGCVTLEHDIKQALTNITKAPLKPQQRLEIVRVHLIPRFLHGLVLGNISDDRLRMLDVQIRKAVRSWLRLPKDVPVGYFHAATTDGGLAIPSLRTCVPDLIRKRFGRLDSSRWPVAKAAARSERIRRKLQWADRQLRKFTAENPKSGARTTAMYWREALHATVDGFELRECPQVPASTKWMRARSMQHTGRDFVQFVHTHVNALPSRVRNTRGRRTGVESELNCRAGCMVRETTAHTIQQCHRTHGGRIERHNCIVEVISSAMVDKGWSVVKEPHVRTVLGLRKPDIIGSRNGVGVIVDAQVVSGQRPLDGLHREKRNKYGNHVELVEKVADILGLPCKESVHSTSCTISWRGVWSLASFRELRRFVGLDEGVLAGIPSMVLRGSHINWTRFNRLTTRIN

SEQ ID NO: 20449 - protein, 946 aa, Eupsilia transversa
MRELPHLGRSLEAIKGYRRKEAYKSRVQECLAEVAMISAPVTPGEVETPVSSTPIAGTTSSSTPERPFVRAESPSEDVSDPVSQQSPNLPVTPDHVRIVEELLVSAEARMARGTHGGGRRGRPRRKGQSPEETQTAKAKMSARKRRRMEYARVQEVYKTCRSRAAAEVIDGQTRGVRHSLAEMEAFWRPMMEAVSGAPGLTPEVLSALQRSEQHGGARDYSQLWTPFTPEEVKAARVDSRSAPGPEGILPGSWNTLSAVTQAEIFNAWLVAGEVPDKLRGCRTVFVAKKETPANPGEYRPISIASVPLRHMHSVLAKRLEACCPPDARQRGFICADGTLENSAVLDAVLGDCGKRLRECHVAVLDFAKAFDTVSHAALVDLLRKRGLPGLFCDYVARLYATSETVLVVNGARSEPARVGQGVRQGNPLSPLLFNMVIDAILAALPRGVGYGLEGENVSALAYADDLVLLAGSKVGMQSSIDCVWNTGKMMGLFVSHAKSAVLSMVPDGKRKKLHYLTDRTFKVGARWLRQVSCVERWRYLGVDFKASGCVTLEHDIKVALTNISKAPLKPQQRLEIVRVHLVPRFLHGFVLGIISDDRLRMLDVQIRRAVRTWLRLPKDVPVGYFHAATTDGGLAIPSLRTCVPDLIKKRFGRLGSSQWTVARAAARSERIQRKLKWADKQLRKFTAENPRSEERTTTRYWREALHASVDGLELRESPRVPASTKWMRERSMQYTGRDFVQFVHTHINALPSRVRNTRGRRTGVASELNCRAGCMVRETTAHTIQQCHRTHGGRIERHNCVAEVISSAMVDKGWTVVKEPKVKTALGLRKPDIIAARNGVGVIVDAQVVSGQRPLDELHRVKRSKYGNHGELVEKVAGILGLPCKESVHSTSCTISWRGVWSLASYKELKRFVGLDEGVLAGIPSLVLRGSHMNWARFNRMTTRID

SEQ ID NO: 20450 - protein, 895 aa, Noctua janthe
MPVGSPCGDTVEGSMTERPLVGAERPSEIRPASVSLQSPDLSSALDLVKIVEDLVERAEARMARGASGGKRRERPRRKGQSAQSANARLSARKRRRMEYASVQELYRTCRSRAAAEVIDGQTRGVKHSLAELETYWRPVMEAVSDAPGLTPEVLGALQRSEQHGGSRDYSQLWAPFTSEEVKACRVDNRSAPGPEGILPGAWNTVPSATQAEIFNAWLMAGEVPDKLRGCRTVFVPKTENPAGPGEYRPISIASVPLRHMHSVLAKRLEACCPPDARQRGFICADGTLENSAVLDAVLGDCGRKLRECHVAVLDFAKAFDTVSHAALIELLRKRGLPEGFCDYVARLYATSETVLVVNGARSDPARVGQGVRQGDPLSPLLFNMAMDVILAALPREVGYRLEGESVSALAYADDLVLLAGSKVGMQSSIDCVWNTGRMMGLFISHAKSAVLSMVPDGKRKKVHHLTGRTFKVGSRWLKQVTCVERWRYLGVDFKASGCVTLEHDIKQALTNITKAPLKPQQRLEIVRVHLIPRFLHGLVLGNISDDRLRMLDVQIRKAVRSWLRLPKDVPVGYFHAATTDGGLAIPSLRTCVPDLIRKRFGRLDSSRWPVAKAAARSERIRRKLQWADRQLRKFTAENPKSGARTTAMYWREALHATVDGFELRECPQVPASTKWMRARSMQHTGRDFVQFVHTHVNALPSRVRNTRGRRTGVESELNCRAGCMVRETTAHTIQQCHRTHGGRIERHNCIVEVISSAMVDKGWSVVKEPHVRTVLGLRKPDIIGSRNGVGVIVDAQVVSGQRPLDGLHREKRNKYGNHVELVEKVADILGLPCKESVHSTSCTISWRGVWSLASFRELRRFVGLDEGVLAGIPSMVLRGSHINWTRFNRLTTRIN

SEQ ID NO: 20451 - protein, 1042 aa, Spodoptera litura
MESCGQSGRQGLIPLSPENYWIMNVPKRKEGRASALPQEAEVASNNSSGASRSSPPPARVAERWTCPECGRYFTTKTGLGVHKRRAHPVLANAEAAPPQVKRRWGEEEADLLAAAEARLVRAGGSSTTVNQDLMRELPGFGRSLESIKGFRRKEAYKAKVRAHLDAWQEVAEAPSSTQEGPDERGNAAAESPTPERPAVEVMEPSGEPEPPAVTQRSATCPRAPHSEIVEGLLQGALARSERGAKGRRGLRGRPRHEGTTPATARLSARKRRRIEYARVQQLYRTCRSRVAAEVIDGQCRGVRHSLPELEAYWRPVMEAVSAAPGPTPEVLDAVRRSEQYGGIRDYSQLWAPFSQEEVKACRIDSRSAPGPDGILPSDWNRVAVATQAEIFNEWLMNGEVPAQLRGCRTVFVPKTDEPASAAEYRPISIASVPLRHMHSVLARRLEACCPPDARQRGFICADGTLENSAVLDAVLGDCGKRLRECHMAVLDFAKAFDTVSHAALVEVLRGRGLPGAFCDYVARLYATSETVLDVNGTRSVPARVGQGVRQGDPLSPLLFNMAMDVILAALPREVDYGLDGEKISALAYADDLVLLAGTKVGLQSSIDSVWRSGQAMGLFISHAKSAVLSMVPDGKRKRLHYLTDRTFKVGKRWLRQVNCVERWRYLGVDFKASGCVTLEHNIKEALTNITRAPLKPQQRLEIVRGHLIPRFYHGLVLGKISDDRLRMLDVQIRKAVRSWLRLPRDVPVAYFHAAVSDGGLAIPSLRACVPDLIVKRFGRLHLSRWGAAKAAARSDRIQKKLQWAFRQFRKFSAENPSSSERTTAAHWREALHASVDGLELRECPRVPASTKWVRERSMQYTGRDYVQFVHTHINALPSRVRSTRGRRGDDASELNCRAGCRVRETTAHVIQQCHRTHGGRIERHNCVVDVVSAAMTAKGWTVEQEPKIKTAMGLRKPDIIASRDGVGVNVDAQVVSGQRPLDDLHREKRSKYGNHVELVEKVAERLGLPGVASVRATSCTISWRGVWSRASFNELKRLVGPT

SEQ ID NO: 20452 - protein, 1061 aa, Atethmia centrago
MVANDRTKGKYGRTSGLPQEPEASTLKLVCPAARSPPQLRRVEDEWTCPECSRGFKTKTGLGVHKRRAHPVTANAAAAPPQVKRRWHEEEGELLAQTEARLVRAGGSAKTINQDLLRELPQLGRSLEAIKGYRRKESYKSRVQACLAELAQAPSSSTPGEASLPDRGTPIASTVEGSTPDRPTVRAESPTEDVPVPVSLQGPDLPQAPDHAGIVEELLASAEARMARGACGGKSRGRPRRKGQSPEETLTAFARLSARKRRRMEYARVQELYKTCRSRAAAEVIDGQTRGVRHSLAELETYWRPVMEAVSDAPGLTPEVLSALKRSEQYGGSRDYSQLWTPFTSEEVKACRVDNRSAPGPEGILPGAWNTVPSATQAEIFNAWMMTGEVPDRLRGCRTVFVPKTETPAGPGEYRPISIASVPLRHMHSVLAKRLEACCPPDARQRGFICADGTLENSAVLDAVLGDCGKKLRECHVAVLDFAKAFDTVSHAALIDLLRKRGLPEGFCNYVARLYATSETVLVVNGARSGPARVGQGVRQGDPLSPLLFNMAMDAILAALPREVGYRLEGESVSALAYADDLVLLAGSKVGMQSSIDCVWHTGRMMGLFVSHAKSAVLSMVPDGKRKKVHYLTDRTFKVGSRWLRQVSCVERWRYLGVDFKASGCVTLEHDIKEALINITKAPLKPQQRLEIVRVHLIPRFLHGLVLGVITDDRLRRLDIQIRRAVRTWLRLPKDVPVGYYHAATTDGGLAIPSLRTCVPDLIRKRFGRLDSSRWSVARAAARSERIRRKLQWADKQLRRLTRENPKSGERTTAMYWREALHAAVDGFELRESSRVPASTKWMRERSMQFTGRDFVQFVHTHINALPSRVRNTRGRRTGVASELNCRAGCMVRETTAHTIQQCHRTHGGRIERHNCIADVVSSAMIDKGWSVVKEPKVRTALGLRKPDVIASRNGVGVIVDAQVVSGQRPLDELHREKRNKYGNHGELVEKVADILGLPCKESVHSTSCTVSWRGVWSLASYKELKRFVGLDEGVLAGIPSLVLRGSHMNWTRFNQMTTRID

SEQ ID NO: 20453 - protein, 1198 aa, Anastatus disparis
MDCSNQPSCLGAAESGELAVTPSVVGEHIPETLAAGSEAALSASTNTTSRYPSRRGRRIRDEQNLSVNDTQAHEILSNEKLIISVPFLQPRACPKCQENGRNFMFLKPTVLLTHLSERHPSVIPIWKCDGCSRESEKLHSWSCHWVHCSKQGPRELEFKCTACTKSFNTAVGLSQHERHEHPGIRNAKRLESVNKTPKKKGAPASVWTSDEEEKLVRLCAEFEGTRNINILLTNYFPHKTNKQISDKRRLLAVRIKEKIDEKIEDSGSDSSEEEDGYTTAGEENTTMETSSIVVEGNPSVDNETLNSLCRNALVNEILQTVDVVSTWREVVNTIKELATKPVCTSKDIDDVYDNIVNIIGVNVEVKTKLGTNTRRKYRNRPKRHRRHHGRKRGVPSRTERRKYAFARCQELYDNDPKKLAQIVVANDLSLLRNQPPPDKESVTGLYSSLWSVEGPGDVSRLFLSQDVYEVCESEFWLPIRDVEIREKLKKLNPSTAAGPDKITRSDLKAGSEKALAAFYNLLLLTLCYPSSWRSNRTTLIPKQGKDPADVKRWRPITISSILSRIFSSLVDRRLRIKVKQNQRQKGFTEENGCYANVAILNEAIRIAKEKSCTFNVQDVQKAFDTVPHSAIIPALKRKGIPTAICGYIKSMYSEVTTSVKTREGDVEVKLRRGVKQGDPLSPLLFNLCMEPLLERLQMETKGISTEGNNVAVLAFADDIVTMGTTAEVGKQQAEIVFDFLQNLGMSLAVNKCSVFEIVPINKSWYIKDPDISVNNIKIPYVEAGETFKYLGAKITPWKGLIDGFELDVLRDLIRRVKNLPLKPLQKLDLITTYLLPKCTYSLIINPPSRALLQNIDQMIRSEAKEIMHISSKTSTPFLYVPRKKGGLGLPNLEKRVFVAALRSGIKALGSEDPVTTSSLQSVANQRNLARFAEALDLQWPVSIKDIDDFKKNINKSYLDEWASQSVQGQGVRYFGSPETNEWLRRKLLGHSRIVDAIKLRTNTYPTRMALKLMGYAKNENFVMSCRKCGKPHETLAHILGECTDTKPKRIKRHDEIKLFIADKLGVQETVEVFVEQTFHTRTGEALRPDLVVKANEIGKVLDVSVRFEKGGYLEQAATEKIEKYNQLNQAIRNKLRVKKVEVVPIIIGSRGGLPYETKRQLKALDFSRTDLVTVSMIALRSSIEMVNEFMDYGRTLND

SEQ ID NO: 20454 - protein, 808 aa, Sardina pilchardus
MLFWKRVPYAEYILTPLFNLILDQGKIPESWLESRLVLLPKSPSINTANPLEYRPISVTQTLYRIFMSVVNRKVTKIIKLSPSQKGFQEGDGCVEHAFTLQEILDDTRRANKKLSAVWVDIRKAFDSVPHNLIINQLSNHNVHGKVINFISQLYSNCFSLARDSTGATARVLPNGKGVRQGCPMSPLLFNIIIDKYLQLIDASNLGYNLRGQKIGALCYADDIVILSNENAEMTNLLSKFENFCNENSLSVNINKCASLRVFNRNGRRVINDRNLTPLTLQQQPIPVMEDFYKYLGTNKNLSSFKDPLPAIKKFEENFIKLSNAFLLPFMKLELLRVYLYPTLDFTLKNNCLKIEDLKRTDRLVIKHVRQWLQLPNCHTKANFFTPVNLGGLGLRNLHKDYVALRLASGLNILHSRDDRIKKIGRESLDEIVSRRTDSTLNAVDYLNRDQELGRVRDIRSLLSSIRLNRKSLGINLILREDSEPLSVDLDLSTLNDPSFVPSRYKETATRIRRLRWHNQINFLRAWKALPDQGRSVECFSGLKEANSWLRTGNISTPIYRFAVMGRANTLPTRYALKRAKSVPDAKCRKCPCEIESLGHVLNSCPHGQNLIQLRHNRVTEELKKHIKPAGKAWSVLFDEKIPKISSERRPDIVLFNALKKEVKIVDVTISYEANSRRLEQARLTKTAKYYPEKEALESLGYKVTCSALVYGSLGSHHSLNHEGYLIVGISMHKQKRLNKRITLSILENSRAVWYNHVRRRGQASLCPSSSGPTIPSKTQEIPSNLPNTQIPIPSKSQPPATTTKAVVA

SEQ ID NO: 20455 - protein, 1020 aa, Dermanyssus gallinae
MANEFQCPWCSMCFPTKRGVQIHAGRTHKKKIAESSGPAVLQQAAATLSSVSQPLPSPHASQVEPSPHPASQSPVNGGPTPDDHLPPSSPLSLHKLLANAKMTRKVLRRIPKGARIPLRGLFHRLLKDVVKKNDEASLTALLTLAPKVLHVEKETQGGHSLASVVKEKVALFEGAALTCVEAEGRGKRILTDKARAQIAAYKLSMDFNVRSAIRILSSDDTIAPVTEESINEMVAKHPPAPAGDVVPPSPFGLPGVGSCSGEDVAKALRSFPSGAAGGLDGLTPDHLKCLLPANGDHNDVLETLAKVCDIIRNGQVPEAVRHVIYGGWLIALKKKTGGYRPIAVGCTLRRLATKTLLPQVNVKSYLQPRQMGYATQNGAEIIAHTARTFLEHNEKCCLLKLDFKNAFNLNKRGHLLTEISKHAPALYPLMHQAYSKPTPLMFGEVEIRSSAGCQQGDVAAPLAFSLLLHQYVKQVASKVPLFYLDDGTLLDNDPSVLLRDIKDLRAFEQWSGLQLNPSKCELFLQGFEDEERQQVIAEFNSNLPGILVKDRCDLDLLGTAVFPDMIGPILAEKGEQLSRLYQRLGHLGRHQAYFLLRHAMGVQKVLYALRTSPVFLLPSETLNLDDQVRRALENILDLTLDDKAWTQASLPVRLGGMGIRSATDLALPAFLASSHSCASAVAATAGGLISHQQDAARIWDARQSGRPSEEQVTRQKGWDQIATQATHLTLLSACELDIDGIRLKAVSSDAAGAWLDVFPSELVGSKLADDHFRAASGLRLGLAMFETEACPCGGTVDERGLHRLSCTKLAGLTQGRHDAINDILGRAFRQAGYRVTLEPGGLQSDDKRRPDGLTSRDWNRNRPLAWDVTVSDTYALGYRALANAGVGNIIYQREMHKRRLYAHLLEDHVVMAFGLESSGVWGKDALKLTKELGKKLFEATAEPRSTAFLRQRVSLELQRGNAKMMLSGHRHSSNNNNNNNNNNNNNNNNNNNNNNNNNNNNNNNNNNNNNKETKQKQRKQ

SEQ ID NO: 20456 - protein, 912 aa, Dermanyssus gallinae
MRSGQPQQSQQLLCFKGEATAMANEFQCPWCSMCFPTKRGVQIHAGRTHKKKIAESSGPAVLQQAAATLSSVSQPLPSPHASLVEPSSHPASQSPVNRGPTPDDHLPPSSPLSLHKLLANAKMTRKVLRRIPKGARIPLRGLFHRLLKDVVKKNDEASWTALLTLAPKVLHVEKETQGGHSLASVVNEKVALFGGAALTCVEAEGRGKRILTDKARAQIAAHKLSMDFNVRSAIRILSSDDTIAPVTEESIKEMVAKHPPAPAGDVVPPSPFGLPAVGSCSGEDVAKALRSFPSGAAGGLDGLTPDHLKCLLPANGDHNDVLETLAKVCDIIRNGQVPKAVRNVIYGGWLIALKKKTGGYRPIAVGCTLRRLATKTLLPQVNVKSYLQPRQMGYATQNGAEIIAHTARTFLEHNEKCCLLKLDFKNAFNLNKRGHLLTEISKHAPALYPMMHQAYSKPTPLMFGEVEIRSSAGCQQGDVAAPLAFSLLLHQYVKQVASKVPLFYLDDGTLLDNDPSVLLRDIKDLRAFEQWSGLQLNPSKCELFLQGFEDEERQQVIAEFNSNLPGILVKDRCDLDLLGTAVFPDMIGPILAEKGEQLSRLYQRLGHLGRHQAYFLLRHAMGVQKVLYVLRTSPVFLLPSETLNLDDQVRRALENILDVTLDDKAWTQASLPVRLGGMGIRSATDLALPAFLASSHSCASAVAATADGLISHQQDAARIWDARQSGRPSEEQVTRQKGWDQIATQATHLTLLSACELDIDGIRLKAVSSDAAGAWLDVFPSELVGSKLADDHFRAASGLRLGIAMFETEACPCGGTVDARGLHRLSCTKLAGLTQGRHDAINDILGRAFRQAGYRVTLEPGGLQSDDKRRPDGLTSRDWDRNRPLAWDVTVSDTYALGYRALANAGVGNIIH

SEQ ID NO: 20457 - protein, 983 aa, Dermanyssus gallinae
MANEFRCQWCSMCFPTKRGVQIHAGRTHKKKIAEPSGPAAFQQAATSSISQPLLSSHAPQAEFFPQPASQPQVNGGPTPDHHLPSSSSLSLHKLLANAKMTRKVLRRIPKGARIPLRGLFHRLLKDVVKKNDEASWTALLTLAPKVLHVDKETQGGHSLASVVKEKVALFGAATLTCMKSEGRGKRVLTDKARAQIAAHKLSMDFNVRSAIRILSSDDTIAPVTKESIDEMIAKHPPAPAGDVVPPSPIGLPAVGSCSSEDVAKALRTFPSGAAGGLDGLTPDHLKCLLPANGDHNDVLETLAKVCDIIRNGQVPETVRNVIYGGWLIALKKKTGGYRPIAVGCTLRRLATKTLLPQVNVKNYLQPRQMGYATHNGAEIIAHTARTFLENNEKCCLLKLDFKNAFNLNKRGQLLAEVSKHAPSLYPMMHQAYSRPTPLMFGEVEIRSSAGCQQGDVAAPLAFSLLLQQYVKQVTSKVPLFYLDDGTLLDNDPSALLKDIKDLRAFEQWSGMQLNPSKCELFLQGFEDEERQQVIAEFNSNLPGILVKDRCELDLLGTAVFPEMIGPVLAEKGEQLSRLYQRLGHLGRHQAYFLLRHAMGVQKVLYVLRTSPTFLLPSETLDLDDQVRRALENILDLTLDDKAWMQASLSVRLGGMGIRSATDLALPAFLASSHSCASAVAATTGGLISHQQDAIRIWDARQSGRPSEEQVTRQKGWDQIATQATHLTLLSACELDIDGIRLKAVSSDAAGAWLDVFPSELVGSKLADDHFRAASGLRLGIAMFETEACPCGGTVDERGLHRLSCTKLAGLTQGRHDAINDILGRAFRQAGYRVTLEPGGLQSDDKRRPDGLTSRDWDRNRPLAWDVTVSDTYALGYRALANAGVGNIIHQREMHKRRLYAHLLEDHVVMAFGLESSGVWGKDALKLTKELGKKLFEATAEPRSTAFLRQRVSLELQRGNAKMMLSGHRHSSNNNNISNIVDII

SEQ ID NO: 20458 - protein, 997 aa, Dermanyssus gallinae
MKQNETTSITARRLRAARRCHSNSNSNGCPTNILSLEHSKTHRADNKKRDFHLEPQGMRSGQPQQSQQLLCFKGEATVMANEFQCPWCSMCFPTKRGVQIHAGRTHKKNIGKSSGPAVLQQAAATLSSVSQPLPSPHASLVEPSPHPASQSPVNGGPTPDDHLPPSSPLSLHKLLANAKMTRKVLRRIPKGARIPLRGLFHRLLKDVVKRMTKRAGPRCSLSPQKSSTSKKKPREAIAWPAINEMVAKHPPAPAGDVVPPSPFGLPAVGSCSGENVAKALRSFPSGAAGGLDGLTPDHLKCLLPANGDHNDVLETLAKVCDIIRNGQVPEAVRNVIYGGWLIALKKKTGGYRPIAVGCTLRRLATKTLLPQVNVKSYLQPRQMGYATQNGAEIIAHTACTFLEHNEKCCLLKLDFKNAFNLNKRGHLLTEISKHAPALYPMMHQAYSKPTPLMFGEVEIRSSAGCQQGDVAAPLAFSLLLHQYVKQVASKVPLFYLDDGTLLDNDPSVLLRDIKDLRAFEKWSGLQLNPSKCELFLQGFEDEERQQVIAEFNSNLPGILVKDRCDLDLLGTAVFPDMIGPILAEKGEQLSRLYQRLGHLGRHQAYFLLRHAMGVQKVLYVLRTSPVFLLPSETLNLDDQVRRALENILDLTLDDKAWTQASLPVRLGGMGIRSATDLALPAFLASSHSCASAVTATAGGLISHQQDAARIWDARQSGRPSEEQVTRQKGWDQIATQATHLTLLSACELDIDGIRLKAVSSDAAGAWLDVFPSELVGSKLADDHFRAASGLRLGIAMFETEACPCGSTVDERKLSQLSCTKLAELTQGRHDAINDTLGRAFRQAGYRVTLEPGGLQSDDKRRPDGLTSRDWDRNRPLAWDVTVSDTYALGYRALANAGVGNIIHQREMHKRRLYAHLLEDHVVMAFGLESSGVWGKDALKLTKELGKKLFETTAEPRSTAFLRQRVSLELQRGNAKMMLSGHRHSSNKNNISNIVDII

SEQ ID NO: 20459 - protein, 925 aa, Dermanyssus gallinae
MANEFRCQWCSMCFPTKRGVQIHAGRTHKKKIAEPSGPAVFQQAATSSISQPLLSSHAPQAEFFPQPASQPQVNGGPTPDHHLPSSSSLSLHKLLANAKMTRKVLRRIPKGARIPLRGLFHRLLKDVVKKNDEASWTALLTLAPKVLHVDKETQGGHSLASVVKEKVALFGAATLTCMEAEGRGKRVLTDKACTQIAAHKLFMDFNVRSAIRILSSDDTIAPVTKESIDEMIAKHPPAPAGDVVPPSPIGLPAVGSCSSEDVAKALRTFPSGAAGGLDGLTPDHLKCLLPANGDHNDVLETLATVCDIIRYGQVPETVRNVIYGGWLIALKKKTGGYRPIAVGCTLRRLATKTLLPQVNVKNYLQPRQMGYATHNGAEIIAHTARTFLENNEKCCLLKLDFKNAFNLNKRGQFLAEVSKDAPALYPMMHQAYSRPTPLMFGEVEIRSSAGCQQGDVAAPLAFSLLLHQYVKQVTSKVSLFYLDDGTLLDNDPSALLKDIKDLRAFEPWSGMQLNPSKCELFLQGFEDEERQQVIAEFNSNLPGILVKDRCELNLLGTAVFPEMIGLVLAEKGEQLSRLYQRLGHLSKHQAYFLLRHAMGVQKVLYVLRTSPTFLLPSETLDLDAQVRRALENILDLTLDDKAWMQASLSVRLGGMGIRSATDLALPAFLASSHSCASAVAATTGGLISHQQDAIWIWDARQSGRPSEEQVTRQKGWDQIATQATHLTLLSVCELDIDGIRLKAVSSDAAGAWLDVFPSELVGSKLADDHFRAASGLRLGIAMFETEACPCGGTVDERGLHRLSCTKLAGLTQGRHDAINDILGRAFRQAGYCVTLEPGGLQSDDKRRPDGLTSRDWDRNRPLAWDVTVSDTYALGYRALANAGVGNIIHQREMHKRRLYAHLLEDHVVMAFGLESSGVWGKMHLN

SEQ ID NO: 20460 - protein, 1006 aa, Dermanyssus gallinae
MRSGQPQQSQQLLCFKGEATAMANEFQCPWCSMCFPTKRGVQIHAGRTHKKKIAESSGPAVLQQAAATLSSVSQPLPSPHASLVEPSPHPASQSSVNGGPTPDDRLPPSSPLSLHKLLANAKMTRKVLRRIPKGARIPLRGLFHRLLKDVVKMNDEASWTALLTLAPKVLHVEKETQGGHSLASVVKEKVALFGSAALTCVEAEGRGKRILTDKARAQIAAHKLSMDFNVRSAIRILSSDDTIAPVTEESINEMVAKHPPAPAGDVVPPSPFGLPAVGSCSGEDVAKALRSFPSGAAGGLDGLTPDHLKCLLPANGDHNDVLETLAKVCDIIRNGQVPEAVRNVIYGGWLIALKKKTGGYRPIAVGCTLRRLATKTLLPQVNVKSYLQPRQMGYATQNGAEIIAHTARTFLEHNEKCCLLKLDFKNAFNLNKRGHLLTEISKHAPALYPMMHQAYSKPTPLMFGEVEIRSSAGCQQGDVAAPLAFSLLLHQYVKQVASKVPLFYLDDGTLLDNDPSVLLRDIKDLRAFEQWSGLQLNPSKCELFLQGFEDEERQQVIAEFNSNLPGILVKDRCDLDLLGTAVFPDMIGPILAEKGEQLSRLYQRLGHLGRHQAYFLLRHAMGVQKVLYVLRTSPVFLLPSETLNLDDQVRRALENILDLTLDDKAWTQASLPVRLGGMGIRSATDLALPAFLASSHSCASAVAATAGGLISHQQDAARIWDARQSGRPSEEQVTRQKGWDQIATQATHLTLLSACELDIDGIRLKAVSSDAAGAWLDVFPSELVGSKLADDHFRAASGLRLGIAMFETEACPCGGTVDERGLHRLSCTKLAGLTQGRHDAINDILGRAFRQAGYRVTLEPGGLQSDDKRRPDGLTSRDWDRNRPLAWDVTVSDTYALGYRALANAGVGNIIHQREMHKRRLYAHLLEDHVVMAFGLESSGVWGKDALKLTKELGKKLFEATAEPRSTAFLRQRVSLELQRGNAKMMLSGHRHSSNKNNISNIVDII

SEQ ID NO: 20461 - protein, 1006 aa, Dermanyssus gallinae
MRCAQPQQSQQLLCFKGEATAMANEFQCPWCSMCFPTKRGVQIHAGRTHKKKIAESSGPAVLQQVATTLSSVSQPLPSPHASLVEPSPHPASQYPVNGGPTPDDHLPPSSPLSLHKLLANAKMTRKVLRRIPKGARIPLRGLFHRLLKDVVKKNDEASWTALLTLAPKVLHVEKETQGDHSLASVVKEKVALFGGAALTCVEAEGRGKRIITDKARAQIAAHKLSMDFNVRSAIRTLSSDDTIAPVTEESINEMVAKHPPAPAGDVVPPSPFGLPAVGSCSGEDVAKALRSFPSGAAGGLDGLTPDHLKCLLPANGDHNDVLETLAKVCDIIRNGQVPEAVRNVIYGGWLIALKKKTGGYRPIAVGCTLRRLATKTLLPQVNVKSYLQPRQMGYATQNGAEIIAHTARTFLEHNEKCCLLKLDFKNAFNLNKRGHLLTEISKHAPALYPMMHQAYSKPTPLMFGEVEIRSSAGCQQGDVAAPLAFSLLLHQYVKQVASKVPLFYLDDGTLLDNDPSVLLRDIKDLRAFEKWSGLQLNPSKCELFLQGFEDEERQQVIAEFNSNLPGILVKDRCDLDLLGTAVFPDMIGPILAEKGEQLSRLYQRLGHLGRHQAYFLLRHAMGVQKVLYVLRTSPVFLLPSETLNLDDQVRRALENILDLTLDDKAWTQASLPVRLGGMGIRSATDLAVPAFLASSHSCASAVAATAGGLISHQQDAARIWDARQSGRPSEEQVTRQKGWDQIATQATHLTLLSACELDIDGIRLKAVSSDAAGAWLDVFPSELVGSKLADYHFRAASGLRLGIAMFETEACPCGGTVDERGLHRLSCTKLAGLTQGRHDAINDILGRAFRQAGYRVTLEPGGLQSDDKRRPDGLTSRDWDRNRPLAWDVTVSDTYALGYRALANAGVGNIIHQREMHKRRLYAHLLEDHVVMAFGLESSGTWGKDALKLTKELGKKLCEATAEPRSTAFLRQRVSLELQRGNAKMMFSGHRHSSNKNNISNIVDII

SEQ ID NO: 20462 - protein, 781 aa, Dermanyssus gallinae
MDFNVRSAIRILSSDDTIAPVTEESINEMVAKHPPAPAGDVVPPSPFGLPAVGSCSGEDVAKALRSLPSGAAGGLDGLTPDHLKCLLPANGDHNDILETLAKVCDIIRNGQVPEAVRNVIYGGWLIALKKKTGGNRPIAVGCTLRRLATKTLLPQVNVKSYLQPRQMGYATQNGAEIIAHTARTFLEHNEKCCLLKLDFKNAFNLNKRGHLLTEISKHAPALYPMMHQAYSKPTPLMFGEVEIRSSAGCQQGDVAAPLAFSLLLHQYVKQVASKVPLFYLDDGTLLDNDPSVLLRDIKDLRAFEQWSGLQLNPSKCELFLQGFEDEERQQVIAEFNSNLPGILVKDRCDLDLLGTAVFPDMIGPILAEKGEQLSRLYQRLGHLGRHQAYFLLRHAMGVQKVLYVLRTSPVFLLPSETLNLDDQVRRALENILDLTLDDKAWTQASLPVRLGGMGIRSATDLALPAFLASSHSCASAVAATAGGLISHQQDAARIWDARQSGRPSEEQVTRQKGWDQIATQATHLTLLSACELDIDGIRLKAVSSDAAGAWLDVFPSELVGSKLADDHFRAASGLRLGLAMFETEACPCGGTVDERGLHRLSCTKLAGLTQGRHDAINDILGRAFRQAGYRVTLEPGGLQSDDKRRPDGLTSRDWNRNRPLAWDVTVSDTYALGYRALANAGVGNIIHQREMHKRRLYAHLLEDHVVMAFGLESSGVWGKDALKLTKELGKKLFEATAEPRSTAFLRQRVSLELQRGNAKMMLSGPRHSSNKNNISNIVDII

SEQ ID NO: 20463 - protein, 1006 aa, Dermanyssus gallinae
MRSGQPQQSQQLLCFKGEATVMANEFQCPWCSMCFPTKRGVQIHAGRTHKKKIGESSGPAVLQQAAATLSSVSQPLPSPHASLVEPSPHPASQSPVNGGPTPDDHLPPSSPLSLHKLLANAKMTRKVLRRIPKGARIPLRGLFHRLLKDVVKKNDEASWTALLTLAPKVLHVEKETQGGHSLASVVKEKVALFGGAALTCVEAEGRGKRILTDKARAQIAAHKLSMDFNVRSAIRILSSDDTIAPVTEESINEMVAKHSPAPAGDVVPPSPFGLPAVGSCSGEDVAKALRSFPSGAAGGLDGLTPDHLKCLLPANGDHNDVLETLAKVCDIIHNGQVPEAVRNVIYEGWFIALKKKTGGYRPIAVGCTLRRLATKTLLPQVNVKSYLQPRQMGYATQNGAEIIAHTARTFLEHNEKCCLLKLDFKNAFNLNKRGHLLTEISKHAPALYPMMHQAYSKPTPLMFDEVEIRSSAGCQQGDVAAPLAFSLLLHQYVKQVASKVPLFYLDDGTLLDNDPSVLLRDIKDLRAFEKWSGLQLNPSKCELFLQGFEDEERQQVIAEFNSNLPGILVKDRCDLDLLGTAVFPDMIGPILAEKGEQLSQLYQRLGHLGRHQAYFLLRHAMGVQKVRYVLRTSPVFLLPSETLNLDDQVRRALENILDLTLDDKAWTQASLPVRLGGMGIRSATDLALPAFLASSHSCASAVAATAGGLISHQQDAARIWDARQSGRPSEEQVTRQKGWDQIATQATHLTLLSACELDIDGIRLKAVSSDAAGAWLDVFPSELVGSKLADDHFRAASGLRLGIAMFETEACPCGGTVDERGLHRLSCTKLAGLTQGRHDAINDILGRAFRQAGYRVTLEPGGLQSDDKRRPDGLTSRDWDRNRPLAWDVTVSDTYALGYRALANAGVGNIIHQREMHKRRLYAHLLEDHVVMAFGLESSGVWGKDALKLTKELGKKLFETTAEPRSTAFLRQRVSLELQRGNAKMMLSGHRHSSNKNNISNIVDII

SEQ ID NO: 20464 - protein, 884 aa, Dermanyssus gallinae
MTRKVLRRIPKGARIPLRGLFHRLLKDVVKKNDEASWTALLTLAPKVLHVDKETQGGHSLASVVKEKVALFGAATLTCMKSEGRGKRVLTDKARAQIAAHKLSMDFNVRSAIRILSSDDTIAPVTKESIDEMIAKHPPAPAGDVVPPSPIGLPAVGSCSSEDVAKALRTFPSGAAGGLDGLTPEHLKCLLPANGDHNDVLETLAKVCDIIRNGQVPETVRNVIYGGWLIALKKKTGGYRPIAVGCTLRRLATKTLLPQVNVKNYLQPRQMGYATHNGAEIIAHTARTFLENNEKCCLLKLDFKNAFNLNKRGQLLAEVSKHAPALYPMMHQAYSRPTPLMFGEVEIRSSAGCQQGDVAAPLAFSLLLHQYVKQVTSKVPLFYLDDGTRLDNDPSALLKDIKDLRAFEQWSGMQLNPSKCELFLQGFEDEERQQVIAEFNSNLPGILVKDRCELDLLGTAVFPEMIGPVLAEKGEQLSRLYQRLGHLGRHQAYFLLRHAIGVQKVLYVLRTSPTFLLPSETLDLDDQVRRALENILDLTLDDKAWMQASLSVRLGGMGIRSATDLALPAFLASSHSCASAVAATTGGLISHQQDAIRIWDARQSGRPSEEQVTRQKGWDQIATQATHLTLLSACELDIDGIRLKAVSSDAAGAWLDVFPSELVGSKLADDHFRVASGLRLGIAMFETEACPCGGTVDERGLHRLSCTKLAGLTQGRHDAINDILGRAFRQAGYRVTLEPGGLQSDEKRRPDGLTSRDWDRNRPLAWDVTVSDTYALGYRALANAGVGNIIHQREMHKRRLYAHLLEDHVVMAFGLESSGVWGKDALKLTKELGKKLFEATAEPRSTAFLRQRVSLELQRGNAKMMLSGHRHSSNNNNISNIVDII

SEQ ID NO: 20465 - protein, 1006 aa, Dermanyssus gallinae
MRSGQPQQSQQLLCFKGEATAMANEFQCPWCSMCFPTKRGVQIHAGRTHKKKIAESSGPAVLQQAAATLSSVSQPLPSPHASLVEPSPHPASQSPVNGGPTPDDHLPPSSPLSLHKLLANAKMTRKVLRRIPKGARIPLRGLFHRLLKDVVKKNDEASWTALLTLAPKVLHVEKETQGGHSLASVVKEKVALFGGAALTCVEAEGRGKRILTDKARAQIAAHKLSMDFNVRSAIRILSSDDTIAPVTEESINEMVAKHPPAPAGDVVPPSPFGLPAVGSCSGEDVAKALRSFPSGAAGGLDGLTPDHLKCLLPANGDHNDVLETLAKVCDIIRNGQVPEAVRNVIYGGWLIALKKKTGGYRPIAVGCTLRRLATKTLLPQVNVKSYLQPRQMGYATQNGAEIIAHTARTFLEHNEKCCLLKLDFKNAFNLNKRGHLLTEISKHAPALYPMMHQAYSKPTPLMFGEVEIRSSAGCQQGDVAAPLAFSLLLHQYVKQVASKVPLFYLDDGTLLDNDPSVLLRDIKDLRAFEQWSGLQLNPSKCELFLQGFEDEERQQVIAEFNSNLPGILVKDRCDLDLLGTAVFPDMIGPILAEKGEQLSRLYQRLGHLGRHQAYFLLRHAMGVQKVLYVLRTSPVFLLPSETLNLDDQVRRALENILDLTLDDKAWTQASLPVRLGGMGIRSATDLALPAFLASSHSCASAVAATAGGLISHQQDAARIWDARQSGRPSEEQVTRQKGWDQIATQATHLTLLSACELDIDGIRLKAVSSDAAGAWLDVFPSELVGSKLADDHFRAASGLRLGIAMFETEACPCGGTVDERGLHRLSCTKLAGLTQGRHDAINDILGRAFRQAGYRVTLEPGGLQSDDKRRPDGLTSRDWDRNRPLAWDVTVSDTYALGYRALANAGVGNIIHQREMHKRRLYAHLLEDHVVMAFGLESSGVWGKDALKLTKELGKKLFEATAEPRSTAFLRQRVSLELQRGNAKMMLSGHRHSSNKNNISNIVDII

SEQ ID NO: 20466 - protein, 985 aa, Dermanyssus gallinae
MANEFQCPWCSMCFPTKRGVQIHAGRTHKKKIAESSGPAVLQQAAATLSSVSQPLPSPHASLVEPSPRPASQPPVNGGPTPDDHLPPSSPLSLHKLLANAKMTRKVLRRIPKGARIPLRGLFHRLLKDVVKKNDEASWTALLTLAPKVLHVEKETQGGHSLASVVKEKVALFEGAALTCVEAEGRGKRILTDKARAQITAHKLSMDFNVRSAIRILSSDDTIAPVTEESINEMVAKHPPAPAGDVVPPSPFGLPAVGSCSGEDVAKALRSFPSGAAGGLDGVTPDHLKCLLPANEDHNDVLETLAKVCDIIRNGQVPEAVRNVIYGGWLIALKKKTGGYRPIAVGCTLRRLATKTLLPQVNVKSYLQPRQMGYATQNGAEIIAHTARTFLEHNEKCCLLKLDFKNAFNLNKRGHLLTEISKHAPALYPMMHQAYSKPTPLMFGEVEIRSSAGCQQGDVAAPLAFSLLLHQYVKQVASKVPLFYLDDGTLLDNDPSALLRDIKDLRAFEQWSGLQLNPSNCELFLQGFENEERQQVIAEFNSNLPGILVKDRCDLDLLGTAVFPDMIGPILAEKGEQLSRLYQRLGHLGRHQAYFLLRHAMGVQKVLYVLRTSPVFLLPSETLNLDDQVRRALENIIDLTLDDKAWTQASLPVRLGGMGSRAATDLALPAFLASSHSCASAVAATAGGLISHQQDAARIWDARQSGRPSEEQVARQKGWDQIATQATHLTLLSACELDIDGIRLKAVSSDAAGAWLDVFPSELVGSKLADDHFRAASGLRLGIAMFETEACPCGGTVDERGLHRLSCTKLAGLTQGRHDAINDILGRAFRQAGYRVTLEPGGLQSDDKRRLDGLTSRDWDRNRPLAWDVTVSDTYALGYRALANAGVGNIIHQREMHKRRLYAHLLEDHVVMAFGLESSGVWGKDALKLTKELGKKLFEATAEPRSTAFHRQRVSLELQRGNAKMMLSSHRHSSNKNNISNIVDII

SEQ ID NO: 20467 - protein, 982 aa, Dermanyssus gallinae
MANEFQCPWCSMCFPTKRGVQIHAGRTHKKKIAESSGPAVLQQAAATLSSVSQPLPSPHASQVEPSPHPASQSPVNGGPTPDDHLPPSSPLSLHKLLANAKMTRKVLRRIPKGARIPLRGLFHRLLKDVVKKNGWTALLTLAPKVLHVEKETQGGHSLASVVKEKVALFEGAALTCVEAEGRGKRILTDKARAQIAAHKLSMDFNVRSAIRILSSDDTIAPVTEESINEMVAKHPPAPAGDVVPPSPFGLPGVGSCSGEDVAKALRSFPSGAAGGLDGLTPDHLKCLLPANGDHNDVLETLAKVCDIIRNGQVPEAVRNVIYGGWLIALKKKTGGYRPIAVGCTLRRLATKTLLPQVNVKSYLQPRQMGYATQNGAEIIAHTARTFLEHNEKCCLLKLDFKNAFNLNKRGHLLTEISKHAPALYPMMHQAYSKPTPLMFGEVEIRSSAGCQQGDVAAPLAFSLLLHQYVKQVASKVPLFYLDDGTLLDNDPSVLLRDIKDLRAFEQWSGLQLNPSKCELFLQGFEDEERQQVIAEFNSNLPGILVKDRCDLDLLGTAVFPDMIGPILAEKGEQLSRLYQRLGHLGRHQAYFLLRHAMGVQKVLYVLRTSPVFLLPSETLNLDDQVRRALENILDLTLDDKAWTQASLPVRLGGMGIRSATDLALPAFLASSHSCASAVAATAGGLISHQQDAARIWDARQSGRPSEEQVTRQKGWDQIATQATHLTLLSACELDIDGIRLKAVSSDAAGAWLDVFPSELVGSKLADDHFRAASGLRLGLAMFETEACPCGGTVDERGLHRLSCTKLAGLTQGRHDAINDILGRAFRQAGYRVTLEPGGLQSDDKRRPDGLTSRDWNRNRPLAWDVTVSDTYALGYRALANAGVGNIIHQREMHKRRLYAHLLEDHVVMAFGLESSGVWGKDALTLTKELGKKLFEATAEPRSTAFLRQRVSLELQRGNAKMMLSGHRHSSNKNNISNIVDII

SEQ ID NO: 20468 - protein, 985 aa, Dermanyssus gallinae
MANEFQCPWCSMCFPTKRGVQIHAGRTHKKKIAESSGPAVLQQAAATLSSVSQPLPSPHASLVEPSPQPASQSPVNGGPTPDDHLPPSSPLSLHKLLANAKMTRKVLRRIPKGARIPLRGLFHRLLKDVVKKNDEASWTALLTLAPKVLHVEKETQGGHSLASVVKEKVALFGSAALTCVEAEGRGKRILTDKARAQIAAHKLSMDFNVRSAIRILSSDDTIAPVTEESINEMVAKHPPAPAGDVVPPSPFGLPAVGSCSGEDVAKALRSFPSGAAGGLDGLTPDHLKCLLPANGDHNDVLETLAKVCDIIRNGQVPEAVRNVIYGGWLIALKKKTGGYRPIAVGCTLRRLATKTLLPQVNVKSYLQPRQMGYATQNGAEIIAHTARTFLEHNEKCCLLKLDFKNAFNLNKRGHLLTEISKHAPDLYPMMHQAYSKPTPLMFGEVEIRSSAGCQQGDVAAPLAFSLLLHQYVKQVASKVPLFYLDDGTLLDNDPSVLLRDIKDLRAFEQWSGLQLNPSKCELFLQGFEDEERQQVIAEFNSNLPGILVKDRCDLDLLGTAVFPDMIGPILAEKGEQLSRLYQRLGHLGRHQAYFLLRHAMGVQKVLYVLRTSPAFLLPSETLNLDDQVRRALENILDLTLDDKAWTQASLPVRLGGMGIRSATDLALPAFLASSHSCASAVAATAGGLISHQQDAARIWDARQSGRPSEEQVTRQKGWDQIATQATHLTLLSACELDIDGIRLKAVSSDAAGAWLDVFPSELVCSKLADDHFRAASGLRLGIAMFETEACRCGGTVDERGLHRLSCTKLAGLTQGRHDAINDILGRAFRQAGYRVTLEPGGLQSDDKRRPDGLTSRDWDRNRPLAWDVTVSDTYALGYRALANAGVGNIIHQREMHKRRLYAHLLEDHVVMAFGLESSGVWGKDALKLTKELGKKLFEATAEPRSTAFLRQRVSLELQRGNAKMMLSGHRHSSNKNNISNIVDII

SEQ ID NO: 20469 - protein, 884 aa, Dermanyssus gallinae
MTRKVLRRIPKGARIPLRGLFHRLLKDVVKKNDEASWTALLTLAPKVLHVEKETQGGHSLASVVKEKVALFEGAALTCVEAEGRGKRILTDKARAQIAAHKLSMDFNVRSAIRILSSDDTIAPVTEESINEMVAKHPPAPAGDVVPPSPFGLPAVGSCSGEDVAKALRSFPSGAAGGLDGLTPDHLKCLLPANGDHNDVLETLAKVCDIIRNGQVPEAVRNVIYGGWLIALKKKTGGYRPIAVGCTLRRLATKTLLPQVNVKSYLQPRHMGYATQNGAEIIAHTARTFLEHNEKCCLLKLDFKNAFNLNKRGHLLTEISKHAPALYPMMHQAYSKPTPLMFGEVEIRSSAGCQQGDVAAPLAFSLLLHQYVKQVASKVPLFYLDDGTLLDNDPSVLLRDIKDLRAFEQWSGLQLNPSKCELFLQGFEDEERQQVIAEFNSNLPGILVKDRCDLDLLGTAVFADMIGPILAEKGEQLSRLYQRLGHLSRHQAYFLLRHAMGVQKVLYVLRTSPVFLLPSETLNLDDQVRRALENILDLTLDDKAWTQASLPVRLGGMGIRSATDLALPAFLASSHSCASAVAATAGGLISHQQDAARIWDARQSGRPSEEQVTRQKGWDQIATQATHLTLLSACELDIDGIRLKAVSSDAAGAWLDVFPSELVGSKLADDHFRAASGLRLGLAMFETEACPCGGTVDERGLHRLSCTKLAGLTQGRHDAINDILGRAFRQAGYRVTLEPGGLQSDDKRRPDGLTNRDWNRNRPLAWDVTVSDTYALGYRALANAGVGNIIHQREMHKRRLYAHLLEDHVVMAFGLESSGVWGKDAFKLTKELGKKLFEATAEPRSTAFLRQRVSLELQRGNAKMMLSGHRHSSNKNNVSNIVDII

SEQ ID NO: 20470 - protein, 985 aa, Dermanyssus gallinae
MANEFQCPWCSMCFPTKRGVQIHAGRTHKKKIAESSGPAVLQQAAATLSSVSQPLPSPHASLVEPSPQPASQSPVNGGPTPDDHLPPSSPLSLHKLLANAKMTRKVLRRIPKGARIPLRGLFHRLLKDVVKKNDEASWTALLTLAPKVLHVEKETQGGHSLASVVKEKVALFGSAALTCVEAEGRGKRILTDKARAQIAAHKLSMDFNVRSAIRILSSDDTIAPVTEESINEMVAKHPPAPAGDVVPPSPFGLPAVGSCSGEDVAKALRSFPSGAAGGLDGLTPDHLKCLLPANGDHNDVLETLAKVCDIIRNGQVPEAVRNVIYGGWLIALKKKTGGYRPIAVGCTLRRLATKTLLPQVNVKSYLQPRQMGYATQNGAEIIAHTARTFLEHNEKCCLLKLDFKNAFNLNKRGHLLTEISKHAPDLYPMMHQAYSKPTPLMFGEVEIRSSAGCQQGDVAAPLAFSLLLHQYVKQVASKVPLFYLDDGTLLDNDPSVLLRDIKDLRAFEQWSGLQLNPSKCELFLQGFEDEERQQVIAEFNSNLPGILVKDRCDLDLLGTAVFPDMIGPILAEKGEQLSRLYQRLGHLGRHQAYFLLRHAMGVQKVLYVLRTSPAFLLPSETLNLDDQVRRALENILDLTLDDKAWTQASLPVRLGGMGIRSATDLALPAFLASSHSCASAVAATAGGLISHQQDAARIWDARQSGRPSEEQVTRQKGWDQIATQATHLTLLSACELDIDGIRLKAVSSDAAGAWLDVFPSELVGSKLADDHFRAASGLRLGIAMFETEACPCGGTVDERGLHRLSCTKLAGLTQGRHDAINDILGRAFRQAGYRVTLEPGGLQSDDKRRPDGLTSRDWDRNRPLAWDVTVSDTYALGYRALANAGVGNIIHQREMHKRRLYAHLLEDHVVMAFGLESSGVWGKDALKLTKELGKKLFEATAEPRSTAFLRQRVSLELQRGNAKMMLSGHRHSSNKNNISNIVDII

SEQ ID NO: 20471 - protein, 1006 aa, Dermanyssus gallinae
MRSGQPQQSQQLFCFKGEATAMANEFQCPWCSMCFPTKRGVQIHAGRTHKKKIAESSGPAVLQQAAATLSSVSQPLPSPHASQVEPSPHPASQSPVNGGPTPDDHLPPSSPLSLHKLLANAKMTRKVLRRIPKGARIPLRGLFHRLLKDVVKKNDEASWTALLTLAPKVLHVEKETQGGHSLASVVKEKVALFEGAALTCVEAEGRGKRILTDKARAQIAAHKLSMDFNVRSAIRILSSDDTIAPVTEESINEMVAKHPPAPAGDVVPPSPFGLPAVGSCSGEDVAKALRSFPSGAAGGLDGLTPDHLKCLLHANGDHNEVLETLAKVCDIIRNGQVPEAVRNVIYGGWLIALKNKTGGYRPIAVGCTLRRLATKTLLPQVNVKSYLQPRQMGYATQNGAEIIAHTARTFLEHNEKCCLLKLDFKNAFNLNKRGHLLTEISKHAPALYPMMHQAYSKPTPLMFGEVEIRSSAGCQQGDVAAPLAFSLLLHQYVKQVASKVPLFYLDDGTLLDNDPSVLLRDIKDLRAFEQWSGLQLNPSKCELFLQGFEDEERQQVIAEFNSNLPGILVKDRCDLDLLGTAVFPDMIGPILAEKGEQLSRLYQRLGHLGRHQAYFLLRHAMGVQKVLYVLRTSPVFLLPSETLNLDDQVRRALENILDLTLDDKAWTQASVPVRLGGMGIRSATDLALPAFLASSHSCASAVAATAGGLISHQQDAARIWEARQSGRPSEEQVTRQKGWDQIATQATHLTLLSACELDIDGNRLKAVSSDAAGAWLDVFPSELVGSKLADDHFRAASGLRLGLAMFETEACPCGGTVDERGLHRLSCTKLAGLTQGRHDAINDILGRAFRQAGYRVTLEPGGLQSDDKRRPDGLTSRDWNRNRPLAWDVTVSDTYALGYRALANAGVGNIIHQREMHKRRLYAHLLEDHVVMAFGLESSGVWGKDALKLTKELGKKLFEATAEPRSTAFLRQRVSLELQRGNAKMMLSGHRHSSNKNNISNIVDII

SEQ ID NO: 20472 - protein, 931 aa, Dermanyssus gallinae
MRSGQPQQSQQLLCFKGEATAMANEFQCPWCSMCFPTKRGVQIHAGRTHKKRIAESSGPAVLQQAAATLSSVSQPLPSPHASQVEPSPHPASQSPVNGGPTPDDHLPPSSPLSFHKLLANAKMTRKVLRRIPKGARIPLRGLFHRLLKDVVKKNDEASWTALLTLAPKVLHVEKETQGGHSLASVVKEKVALFQGAALTCVEAEGRGKRILTDKARAQIAAHKLSMDFNVRSAIRILSSDDTIAPVTEESINEMVAKHPPAPAGDVVPPSPFGLPAVGSCSGEDVAKALRSFPSGAAGGLDGLTPDHLKCLLPANGDHNDVLETLAKVCGIIRNGQVPEAVRNVIYGGWLIALKKKTGGYRPIAVGCTLRRLATKTLLPQVNVKSYLQPRQMGYATQNGAEIIAHTARTFLEHNEKCCLLKLDFKNAFNLNKRGHLLTEISKHAPALYPMMHQAYSKPTPLMFGEVEIRSLAGCQQGDVAAPLAFSLLLHQYVKQVASKVPLFYLDDGTLLDNDPSVLLRDIKDLRAFEQWSGLQLNPSKCELFLQGFEDEERQQVIAEFNSNLPGILVKDRCDLDLLGTAVFPDMIGPILAEKGEQLSRLYQRLGHLGRHQAYFLLRHAMGVQKVLYVLRTSPVFLLPSETLNLDDQVRRALENILDLTLDDKAWTQASLPVRLGGMGIRSATDLALPAFLASSHSCASAVAATAGGLISHQQDAARIWDARQSGRPSEEQVTRQKGWDQIATQATHLTLLSACELDIDGIRLKAVSSDAAGAWLDVFPSELVGSKLADDHFRAASGLRLGLAMFETEACPCGGTVDERGLHRLSCTKLAGLTQGRHDAINDILGRAFRQAGYRVTLEPGGLQSDDKRRPDGLTCRDWNRNRPLAWDVTVSDTYALGYRALANAGVGNIIHQREMHKRRLYAHLLEDHVL

SEQ ID NO: 20473 - protein, 985 aa, Dermanyssus gallinae
MANEFQCPWCSMCFPTKRGVQIHAGRTHKKKIAESSGPAVLQQAAATLSSVSQPLPSPHASLVEPSPQPASQSPVNGGPTPDDHLPPSSPLSLHKLLANAKMTRKVLRRIPKGARIPLRGLFHRLLKDVVKKNDEASWTALLTLAPKVLHVEKETQGGHSLASVVKEKVALFGSAALTCVEAEGRGKRILTDKARAQIAAHKLSMDFNVRSAIRILSSDDTIAPVTEESINEMVAKHPPVPAGDVVPPSPFGLPAVGSCSGEDVAKALRSFPSGAAGGLDGLTPDHLKCLLPANGDHNDVLETLAKVCDIIRNGQVPEAVRNVIYGGWLIALKKKTGGYRPIAVGCTLRRLATKTLLPQVNVKSYLQPRQMGYATQNGAEIIAHTARTFLEHNEKCCLLKLDFKNAFNLNKRGHLLTEISKHAPDLYPMMHQANSKPTPLMFGEVEIRSSAGCQQGDVAAPLAFSLLLHQYVKQVASKVPLFYLDDGTLLDNDPSVLLRDIKDLRAFEQWSGLQLNPSKCELFLQGFEDEERQQVIAEFNSNLPGILVKDRCDLDLLGTAVFPDMIGPILAEKGEQLSRLYQRLDHLGRHQAYFLLRHAMGVQKVLYVLRTSPAFLLPSEALNLDDQVRRALENILDLTLDDKAWTQASLPVRLGGMGIRSATDLALPAFLASSHSCASAVAATAGGLISHQQDAARIWDARQSGRPSEEQVTRQKGWDQIATQATHLTLLSACELDIDGIRLKAVSSDAAGAWLDVFPSELVGSKLADDHFRAASGLRLGIAMFETEACPCGGTVDERGLHRLSCTKLAGLTQGRHDAINDILGRAFRQAGYRVTLEPGGLQSDDKRRPDGLTSRDWDRNRPLAWDVTVSDTYALGYRALANAGVGNIIHQREMHKRRLYAHLLEDHVVMAFGLESSGVWGKDALKLTKELGKKLFEATAEPRSTAFLRQRVSLELQRGNAKMMLSGHRHSSNKNNISNIVDII

SEQ ID NO: 20474 - protein, 976 aa, Dermanyssus gallinae
MRSGQPQQSQQLLRFKGEVTAMANEFQCPWCSMCFPIKRGVQIHAGRTHKKKIAESSGPAVLQQGAATLSSVSQPLPSPHASLVEPSPHPASQSPVNGGPRHDDHLPPSSPLSLHKLLANAKMTRKVLRRIPKGARIPLRGLFHRLLKDVVKKNDEASWTALLTLAPKVLHVEKETQGGHSLASVVKEKVALFGDAALTCVEAECRGKRILTDKARAQIAAHKLSMDFNVRSAIRILSSDDTIAPVTEESINEMVAKHPPAPAGDVVPPSPFGLPAVGSCSGEDVAKALRSFPSGAAGGLDGLTPDHLKCLLPANGDHNDVLETLAKVCDIIRNGQVPEAVRNVIYGGWLIALKKKTGGYRPIAVGCTLRRLATKTLLPQVNVKSYLQPRQMGYATQNGAEIIAHTARTFLEHNEKCCLLKLDFKNAFNLNKRGHLLTEISKHAPALYPMMHQAYSKPTPLMFGEVEIRSSAGCQQGDVAAPLAFSLLLHQYVKQVASKVPLFYLDDGTLLDNDPSVLLRDIKDLRAFEQWSGLQLNPSKCELFLQGFEDEERQQVIAEFNSNLPGILVKDRCELDLLGTAVFPDMIGPILAEKGEQLSRLYQRLGHLGRHQAYFLLRHAMGVQKVLYVLRTSPVFLLPSETLNLDDQVRRALENILDVTLDDKAWTQASLPVRLGGMGIRSATDLALPAFLASSHSCASAVAATAGGLISHQQDAARIWDARQSGRPSEEQVTRQKGWDQIATQATHLTLLSACELDIDGIRLKAVSSDAAGAWLDVFPSELDGSKLADDHFRAASGLRLGIAMFETEACPCGGTVDARGLHRLSCTKLAGLTQGRHDAINDILGRAFRQAGYRVTLEPGGLQSHDKRRPDGLTSRDWDRNRPLAWDVTVSDTYALGYRALANAGVGKIIHQREMHKRRLYAHLLEDYVVMAFGLESSGVWGKDALKLTKELGKKLFEATAEPRSTAFLRQRVSL

SEQ ID NO: 20475 - protein, 983 aa, Dermanyssus gallinae
MANEFRCQWCSMCFPTKRGVQIHAGRTHKKKIAEPSGPAVFQQAASSSISQPLLSSHAPQAEFFPQPASQPQVNGGPAPDHHLPSSSSLSLHKLLANAKMTRKVLRRIPKEARIPLRGLFHRLLKDVVKKNDKASWTALLTLAPKVLHVDKETQGDHSLASVVKEKVALFGAATLTCMEAEGRGKRVLTDKARAQIAAHKLSMDFNVRSAIRILSSDDTIAPVTKESIDEMIAKHPPAPAGDVVPPSPIGLPAVGSCSSEDVAKALRTFPSGAAGGLDGLTSDHLKCLLSANGDHNDVLETLAKVCDIIRNGQVPETVRNVIYGGWLIALKKKTGGYRPIAVGCTLRRLATKTLLPQVNVKNYLQLRQMGYATHNGAEIIAHTARTFLENNEKCCLLKLDFKNAFNLNKRGQLLAEVSKHAPALYPMMHQAYSRPTPLMFGEVEITSSAGCQQGDVAAPLAFSLLLHQYVKQVTSKVPLFYLDDGTLLDNDPSALLKDIKDLRAFEQWSGMQLNPSKCELFLQGFEDEERQQVIAEFNSNLPGILVKDRCELDLLGTAVFPEMIGPVLAEKGEQLSRLYQRLGHLGRHQAYFLLWHAMGVQKVLYVLRTSPTFLLPSETLDLDDQVRRALENILDLALDNKAWMQASLSVRLGGMGIRSATDLALPAFLASSHSCVSAVAATTGGLISHQQDAIRIWDARQSGRPSEEQVTRQKGWDQIATQATHLTLLSACELDIDGIRLKAVSSDAAGAWLDVFPSELVGSKLADDHFRAASGLRLGISMFETEACPCGGTVDERGLHRLSCTKLAGLTQGRQDAINDILGRAFRQAGYRVTLEPGGLQSDDKRRPDGLTSRDWDRNRPLAWDVTVSDTYALGYRALANAGVGNIIHQREMHKRRLYAHLLEDHVVMAFGLESSGVWGKDALKLTKELGKKLFEATAEPRSTAFLRQRVSLELQRGNAKMMLSGHRHSCNKNNISNIVDII

SEQ ID NO: 20476 - protein, 1006 aa, Dermanyssus gallinae
MRSGQPQQSQQLLCFKGEATAMANEFQCPWCSMCFPTKRGVQIHAGRTHKKKIAESSGPAVLQQAAATLSSVSQPLPSPHASLVEPSPHPASQSPVNGGPTPDDHLPPSSPLSLHKLLANAKMARKVLRRIPKGARIPLRGLFHRLLKDVVKKNDEASWTALLTLAPKVLHVEKETQEGHSLASVVKEKVALFGGAALTCVEAEGRGKRILTDKARAQIAAHKLSMDFNVRSAIRILSSDDTIAPVTEESINEMVAKHPPAPAGDVVPPSPFGLPAVGSCSGEDVAKALRSFPSGAAGGLDGLTPDHLKCLLPANGDHNDVLETLAKVCDIIRNGQVPEAVRNVIYGGWLIALKKKTGGYRPIAVGCTLRRLATKTLLPQVNVKSYLQPRQMGYATQNGAEIIAHTARTFLEHNEKCCLLKFDFKNAFNLNKRGHLLTEISKHAPALYPMMHQAYSKPTLLMFGEVEIRSSAGCQQGDVAAPLAFSLLLHQYVKQVASKVPLFYLDDGTLLDNDPSVLLRDIKDLRAFEKWSGLQLNPSKCELFLQGFEDEERQQVIAEFNSNLPGILVKDRCGLDLLGTAVFPDMIGPILAEKGEQLSRLYQRLGHLGRHQAYFLLRHAMGVQKVLYVLRTSPVFLLPSETLNLDDQVRRALENILDLTLDDKAWTQASLPVRLGGMGIRSATDLALPAFLASSHSCASAVAATAGGLISHQQDAVRIWDARQSGRPSEEQVTRQKGWDQIATQATHLTLLSACELDIDGIRLKAVSSDAAGAWLDVFPSELVGSKLADDHFRAASGLRLGIAMFETEACPCGGTVDERGLHRLSCTKLAGLTQGRHDAINDILGRAFRQAGYRVTLEPGGLQSDDKRRPDGLTSRDWDRNRPLAWDVTVSDTYALGYRALANAGVGNIIHQREMHKRRLYAHLLEDHVVMAFGLESSGVWGKDALKLTKELGKKLFEATAEPRSTAFLRQRVSLELQRGNAKMMLSGHRHSSNKNNISNIVDII

SEQ ID NO: 20477 - protein, 983 aa, Dermanyssus gallinae
MANEFRCQWCSMCFPTKRGVQIHAGRTHKKKIAEPSGPAVFQQAATSSISQPLLSSHAPQAEFFPQPARQPQVNGGPTPDHHLPSSSSLSLHKLLANAKMTRKVLRRIPKGARIPLRGLFHRLLKDVVKKNDEASWTALLTLAPKVLHVDKETQGGHSLASVVKEKVALFGAATLTCMEAEGRGKRVLTDKARAQIAAHKLSMDFNVRSAIRILSSDDTIAPVTKESIDEMIAKHPPAPAGDVVPPSPIGLPAVGSCSSEDVAKALRTFPSGAAGGLDGLTPDHLKCLLLANGDHNDVLETLAKVCDIKRNGQVPETVRNIIYGGWLIALKKKTGGYRPIAVGCTLRRLATKTLLPQVNVKNYLQPRQMGYATHNGAEIIAHTARTFLENNEKCCLLKLDFKNAFNLNKRGQLLAEVSKHAPALYSMMHQAYSRPTPLMFGEVEIRSSADCQQGDVAAPLAFSLLLHQYVKQVTSKVPLFYLDDGTLLDNDPSALLKDIKDLRAFEQWSGMQLNPSKCELFLQGFEDEETQQVIAEFNNNLPGILVKDRCELDLLGTAVFPEMIGPVLAEKGEQLSRLYQRLGHLGRHQAYFLLRHAMGVQKVLYVLRTSPTFLLSSETLDLDDQVRRALENILDLTLDDKAWMQASLSVRLGGMGIRSATDLALPAFLASSHSCASAVAATTGGLISHQQDAIRFWDARQSGRPSEEQVTRQKGWDQIATQDTHLTLLSACELDIDGIRLKAVLSDAAGAWLDVFPSELVGSKLADDHFRAASGLRLGIAMFETEACPCGGTVDERGLHRLSCTKLAGLTQGRHDSINDILGRAFRQAGYRVTLEPGGLQSDDKRRPDGLTSRDWDRNRPLAWDVTVSDTYALGYRALANAGVGNIIHQREMHKRRLYAHLLEDHVVMAFGLESSGVWGKDALKLTKELGKKLFEAAAEPRSTAFLRQRVSLELQRGNAKMMLSGHRHSCNKNNISNIVDII

SEQ ID NO: 20478 - protein, 884 aa, Dermanyssus gallinae
MTRKVLRRIPKGARIPLRGLFHRLLKDVVKKNDEASWTALLTLAPKVFHVDKETQGGHSLASVVKEKVALFEAAALTCMEAEARGTRVLTDKARAQIAAHKLSMDFNVRSAIRIMSSDDTIALVTKESIDEMIAKHPPAPAGDVVPLPSIGLPAVGSCSSEDVAKALRTFPSGAAGGLDGLTPDHLKCLLPAHGDHNDVLETLAKVCDIIRNGQVSETVRNVIYGGWLIALKKKTGGYRPIAVGCTLRRLATKTLLPQVNVKNYLQPRQMEYVTHNGAEIIAHKARTFLKNNEKCCLLKLDFKNAFNLNKRGQLLAEVSKHAPALYPMMHQAYSRPTPLMFGEVEIRSSAGCQQGHVAAPLAFSLLLHQYVKQVTSKVHLFYLDDGTLLDNDPSALLKDVKDLRAFEQWSGMQLNPSKCKLFLQGFEDEERQQVIAEFNSNLPGILVKDRCELDLLGTAVFPEMIGPVLAEEGEQLSRLYQRLGHLGRHQAYFLLRHAMGVQKVLYVLRTSPTFLLPSETLDLDDQVRRALENILDLTLDDKAWMQASLSVRLGGMGIRSATDLALPAFLASSHSCASAVAATTGGLISHQQDAMRIWDARQSGRPSEEQVTRQKGWDQIATQATHLTLLSACELDIDGIRLKAVSSDAAGAWLDVFPSELVGSKLANDHFRAASGLRLGIAMFETEACPCGGTVDERGLHRLSCTKLAGLTQGRHDAINDILGRAFRQAGYRVTLEPGGLQSDDKRRPDGLTSRDWDRNRPLAWDVTVSDTYALGYRALANAGVGNIIHQREMHKRRLYAHLLEYHVVMAFGLESSGVWGKDALKLTKELGKKLFEATAEPRSTAFLRQRVSLELQRGNAKMMLSGHRHSSNKNNISNIVDII

SEQ ID NO: 20479 - protein, 978 aa, Dermanyssus gallinae
MSVVFDVLSYKEGCADHAGKTHKKKVAESSGPAVLQEAAGTLSSVSQPLPSPHASLVEPSPHPASQSPVNRGPTPDDHLPPSSPLSLHKLLANAKMTRKVLRRIPKGARIPLRGLFHRLLKDVVKNDEASWTALLTLAPKVLHVEKETQGGHSLASVVKEKVALFGGAALTCVEAEGRGKRILTDKARAQIAAHKFSMDFNVRSAIRILSSDDTIAPVTEEPINEMVAKHPPAPAGDVVPPSPFGLPAVGSCSGEDVAKALRSFPSGAAGGLDGLTPDHLKCLLPANGDHNDVLETLAKVYDIIRNGQVAEAVRNVIYGGWLIALKKKTGGYRPIAVGCTLRRLATKTLLPQVNVKSYLQPRQMGYATQNGAEIIAHTARTFLEHNEKCCLLKLDFKNAFNLNKRGHLLTEISKHAPALYPMMHQAYSKPTPLMFGEVEIRSSAGCQQGDVAAPLAFSLLLHQYVKQVASKVPLFYLDDGTLLDNDPSVLLRDIKDLRAFEKWSGLQLNPSKCELFLQGFEDEEGQQVIAEFNSNLPGILVKDRCDLDLLGTAVFPDMIGPILAEKGEQLSRLYQRLGHLGRHQAYFLLRHAMGVQKVLYVLRTSPVFLLPSETLNLDDQVRRSLENILDLTLDDKAWTQASLPVRLGGMGIRSATDLALPAFLASSHRCASAVAVTAGGLISHQQDAVRIWDARQSGRPSEEQVTRQKGWDQIATQATHLTLLSACELDIDGIRLKAVSSDAAGAWLDVFPSELVGSKLADDHFRAASGLRLGIAMFETEACPCGGTVDERGLHRLSCTKLAGLTQGRHDAINDILGRAFRQAGYRVTLEPGGLQSDDKRRPDGLTRRDWDRNRPLAWDVTVSDTYALGYRALANAGVGNIIHQREMHKRRLYAHLLEDHVVMAFGLESSGVWGKDALKLTKELGKKLFEATAEPRSTAFLRQRVSLDLQRGNAKMMLSGHRHSSNKNNISNIVDII

SEQ ID NO: 20480 - protein, 881 aa, Dermanyssus gallinae
MTRKVLRRIPKGARIPLRGLFHRLLKDVVKKNDEASWIALLTLAPKVLHVEKETQGGHSLASVVKEKVALFEGAALTCVEAEGRGKRILTDKARAQIAAHKLSMDFNVRSAIMILSSDDTIAPVTEESINEMVAKHPPAPAGDVVPPSPFGLPAVGSCSGEDVAKALRSFPSGAAGGLDGLTPDHLKCLLPANGDHNDVLETLAKVCDIIRNGQVPEAVRNVIYGGWLIALKKKTGGYRPIAVGCTLRRLATKTLLPQVNVKSYLQPRQMGYATQNGAEIIAHTARTFLEHNEKCCLLKLDFKNAFNLNKRGHLLTEISKHAPALYPMMHQAYSKPTPLMFGEVEIRSSGGCQQGDVAAPLAFSLLLHQYVKQVASKVPLFYLDDGTLLDNDPSVLLRDIKDLRAFEQWSGLQLNPSKCELFLQGFEDEERQQVIAEFNSNLPGILVKDQCDLDLLGTAVFPDMIGPILAEKGEQLSRLYQRLGHLGRHQAYFLLRHAMGVQKVLYVLRTSPVFLLPSETLNLDDQVRRALENILDLTLDDKAWTQASLPVRLGGMGIRSATDLALPAFLASSHSCASAVAATAGELISHQQDAARIWDARQSGRPSEKQVTRQKGWDQIATQATHLTLLSACELDIDGIRLKAVSSDAAGAWLDVFPSELVGSKLADDHFRAASGLRLGLAMFETEACPCGGTVDERGLSCTKLAGLTQGRHDAINDILGRAFRQAGYRVTLEPGGLQSDDKRRPDGLTSRDWNRNRPLAWDVTVSDTYALGYRALANAGVGNIIHQREMHKRRLYAHLLEDHVVMAFGLESSGVWGKDALKLTKELGKKLFEATAEPRSTAFLRQRVSLELQRGNAKMMLSGHRHSSNKNNISNIVDII

SEQ ID NO: 20481 - protein, 985 aa, Dermanyssus gallinae
MANEFQCPWCSMCFPTKRGVQIHAGRTHKKKIAESSGPAVLQQAAATLSSVSQPLPSPHASQVEPSPHPASQSPVNGGPTPDDHLPPSSPLSLHKLLANAKMTRKVLRRIPKGARIPLRGLFHRLLKDVVKKNDEASWTALLTLAPKVLHIEKETQGGHSLASVVKEKVALFEGAALTCVEAEGRGKRILTDKARAQIAAHKLSMDFNVRSAIRILSSDDTIAPVTEESINEMVAKHPPAPAGDVVPPSPFGLPAVGSCSGEDVAKALRSFPSGAAGGLDGLTPDHLKCLLPANGDHNDVLETLAKVCDIIRNGQVPEAVRNVIYGGWLIALKKKTGGYRPIAVGCTLRRLATKTLLPQVNVKSYLQPRQMGYATQNGAEIIAHTARTFLEHNEKCCLLKLDFKNAFNLNKRGHLLTEISKHAPALYPMMHQAYSKPTPLMFGEVEIRSSAGCQQGDVAAPLAFSLLLHQYVKQVASKVPLFYLDDGTLLDNDPSVLLRDIKDLRAFEQWSGLQLNPSKCELFLQGFEDEERQQVIAEFNSNLPGILVKDRCDLDLLGTAVFPDMIGPILAEKGEQLSRLYQRLGHLGRHQAYFLLRHAMGVQKVLYVLRTSPVFLLPSETLNLDDQVRRALENILDLTVDDKAWTQASLPVRLGGMGIRSATDLALPAFLASSHSCASAVAATAGGLISHQQDAARIWDARQSGRPSEEQVTRQKGWDQIATQATHLTLLSACELDIDGIRLKAVSSDAAGAWLDVFPSELVGSKLADDHFRAASGLRLGLAMFETEACPCGGTVDERGLHRLSCTKLAGLTQGRHDAINDILGRAFRQAGYRVTLEPGGLQSDDKRRPDGLTSRDWNRNRPLAWDVTVSDTYALGYRALANAGVGNIIHQREMHKRRLYAHLLEDHVVMAFGLESSGVWGKDALKLTKELGKKLFEATAEPRSTAFLRQRVSLELQRGNAKMMLSGHRHSSNKNNISNIVDII

SEQ ID NO: 20482 - protein, 1006 aa, Dermanyssus gallinae
MRSGQPQQSQQLLCFKGEATAMANEFQCPWCSMCFPTKRGVQIHAGRTHKKKIAESSGPAVLQQAAATLSSVSQPLPSPHASLVEPSPHPASQSPVNGGPTPDDHLPPSSPLSLHKLLANAKMTRKVLRRIPKGARIPLRGLFHRLLKDVVKKNDEASWTALLTLAPKVLHVEKETQGGHSLASVVKEKVALFGGAALTCVEAEGRGKRILTDKARAQIAAHKLSMDFNVRSAIRILSSDDTIAPVTEESINEMVAKHPPAPAGDVVPPSPFGLPAVGSCSGEDVAKALRSFPSGAAGGLDGLTSDHLKCLLPANGDHNDVLETLAKVCDIIRNGQVPEAVRNVIYGGWLIALKKKTGGYRPIAVGCTLRRLATKTLLPQVNVKSYLQPRQMGYATQNGAEIIAHTARTFLEHNEKCCLLKLDFKNAFNLNKRGHLLTEISKHAPALYPMMHQAYSKPTPLMFGEVEIRSSAGCQQGDVAAPLAFSLLLHQYVKQVASKVPLFYLDDGTLLDNDPSVLLRDIKDLRAFEKWSGLQLNPSKCELFLQGFEDEERQQVIAEFNSNLPGILVKDRCDLDLLGTAVFPDMIGPILAEKGEQLSRLYQRLGHLGRHQAYFLLRHAMGVQKVLYVVRTSPVFLLPSETLNLDDQVRRALENILDLTLDDKAWTQASLPVRLGGMGIRSATDLALPAFLASSHSCASAVAATAGGLISHQQDAVRIWDARQSGRPSEEQVTRQKGWDQIATQATHLTLLSACELDIDGIRLKAVSSDAAGAWLDVFPSELVGSKLADDHFRAASGLRLGIAMFETEACPCGGTVDERGLHRLSCTKLAGLTQGRHDAINDILGRAFRQAGYRVTLEPGGLQSDDKRRPDGLTSRDWDRNRPLAWDVTVSDTYALGYRALANAGIGNIIHQREMHKRRLYAHLLEDHVVMAFGLESSGVWGKDALKLTKELGKKLFEATAEPRSTPFLRQRVSLELQRGNAKMMLSGHRHSSNKNNISNIVDII

SEQ ID NO: 20483 - protein, 884 aa, Dermanyssus gallinae
MTRKVLRRIPKGARIPLRGLFHRLLKDVVKKNDEASWTALLTLASKVLHVEKETQGGHSLASVVKEKVALFGGAALTCVEAEGRGKRVLTDKARAQIAAHKLSMDFNVRSAIRILSSDDTIAPVTEESINEMVAKHPPAPAGDVVPPSPFGLPAVGSCSGEDVAKALRSFPSGAAGGLDGLTPDHLKCLLPANGDHNHVLETLAKVCDIIRNGQVPEAVRNVIYGGWLIALKKKTGGYRPIAVGCTLRRLATKTLLPQVNVKSYLQPRQMGYATQIGAEIIAHTARTFLEHNEKCCLLKLDFKNAFNLNKRGHLLTEISKHAPTLYPMMHQAYSKPTPLMFGEVEIRSSAGCQQGDVAAPLAFSLLLHQYVKQVASKVPLFYLDDGTLLDNDPSVLLRDIKDLRAFEQWSGLQLNPSNCELFQQGFEDEERQQVIAEFNSNLPGILVKDRCDLDLLGTAVFPDMIGPILAEKGEQLSRLYQRLGHLGRHQAYFLLRHAMGVQKVLYVLRTSPVFLLPSETLNLDDQVRRALENIIDLTLDDKAWTQASLPVRLGGMGIRSATDLALPAFLASSHSCASAVAATAGGLISHQQDAARIWDARQSGRPSEEQVTRQKGWDQIATQATHLTLLSACELDIDGIRLKAVLSDAAGAWLDVFPSELVGSKLADDHFRAASGLRLSIAMFETEACPCGGTVDERGLHRLSCTKLAGLTQGRHDAINDILGRAFRQAGYRVTLEPGGLQSDDKRRPDGLTSRDWDCNRPLAWDVTVSDTYALGYRALANAGVGNIIHQREMHKRRLYAHLLEDHVVMAFGLESSGVWGKDALKLTKELGKKLFEATAEPRSTAFLRQRVSLELQRGNAKMMLSGRRHSSNKNNISNIVDII

SEQ ID NO: 20484 - protein, 981 aa, Dermanyssus gallinae
MANEFRCQWCSMCFPTKRGVQIHAGRTHKKKIAESSGPAVLQQAATSSTSQPLPSSHAPQAEFFPQPASQPQVNGGPTPDHRLPSSSPLSLHKLLANAKMTRKVLRRIPKGARIPLRGLFHRLLKDVVKKNDEASWTALLTLAPKVLHVDKETQGGHSLASVVKEKVALFGAATLTWMEGRGKRVLTDKARAQIAAHKLSMDFNVRSAIRILSSDDTIAPVTKESIDEMIAKHPPAPAGDVVPPYPIGLPAVGSCSSEDVAKALRTFPSGAAGGLDGLTPDHLKCLLPANGDHNDVLETLTKVCDIIRNGQVPETVRNVIYGGWLIALKKKTGGYRPIAVGCTLRRLATKTLLPQVNVKNYLQPRQMGYATHNGAEIIAHTARTFLENNEKCCLLKLDFKNAFNLNKRGQLLAEISKHAPALYPMMHQAYSRPTYLMFGEVEIRSSAGCQQGDVAAPLAFSLLLHQYVKQVTSKVPLFYLDDGTLLDNDPSALLKDIKDLRAFEQWSGMQLNPSKCELFLQGFEDEERQQVIAEFNSNLPGILVKDRCELDLLGTAVFPEMIGPVLAEKGEQLSRLYQRLGYLGRHQAYFLLRHAMGVQKVLYVLRTSPTFLLPSETLDLDDQVRRALENILDLTLDDKAWMQASLLVRLGGMGIRSATEIALPAFLASSHSCAYAVAATTGGLISHQQDAIRIWDARQSGRPSEEQVARQKGWDQIATQATHLTLLSACELDIDGIRLKAVSSDAAGAWLDVFSSELVGSKLADDHFRAASILRLGIAMFETEACPCGGTVDERGLHRLSCTKLAGLTQGRHDAINDILGRAFRQAGYRVTLEPGGLQSDDKRRPDGLTSRDWDRNRPLAWDVTVSDTYALGYRALANAGVGNIIHQREMHKRRLYAHLLEDHVVMAFGLESSGVWGKDALKLTKELGKKLFEATAEPRSTAFLRQRVSLELQRGNAKVMLSGYRHSSNKNNISNIVDII

SEQ ID NO: 20485 - protein, 861 aa, Dermanyssus gallinae
MLKDVVKKNDEASWTALLTLAPKVLHVEKETQGGHSLASVVKEKVALFEGAALTCVEAEGRGKRILTDKARAQIAAHKLSMDFNVRSAIRILSSDDTIAPVTEESINEMVAKHPPAPAGDVVPPSPFGLPAVGSCSGEDVAKALRSFPSGAAGGLDGLTPDHLKCLLPANGDHNDVLETLAKVCDIIRNGQVPEAVRNVIYGGWLIALKKKTGGYRPIAVGCTLRRLATKTLLPQVNVKSYLQPRQMGYATQNGAEIIAHTARTFLEHNEKCCLLKLDFKNAFNLNKRGHLLTEISKHAPALYPMMHQAYSKPTPLMFGEVEIRSSAGCQQGDVAAPLAFSLLLHQYVKQVASKVPLFYLDDGTLLDNDPSVLLRDIRDLRAFEQWSGLQLNPSKCELFLQGFEDEERQQVIAEFNSNLPGILVKDRCDLDLLGTAVFPDMIGPILAEKGEQLSRLYQRLGHLGRHQAYFLLRHAMGVQKVLYVLRTSPVFLLPSETLNLDDQVRRALENILDLTLDDKAWTQASLPVRLGGMGIRSATDLALPAFLASSHSCASAVAATAGGLISHQQDAARIWDARQSGRPSEEQVTRQKGWDQIATQATHLTLLSACELDIDGIRLKAVSSDAAGAWLDVFPSELVGSKLADDHFRAASGLRLGLAMFETEACPCGGTVDERGLHRLSCTKLAGLTQGRHDAINDILGRAFRQAGYRVTLEPGGLQSDDKRRPDGLTSRDWNRNRPLAWDVTVSDTYALGYRALANAGVGNIIHQREMHKRRLYAHLLEDHVVMAFGLESSGVWGKDALKLTKELGKKLFEATAEPRSTAFLRQRVSLELQRGNAKMMLSGHRHSSNKNNISNIVDII

SEQ ID NO: 20486 - protein, 1006 aa, Dermanyssus gallinae
MRSGQPQQSQQLLCFKGEATAMANEFQCPWCSMCFPTKRGVQIHAGRTHKKKIAESSGPAVLQQAAATLSSVSQPLPSPHASLVEPSPHPASQSPVNGGPTPDDHLPPSFPLSLHKLLANAKMTRKVLRRIPKGARIPLRGLFHHLLKDVVKKNDEASWTALLTLAPKVLHVEKETQGGHSLASVVKEKVALFGGAALTCVEAEGRGKRILTDKARAQIAAHKLSMDFNVRSAIRILSSDDTIAPVTEESINEMVAKHPPAPAGDVVPPSPFGLPAVGSCSGEDVAKALRSFPSGAAGGLDGLTPDHLKCLLPANGDHNDVLETLAKVCDIIRNGQVPEAVRNVIYGGWLIALKKKTGGYRPIAVGCTLRRLATKTLLPQVNVKSYLQPRQMGYATQNGAEIIAHTARTFLEHNEKCCLLKLDFKNAFSLNKLGHLLTEISKHAPALYPMMHQAYSKPTPLMFGEVEIRSSAGCQQGDVAAPLAFSLLLHQYVKQVASKVPLFYLDDGTLLDNDPSVLLRDIKDLRAFEKWSGLQLNPSKCELFLQGFEDEERQQVIAEFNSNLPGILVKDRCDLDLLGTAVFPDMIGPILAEKGEQLSRLYQRLGHLGRHQAYFLLRHAMGVQKVLYVLRTSPVFLLPSETLNLDDQVRRALENILEITLDDKAWTQASLPVRLGGMGIRSATDLALPAFLASSHSCASAVAATAGGLISHRQDAVRIWDARQSGRPSEEQVTRQKGWDQIATQATHLTLLSACELDIDGIRLKAVSSDAAGAWLDVFPSELVGSKLADDHFRAASGLRLGIAMFETEACPCGGTVDERGLHRLSCTKLAGLTQGRHDAINDILGRAFRQAGYRVTLEPGGLQSDDKRRPDGLTSRDWDRNRPLAWDVTVSDTYALGYRALANAGVGNIIHQREMHKRRLYAHLLEDHVVMAFGLESSGVWGKDALKLTKELGKKLFEATAEPRSTAFLRQRVSLELQRGNAKMMLSGHRHSSNKNNISNIVDII

SEQ ID NO: 20487 - protein, 985 aa, Dermanyssus gallinae
MANEFQCPWCSMCFPTKRGVQIHAGRTHKKKIAESSGPAVLQQAAATLSSVSQPLPSPHASQVEPSPHPASQSPVNGGPTPDDHLPPSSPLSLHKLLANAKMTRKVLRRIPKGARIPLRGLFHRLLKDVVKKNDEASWTALLTLAPKVLHVEKETQRGHSLASVVKEKVALFEGAALTCVEAEGRGKRILTDKARAQIAAHKLSMDFNVRSAIRILSSDDTIAPVTEESINEMVAKHPPAPAGDVVPPSPFGLPGVGSCSGEDVAKALRSFPSGAAGGLDGLTPDHLKCLLPANGDHNDVLETLAKVCDIIRNGQVPEAVRNVIYGGWLIALKKKTGGYRPIAVGCTLRRLATKTLLPQVNVKSYLQPRQMGYATQNGAEIIAHTARTFLEHNEKCCLLKLDFKNAFNLNKRGHLLTEISKHAPALYPMMHQAYSKPTPLMFGEVEIRSSAGCQQGDVAAPLAFSLLLHQYVKQVASKVPLFYLDDGTLLDNDPSVLLRDIKDLRAFEQWSGLQLNPSKCELFLQGFEDEERQQVIAEFNSNLPGILVKDRCDLDLLGTAVFPDMIGPILAEKGEQLSRLYQRLGHLGRHQAYFLLRHAMGVQKVLYVLRTSPVFLLPSETLNLDDQVRRALENILDLTLDDKAWTQASLPVRLGGMGIRSATDLALPAFLASSHSCASAVAATAGGLISHQQDAARIWDARQSGRPSEEQVTRQKGWDQIATQATHLTLLSACELDIDGIRLKAVSSDAAGAWLDVFPSELVGSKLADDHFRAASGLRLGLAMFETEACPCGGTVDERGLHRLSCTKLAGLTQGRHDAINDILGRAFRQAGYRVTLEPGGLQSDDKRRPDGLTSRDWNRNRPLAWDVTVSDTYALGYRALANAGVGNIIHQREMHKRRLYAHLLEDHVVMAFGLESSGVWGKDALKLTKELGKKLFEATAEPRSTAFLRQRVSLELQRGNAKMMLSGHRHSSNKNNISNIVDII

SEQ ID NO: 20488 - protein, 983 aa, Dermanyssus gallinae
MANEFRCQWCSMCFPTKRGVQIHAGRTHKKKIAEPSGPAVFQQAATSSISQPLLSSHAPQAEFFPQPASQPQVNGGPTPDHHLPSSSSLSLHKLLANAKMTRKVLRRIPKGARIALRGLFHRLLKDVVKKNDEASWTALLTLAPKVLHVDKETKGGHSLASAVKEKVALFGAATLTCMEAEGRGKRVLTDKARAQIAAHKLSMDFNVRSAIRILSSDDTIAPVTKESIDEMIAKHPAAPAGDVVPPSPIGLPAVGSCSSEDVAKALRTFPSGAAGGLDGLTPDHLKCLLPANGDHNDVLETLAKVCDIIRNGQVPETVRNVIYGGWLIALKKKTGGYRPIAVGCTLRRLATKTLLPQVNVKNYLQPRQMGYATHNGAEIIAHTARTFLENNEKCCLLKLDFKNAFNLNKRGQLLAEVSKHAPALYPMMHQAYSRPTPLMFGEVEIRSSAGCQQGDVAAPLAFSLLLHQYVKQVTSKVPLFYLDDGTLLDNNPSALLKDIKDLRAFEQWSGMQLNPSKCELFLQGFEDEERQQVIAEFNSNLPGILVKDRCELDLLGTAVFPEMIGPVLAEKGEQLSRLYQRLGHLGRHQAYFLLRHAMGVQKVLYVLRTSPTFLLPSETLDLDDQVRRALENILDLTLDDKAWMQASLSVRLGGMGIRSATDLALPAFLASSHSCASAVAATTGGLISHQQDAIRIWDARQSGRPSEEQVTRQKGWDQIATQATHLTLLSACELDIDGIRLKAVSSDAAGAWLDVFPSELVGSKLADDHFRAASGLRLGIAMFETEACPCGGTVDERGLHRLSCTKLAGLTQGRHDAINDILGRAFRQAGYRVTLEPGGLQSDDKRRPDGLTSRDWDRNRPLAWDVTVSDTYALGYRALANAGVGNIIHQREMHKRRLYAHLLEDHVVMAFGLESSGVWGKDALKLTKELGKKLFEATAEPRSTAFLRQRVSLELQRGNAKMMLSGHRHSCNKNNISNIVDII

SEQ ID NO: 20489 - protein, 981 aa, Dermanyssus gallinae
MANEFRCQWCSMCFPTKRGVQIHAGRTHKKKIAEPSGPAVFQQAATSSISQPQLSSHAPQAEYFPQPASQPQVNGRPAPDHHLPSSSSLSLHKLLANAKMTRKVLRRIPKGARIPLRGLFHRLLKDVVKKNDEASWTALLTLAPKVLHVDKETQGGHSLASVVKEKVALFGAATLTCMEAEGRGKRVLTDKARAQIAAHKLSMDFNVRSAIRILSSDDTIAPVTKESIDEMIAKHPPAPAGDVVPPSPTGLPAVGSCSSEDVAKALRTFPSGAAGGLDGLTPDHLKCLLPANGDHNDVLETLAKVCDIIRNGQVPETVRNVIYGGWLIALKTGGYRPIAVGCTLRRLATKTLLPQVNVKNYLQPRQMGYATHNGAEIIAHTARTFLENNEKCCLLKLDFKNAFNLNKRGQLLTEVSKHAPALYPMMHQAYSRPTPLMFGEVEIRSSAGCQQGDVAAPLAFSLLLHQYVKQVTSKVPLFYLDDGTLLDNDPSALLKDIKDLRAFEQWSGMQLNPSKCELFLQGFEDEERQQVIAEFNSNLPGILVKDRCELDLLGTAVFPEMIGPVLAEKGEQLSRLYQRLGHLGRHQAYFLLRHAMGVQKVLYVLRTSPTFLLPSETLDLDDQVRRALENILDLTLDDKAWMQASLSVRLGGMGIRSATDLALPAFLASSHSCASAVAATTGGLISHQQDAIRIWDARQSGRPSEEQVTRQKGWDQIATQATHLTLLSACELDIDGIRLKAVSSDAAGAWLDVFPSELVGSKLADDHFRAASGLRLGIAMFETEACPCGGTVDERGLHRLSCTKLAGLMQGRHDAINDILGRAFRQAGYRVTLEPGGLQSDDKRRPDGLTSRDWDRNRPLAWDVTVSDTYALGYRALANAGVGNIIHQREMHKRRLYAHLLEDHVVMAFGLESSGVWGKDALKLTKELGKKLFEATAEPRSTAFLRQRVSLELQRGNAKMMLSGHRHSSNKNNISNMVDII

SEQ ID NO: 20490 - protein, 1006 aa, Dermanyssus gallinae
MRSGQPQQSQQLLCFKGEATAMANEFQCPWCSMCFPTKRGVQIHAGRTHKKKIAESSGPAVLQQVAATLSSVSQPLPSPHASLVEPSPHPASQSPVNGGPTPDDHLPPSSPLSLHKLLANAKMTRKVLRRIPKGARIPLRGLFHRLLKDVVKKNDEASWTALLTLAPKVLHVEKETQGGHSLASVVKEKVALFGGAALTCVEAEGRGKRILTDKARAQIAAHKLSMDFNVRSAIRILSSDDTIAPVTEESINEMVAKHPPAPAGDVVPPSPFGLPAVGLCSGEDVAKALRSFPSGAAGGLDGLTPDHLKCLLPANGDHNDVLETLAKVCDIIRNGQVPEAVRNVIYGGWLIALKKKTGGYRPIAVGCTLRRLATKTLLPQVNVKSYLQPRQMGYATQNGAEIIAHTARTFLEHNEKCCLLNLDFKDAFNLNKRGHLLTEISKHAPALYPMMHQAYRKPTPLTFGEVEIRSSAGCQQGDVAAPLAFSLLLHQYVKQVASKVPLFYLDDGTLLDNDPSVLLRDIKDLRAFEKWSGLQLNPSKCELFLQGFEDEERQQVIAEFNSNLPGILVKDRCDLDLLSTAVFPDMIGPILAEKGEQLSRLYQRLGHLGRHQAYFLLRHAMGVQKVLYVLRTSPVFLLPSETLNLDDQVRRALENILDLTLDDKAWTQASLPVRLGGMGIRSATDLALPAFLASSHSCASAVAATAGGLISHQQDAARIWDARQSGRPSEEQVTRQKGWDQIATQATHLTLLSACELDIDGIRLKAVSSDAAGAWLDVFPSELVGSKLADDHFRAASGLRLGIAMFETEACPCGGTVDERGLHRLSCTKLAGLTQGRHDAINDILGRAFRQAGYRVTLEPGGLQSDDKRRPDGPTSRDWDRNRPLAWDVTVSDTYALGYRALANAGVGNIIHQREMHKRRLYAHLLEDHVVMAFGLESSGVWGKDALKLTKELGKKLFEATAEPRSTAFLRQRVSLELQRGNAKMMLSGHRHSSNKNNISNIVDII

SEQ ID NO: 20491 - protein, 884 aa, Dermanyssus gallinae
MTRKVLRRIPKGARIPLRGLFHRLLKDVVKKNDEASWTALLTLAPKVLHVDKETQGGHSLASVVKEKVALFGAATLTCMEAEGRGKRVLTDKARAQIAAHKLSMDFNVRSAIRILSSDDTIAPVTKESIDEMIAKHPAAPAGDVVPPSPTGLPAVGSCSSEDVAKALRTFPSGAAGGLDGLTPDHLKCLLPANGDHNDVLETLAKVCDIIRNGQVPETVRNVIYGGWLIALKKKTGGYRPIAVGCTLRRLATKTLLPQVNVKNYLQPRQMGYATHNGAEIIAHTARTFLENNEKCCLLKLDFKNAFNLNKRGQLLTEVSKHAPALYPMMHQAYSRPTPLMFGEVEIRSSAGCQQGDVAAPLAFSLLLHQYVKQVTSKVPLFYLDDGTLLDNDPSALLKDIKDLRAFEQWSGMQLNPSKCELFLQGFEDEERQQVIAEFNSNLPGILVKDRCELDLLGTAVFPEMIGPVLAEKGEQLSRLYQRLGHLGRHQAYFLLRHAMGVQKVLYVLRTSPTFLLPSETLDLDDQVRRALENILDLTLDDKAWMQASLSVRLGGMGIRSATDLALPAFLASSHSCASAVAATTGGLISHQQDAIRIWDAHQSGRPSEEQVTRQKGWDQIATQATHLTLLSACELDIDGIRLKAVSSDAAGAWLDVFPSELVGSKLADDHFRAASGLRLGIAMFETEACPCGGTVDERGLHRLSCTKLAGLMQGRHDAINDILGRAFRQAGYRVTLEPGGLQSDDKRRPDGLTSRDWDRNRPLAWDVTVSDTYALGYRALANAGVGNIIHQREMHKRRLYAHLLEDHVVMAFGLESSGVWGKDALKLTKELGKKLFEATAEPRSTAFLRQRVSLELQRGNAKMMLSGHRHSSNKNNISNMVDII

SEQ ID NO: 20492 - protein, 1006 aa, Dermanyssus gallinae
MRSGQPQQSQQLFCFKGEATAMANEFQCPWCSMCFPTKRGVQIHAGRTHKKKIAESSGPAVLQQAAATFSSVSQPLPSPHASQVEPSPHPASQSPVNGGPTPDDHLPPSSPLSLHKLLANAKMTRKVLRRIPKGARIPLRGLFHRLLKDVVKKNDEASWTALLTLAPKVLHVEKETQGGHSLASVVKEKVALFEGAVLTCVEAEGRGKRILTDKARAQIAAHKLSMDFNVRSAIRILSSDDTIAPVTEESINEMVAKHPPAPAGDVVPPSPFGLPAVGSCSGEDVAKALRSFPSGAAGGLDGLTPDHLKCLLPANGDHNDILETLAKVCDIIRNGQVPEAVRNVIYGGWLIALKKKTGGYRPIAVGCTLRRLATKTLLPQVNVKSYLQPRQMGYATQNGAEIIAHTARTFLEHNEKCCLLKLDFKNAFNLNKRGHLLTEISKHAPALYPMMHQAYSKPTPLMFGEVEIRSSAGCQQGDVAAPLAFSLLLHQYVKQVASKVPLFYLDDGTLLDNDPSVLLRDIKDLRAFEQWSGLQLNPSKCELFLQGFEDEESQQVIAEFNSNLPGILVKDRCDLDLLGTAVFPDMIGPILAEKGEQLSRLYQRLGHLGRHQAYFLLRHAMGVQKVLYVLRTSPVFLLPSETLNLDDQVRRALENILDLTLDDKAWTQASLPVRLGGMGIRSATDLALPAFLASPHSCASAVAATAGGLISHQQDAARIWDARQSGRPSEEQVTRQKGWDQIATQATHLTLLSACELDIDGIRLKAVSSDAAGAWLDVFPSELVGSKLADDHFRAASGLRLGLAMFETEACPCGGTVDERGLHRLSCTKLAGLTQGRHDAINDILGRAFRQAGYRVTLEPGGLQSDDKRRPDGLTSRDWNRNRPLAWDVTVSDTYALGYRALANAGVGNIIHQREMHKRRLYAHLLEDHVVMAFGLESSGVWGKDALKLTKELGKKLFEATAEPRSTAFLRQRVSLELQRGNAKMMLSGHRHSSNKNNISNIVDII

SEQ ID NO: 20493 - protein, 1005 aa, Dermanyssus gallinae
MRSGQPQQSQQLLCFKGEATAMANEFQCPWCSMCFPTKRGVQIHAGRTHKKKIAESSGPAVLQQAAATLSSVSQPLPSPHASLVEPSPHPVSQSPVNGGPTPDDHLPPSSPLSLHKLLANAKMTRKVLRRIPEGARIPLRGLFHRLLKDVVKKNDEASWTALLTLAPKVLHVEKETQGGHSLASVVKEKVALFGGAALTCVEAEGRGKRILTDKARAQIAAHKLSMDFNVRSAIRILSYDDTIAPVTEESISEMVAKHPPAPAGDVVPPSPFGLPAVGSCSGEDVAKALRSFPSGAAGGLDGLTPDHLKCLLPANGDHDVLETFAKVCNIIRNGQVSEAVRNVIYGGWLIALKKKTGGYRPIAVGCTLRRLATKTLLPQVNVKSYLQPRQMGYATQNGAEIIAHTACTFLEHNQKCCLLKLDFKNAFNLNKRGHLLTEISKHAPALYPMIHQAYSKPTPLMFGEVKIRSSAGCQQGDVAAPLAFSLLLHQYVKQVASKVPLFYLDDGTLLDNDPSVLLRDIKDLRAFEQWSGLQLNPSKCELFQQGFEDEERQQVIAEFNSNLPGILVKDRCDLDLLGTAVFPDMIGPILAKKGEQLSRLYQRLGHLGRHQAYFLLRHAMGVQKVLYVLRTSPVFLLPSETLNLDDQVRRALENILDLTLDDKAWTQATLPVRLGGMGIRSATDLALPAFLASSHSCASAVAATAGGLISHQQDAARIWNARQSGRPSGEQVTRQKGWDQIATRATHLTLLSACELDIDGIRLKAVSFDIARAWLDLFPSELVGSKLADDHFRAASGLRLGIAMFETEACPCGGTVDERGPHRLSCTELAGLTQGRHDAINDILGRAFRQAGYRVTLEPGGLQSDDKRRPDGLTSRDWDRNRPLAWDVTVSDTYALGYRALANAGVGNIIHQREMHKRRLYAHLLEDHVVMAFGLESSGVWGKDALKLTKELGKKLFEATAEPKSTAFLRQRVSFELQRGNAKMMLSGHRHSSHKNNISNIVDII

SEQ ID NO: 20494 - protein, 902 aa, Dermanyssus gallinae
MRSGQPQQSLQLLCFKGEATAMANEFQCPWCSMCFPTKRGVQIHAGRTHKKKIAESSGPAVLQQTAATLSSVSQPLPFSHAPLVEPSPPHPASQSSVNGGPTPDDQLPPSSPLSLHKLLANAKMTRKVLRRIPKGARIPLRGLFHRLLKDVVKKNDEASWTALLTLAPKVLHVEKETQGGHSLASVVKEKVALFGGAALTCVEAEGRGKRILTDKARAQIAAHKLSMDFNVRSAIRILSSDDTIAPVTEESINEMVAKHPPAPAGDVVPPSPFGLPAVGSCSGEDVAKALRSFPSGAAGGLDGLTPDHLKCLLPANGDHNDVLETLAKVCDIIRNGQVPEAVRNVIYGGWLIALKKKTGGYRPIAVGCTLRRLATKTLLPQVNVKSYLQPRQMGYATQNGAEIIAHTARTFLEHNEKCCLLKVDFKNAFNLNKRGHLLTEISKHAPALYPMMHQAYSKPTPLMFGEVEIRSSAGCQQGDVAAPLAFSLLLHQYVKQVTSKVPLFYLDDGTLLDNDLSVLLRDIKDLRAFEQWSGLQLNPSKCELFLQGFEDEERQQVIAEFNSNLPGILVKDRCDLDLLGTAVFPDMIGPVLAEKGEQCSRLYQRLGHLGRHQAYFLLRHAMGVQKVLYVLRTSPAFLLPSETLNLDDQVRRALENILDLTLDDKAWTQASLPVRLGGMGIRSATDLALPAFLASSHSCASAVAATAGGLISHQQDAARIWDARQSGRPSEEQVTRQKGWDQIATQATHLTLLSASELDVDGIRLKAVSSDAAGAWLDVFPSELVGSKLTDDQFRAASGLRLGIAMFEREECPCGGTVDERGLHWLSCTKLAGLTQGRHDAINDILGRAFRQAGYRVTLEPGGLQRDNKRRPDGLTSRDWDHNRPLAWDVTVSDTYCSATVH

SEQ ID NO: 20495 - protein, 1006 aa, Dermanyssus gallinae
MRSGQPQQSQQLLCFKGEATAMANEFQCPWCSMCFPTKRGVQIHAGRTHKKKIAESSGPAVLQQAAATFSSVSQPLPSPHASLVEPSPHPASQSPVNGGPTPDDHLPPSSPLSLHKLLANAKMTRKVLRRIPKGARIPLRGLFHRLLKDVVKKNDEASWTALLTLAPKVLHVEKETQGGHSLASVVKEKVALFGGAALTCVEAEGRGKRILTDKARAQIAAHKLSMDFNVRSAIRILSSDDTIAPVTEESINEMVAKHPPAPAGDVMPPSPFGLPAVGSCSGEDVAKALRSFPSGAAGGLDGLTPDHLKCLLPANGDHNDVLETLAKVCDIIRNGQVPEAVRNVIYGGWLIALKKKTGGYRPIAVGCTLRRLATKTLLPQVNVKSYLQPRQMGYATQNGAEIIAHTARTFLEHNEKCCLLKLDFKNAFNLNKRGHLLTEISKHAPALYPMMHQAYSKPTPLMFGEVEIRSSAGCQQGDVAAPLAFSLLLHQYVKQVASKVPLFYLDDGTLLDNDPSVLLRDIKDLRAFEKWSGLQLNPSKCELFLQGFEDEERQQLIAEFNSNLPGILVKDRCDLDLLGTAVFPDMIGPILAEKREQLSRLYQRLGHLGRHQAYFLLRHAMGVQKVLYVLRTSPVFLLPSETLNLDDQVRRALENILDLTLDDKAWTQASLPVRLGGMGIRSATDLALPAFLASSHSCASAVAATAGGLISHQQDAARIWDARQSGRPSEEQVIRQKGWDQIATQATHLTLLSACELDIDGIRLKAVSSDAAGAWLDVFPSELVGSKLADDHFRAASGLRLGIAMFETEACPCGGTVDERGLHRLSCTKLAGLTQGRHDAINDILGRAFRQAGYRVTLEPGGLQSDDKRRPDGLTSRDWDRNRPLAWDVTVSDTYALGYRALANAGVGNIIHQREMHKRRLYAHLLEDHVVMAFGLESSGVWGKDALKLTKELGKKLFEATAEPRSTAFLRQRVSLELQRGNAKMMLSGHRHSSNKNNINNIVDII

SEQ ID NO: 20496 - protein, 1003 aa, Dermanyssus gallinae
MRSGQPQQSLQLLCFKGEATAMANEFQCPWCSMCFTTKRGVQIHAGRTHKKKIAESSGPAVLQQTAATLSSVSQPLPFPHAPLVEPSPPHPASQSSVNGGPTPDDHLPPSSPLSLHKLLANAKMTRKVLRRIPKGARIPLRGLFHRLLKDVVKKNDEASWTALLTLAPKVLHVERETQGGHSLASVVKEKVALFGGAALTCVEAEGRGKRILTDKACAQIAAHKLSMDFNVRSAIRILSSDDTIAPVTEESINEMVAKHPPAPAGDVVPPSPFGLPAVGSCSGEDVAKALRSFPSGAAGGLDGLTPDHLKCLLPANGDHNDVLETLAKVCDIIRNGQVPEAVRNVIYGGWLIALKKKTGGYRPIAVGCTLRRLATKTLLPQVNVKSYLQPRQMGYATQNGAEIIAHTARTFLEHNKKCCLLKLDFKNAFNLNKRGHLLTEISKHAPALYPMMHQAYSKPTPLMFGEVEIRSSAGCQQGDVAAPLAFSLLLHQYVKQVTSKVPLFYLDDGTLLDNDPSVLLRDIKDLRAFEQWSGLQLNPSKCELFLQGFEDEERQQVIAEFNSNLPGILVKDRCDLDLLGTAVFPDMIGPVLAEKGEQLSRLYQRLGHLGRHQAYFLLRHAMGVQKVLYVLRTSPAFLLPSETLNLDDQVRRALENILDLTLDDKAWTQASLPVRLGGMGIRSATDLALPAFLASSHSCASAVAATAGGLISHQQDAARIWDARQSGRPSEEQVTRQKGWDQIATQATHLTLLSASELDVDGIRLKAVSSDAAGAWFDVFPSELVGSKLTDDQFRAASGLRLGIAMFEKEECPCGGTVDERGLHWLSCTKLAGLTQGRHDAINDILGRAFRQAGYRVTLEQRDNKRRPDGLTSRDWDHNRPLAWDVTVSDTYALGYRALANAGVGHIIHQREMHKRRLYAHLLEDHVVMAFGLESSGVWGKDALKLAKELGKKLFEATAEPRSTAFLRQRVSLELQRGNAKMMLSGHRHSSNRNTICNIVDVI

SEQ ID NO: 20497 - protein, 985 aa, Dermanyssus gallinae
MRSGQPQQSQQLLCFKGEATAMANEFQCPWCSMCFPTKSGVQIHAGRTHKKKIAESSGPAVLQQAAATLSSVSQPLPSPHPVSQSPVNGGPTPDDHLPPSSPLSLHKLLANAKMTRRVLRRIPKGARIPLRGLFHRLLKDVVKKNDEASWTALLTLAPKVLHVEKETQGGHSLASVVKEKVALFGGAALTCVEAEGRGKRILTDKARAQIAAHKLSMDFNVRSAIRILFSDDTIAPVTEESINEMVAKHAPAPAGDVVPPSPFGLPAVGSCSGEDVAKALRSFPSGAAGGLDGLTPDHLKCLLPANGDHNDVLETLAKVCDIIRNGQVPEAVRNVIYGGWLIALKKKTGGYRPIAVGCTLRRLATKTLLPQVNVKSYLQPRQMGYATQNGAEIIAHTARTFLEHNQKSCLLKLDFKNAFNLNKRGHLLTEISKHAPALYPMMHQAYSKPTPLMFGEVEIRSSAGCQQGDVAAPLAFGLLLHQYVKQVASKVPLFYLDDGTLLDNDPSVLLRDIKDLRAFEQWSGLQLNPSKCELFLQGFEDEERQQVIAEFNSNLLGILVKDRCDLDLLGTAVFPDMIGPILAEKGEQLSRLYQRLGHLGRHQAYFLLRHAMGVQKVLYVLRTSPVFLLPSETLNLDDQVRRALENILDLTLDDKAWTQASLPVRLGGMGIRSATDLALPAFLASSHSCASAVAATAGGLISHQQDAARIWDARQSGRPSEEQVTRQKGWDQIATQATHLTLLSACELDIDGIRLKAVSSDAAGAWLDVFPSELVGSKLADDHFRAASGLRLGIAMFETEACPCGGTVDERGLHRLSCTKLAGLTQGRHDAINDILGRAFRQAGYRVTLEPGGLQSDDKRRPDGLTSRDWGRNRPLAWDVTVSDTYALGYRALANGGVGNIIHQRDMHKRRLYAHLLEDHVVMAFGLESSGVWGKDALKLTKELGKKLFEATAEPFDRFPPTESVIIITERQRQDDVESSPTLKP

SEQ ID NO: 20498 - protein, 1006 aa, Onthophagus taurus
MAPPFARRRRSGVGAAASSVRCPWCPKEFPTKHGVTIHAGRAHGKKLSDIRINSRSATGSQPPTSSPSSSLGAVLSAASSSAVVNAEGERAPGTVEESAAVTEPAPPATLPLHRALANAKLTRKILRRIPKGARIPVRRLLHDLLKEVAVKNDVQSWSALLTFAPRVLHVDQQNRGDKSLAAIVKDNVVSFYSTALEPMQQEGRGKRTMDDKSRATIAGHKLSMDFNVRAAIRILASDDSIASVTEESLAEMRAKHPPAPADDAFPAPPTGPSVAGSCSSDDVTKALLSFPSGAAGGLDGLTPDHLKCLLQTNGDQSELLATVAKVCDIIRNGQVPEGVRDVVYGGWLIALRKKTGGYRPIAVGCTLRRLATKTLLPHVDGSYLRPRQMGYATNNGAEIIVHTARSFLEKNEKCCLLKLDFKNAFNLNKRGRLLLEVANHAAALYPMMYQAYSRPTPIMFGEEEILSRAGCQQGDVAAPLVFSLLLHQYVKKVTSAVPLFYLDDGTLLDTNPSALLYDISMLREFEKYSGLQLNPAKCELYLQGYEEAERLRITEEFQQALPNVIIRDRCDLDLLGSAVFPEMVGQVLTEKGEQLSRLYQRLKHLKKHQAFFLLRHAMGVQKVSYVLRTAPAFLLPADTIDLDDMIRRALENIVDLSLDEQAWKQASLPVRLGGMGIRSATDLALPAFLASSHCCASSVLSIARTTVSHQEAALRLWDSLQLGRPLDDQVNKQKGWDHLACKASYNTLLSTCNSEVSRIRLKAVSSEAAGIWLDVFPSDLVGTQLADDHFRAAAGLRLGIPMFQRDICQCGGPVDELGHHMLSCRKLAGLVQGRHDAINDVLGRAFKQAGFRVTLEPGGLQSDDRRRPDGLTSRDWERNKPLAWDVTISDTYALGYRTWALEGVGHIIHQREMHKRRFYAHLLEDHVFLAFGLESSGVWGKDALKLTKELGRKLFEATKEKKSTAYLRQRISLELQRGNAKMLLARKEASKDFNILRNNILINNLI

SEQ ID NO: 20499 - protein, 980 aa, Dermanyssus gallinae
MANEFQCPWCSMCFPTKRGVQIHAGRTHKKKIAESSGPAVLQQAAATLSSVSQPLPSPHASQVEPSPHPASQSPVNGGPTPDDHLPPSSPLSLHKLFANAKMTRKVLRRIPKGARIPLRGLFHRLLKNVVKKNDEASWTALLTLAPKVLHVEKETQGGHSLASVVKEKVALFEGAALTCVEAEGRGKRILTDKARAQIAAHKLSMDFNVRSAIRILSSDDTIAPVTEESINEMVAKHPPAPAGDVVPPSPFGLPGVGSCSGEDVAKALRSFPSGAAGGLDGLTPDHLKCLLPANGDHNDVLETLAKVCDIIRNGQVPEAVRNVIYGGWLIALKKKTGGYRPIAVGCTLRRLATKTLLPQVNVKSYLQPRQMGYATQNGAEIIAHTARTFLEHNEKCCLLKLDFKNAFNLNKRGHLLTEISKHAPALYPMMHQAYSKPTPLMFGEVEIRSSAGCQQGDVAAPLAFSLLLHQYVKQVASKVPLFYLDDGTLLDNDPSVLLRDIKDLRAFEQWSGLQLNPSKCELFLQGFEDEERQQVIAEFNSNLPGILVKDRCDLDLLGTAVFPDMIGPILAEKGEQLSRLYQRLGHLGRHQAYFLLRHAMGVQKVLYVLRTSPVFLLPSETLNLDDQVRRALENILDLTLDDKAWTQASLPVRLGGMGIRLATDLALPAFLASSHSCASAVAATAGGLISHQQDAARIWDARQSGRPSEEQVTRQKGWDQIATQATHLTLLSACELDIDGISSDAAGAWLDVFPSELVGSKLADDHFRAASGLRLGLAMFETEACPCGGTVDERGLHRLSCTKLAGLTQGRHDAINDILGRAFRQAGYRVTLEPGGLQSDDKRRPDGLTSRDWNRNRPLAWDVTVSDTYALGYRALANAGVGNIIHQREMHKRRLYAHLLEDHVVMAFGLESSGVWGKDALKLTKELGKKLFEATAEPRSTAFLRQRVSLELQRGNAKMMLSGHRHSSNKNNISNIVDII

SEQ ID NO: 20500 - protein, 866 aa, Dermanyssus gallinae
MTRKVLRRIPKGARIPLRGLFHRLLKNVVKKNDEASWTALLTLAPKVLHVEKETQGGHNLASVVKEKVALFGGAALTCVEAEGRGKCILTDKARAQIAAHKLSMDFNVRSAIRILSSDDTIAPVTEESINEMVAKHPPAPAGDVVPPSPFGLPAVGSCSVEDVAKALRSFPSGAAGGLDGLTPDHLKCLLPANGDHNDVLETLAKVCDIIRNGQVPEAVRNVIYGGWLIALKKKTGRYRPIAVGCTLRRLATKTLLPQVNVKSYLQPRQMGYATQNHTFLEHNEKCCLLKLDLKNAFNLNKRGHLLTAISKHAPALYPMMHQAYSKPTPLMFGEVEIRSSAGCQQGNVAASLAFSLLLHQYVKQVASKVPLFYLDDETLLDNDPSVLLRDFKDLRAFEQWSGLQLNPSKCELFLQGFEDEERQQVIAEFNSLPGILVKDRCDLDLLGTAVFPDMIGPILAEKGEQLSRLYQRLGHLSRHQAYFLLRHAMGVQKVLYVLRTSPVFLLPSETLNLDDQVRRALENIIDVTLDDKAWTQASLPVRLGGMGIRSATDLALPAFLASSHSCASAVAATAGGLISHQHDAARIWDARQSGRPSEEQVTRQKGWDQIATQATHLTLLSACELDIDGIRLKAVSSDAADAWLDVFPSDLVGSKLADDHFRAASGLRLGIAMFETEACPCGGTVDKRGLHRLSCTKLAGLTQGRHDAINDILGRAFRQAGYRVTLEPGGLQSDDKRRPDGLTSRDWDRNRPLAWDVTVSDTYALGYRALANAGVGNIIHQREMHKVRLYAHLLEDHVVMAFGLESSGVWGKDALKLTNELGKKLFEATAEPRSTAFLRQRVSLELQRVKNFESRRPREKSFGKHP

SEQ ID NO: 20501 - protein, 866 aa, Dermanyssus gallinae
MPSSSPLSLHKLLANAKMTRKVLRRIPKGAQIPLRGLFHRLLKDVVKKNDEASWTALLTLAPKVLHVDKETQGGHSLASVVKEKVALFGAATLTCMEAEGRGKRVLTDKARAQIAAHKLSMDFNVRSAIRILSSDDTIAPVTKESIDEMIAKHPPAPAGDAVPPSPIGLPAVGSCSSEDVAKALRTFPSGAAGGPDGLTPDHLKCLLPANGDHNDVLETLAKVCDIIRNGQVPKTVRNIIYGGWLIALKKKTGGYRPIAVGCTLRRLATKTLLPQVNVKNYLQPRQMGYATHNGAEIIAHTARTFLENNEKCCLLKLDFKNAFNLNKREQLLAEVSKHAPALYPMTHQAYSRPTPLMFGEVEIRSSAGCQQGDVAAPLAFSLLLHQYVKQVTSKVPLFYLDDGTLLDNDLSALLKDIKDLRAFEQWSGMQLNPSKCELFLQGFEDEERQQVIAEFNSNLPGILVKDRCELDLLGTAVFPEMIGPVMAEKGEQLSRLYQRLGHLGRHQAYFLLRHAMGVQKVLYVLRTSPTFLLPSETLDLDDQVRRALPASLASSHSCASAVAATTGGLISHQQNAIRIWDARQSGRPSEEQVTRQKGWDQIATQATHLTLLSACELDIDYIRLKAVSSDAAGAWLDVFPSELVGSKLADDHFRAASGLRLCIAMFETEACPCGGTVDERGLHRLSCTKLARLTQGRHDAINDILGRAFRQAGYRVTLEPGGLQSDDKRRPDGLASRDWDLNRPLAWDVTVSDKYTLGYRALANAGVGNIIHQREMHKRRLNAHLLEDQVVMAFGLESSGVWGKDALKLTKELGKTLFEATAEPRSTAFLRQRVLLELQRGNAKMMLSGHRHSSNKNNISNIVDII

SEQ ID NO: 20502 - protein, 981 aa, Dermanyssus gallinae
MANEFRCQWCSMCFPTKRGVQIHAGRTHKKKIAEPSGPAVFQQAATSSISQPLLSSHTPQAEFFPQPASQPQVNGGPTPDHHLPSSSSLSLHKLLANAKMTRKVLRRIPKGARIPLRGLFHRLLKDVVKKNDEASWTALLTFAPKVLHVDKETQGGHSLASVVKEKVALFGAATLTCMESEGRGKRVLTDKARAQIAAHKLSMDFNVRSAIRILSSDDTIAPVTKESIDEMIAKHPPAPAGDVVPPSPIGLPAVGSCSSEDVAKALRTFPSGAAGGLDGLTPDHLKCLLPANGDHNDVLETLAKVCDIIRNRQVPETVRNVIYGGWLIALKKKTGGYRPIAVGCTLRRLATKTLLPQVNVKNYLQPRQMGYATHNGAEIIAHTARTFLENNEKCCLLKFDFKNAFNLNKRGQLLAEVSKHAPALYPMMHQAYSRPTPLMFGEVEIRSSAGCQQGDVAAPLAFSLLLHQYVKQVTSKVPLFYLDDGTLLDNDPSALLKDIKDLRAFEQWSGMQLNPSKCELFLQGFEDEERQQVIAEFNSNLPGILVKDRCELDLLGTAVFPEMIGPVLAEKGEQLSRLYQRLGHLGRHQAYFLLRHAMGVQKVLYVLRTSPTFLLPSETLDLDDQVRRALENILDLTLDDKAWMQASLSVRLGGMGIHSATDLALPAFLASSHSCASAVAATTGGLISHQQDAIRIWDARQSGRPSEEQVTRQKEWDQIASQATHLTLLSACELDIDGIRLKAVSSDAAGAWLDVSELVGSKLADDHFRAASGLRLGIAMFETEACPCGGTVDERGLHRLSCTKLAGLTQGRHDAINDILGRAFRQAGYRVTLEPGGLQSDDKRRPDGLTSRDWDRNRPLAWDVTVSDTYALGYRALANAGVGNIIHQREMHKRRLYAHLLEDHVVMAFGLESSGVWGKDALKLTKELGKKLFEATAEPRSTAFLRQRVSLELQRGNAKMMLSGHRHSSNNNNISNIVDII

SEQ ID NO: 20503 - protein, 982 aa, Dermanyssus gallinae
MANEFQCPWCSMCFPTKRGVQIHAGRTHKRKIVLSCGPAVLQQAAATLSSVLQPLPSPHASLVEPSPHPASQSPVNGGPTPDDHLPPSSPLSLHKLLANAKMTRKVLRRIPKGARIPLRGLFHRLLKDVVKKNDEASWTALLTLAPKVLHVEKETQGGHSLASVVKEEVALFGGAALACVEAEGRGKRILTDKARAQIAAHKISMDFNVRSAIRILSSDDTIAPVTEESINEMVAKHPPAPAGDVVPPSPFGLPAVGSCSGEDVAKALRSFPSGAAGGLDGLTPDHLKCLLPANGDHNDVLETLAKVCDIIRNGQVPEAVRNVIYGGWLIALKKKTGGYRPIAVGCTLRRLATKTLLPQVNVKSYLQPRQMGYATQNGAEIIAHTARTFLEHNEKCCLQKLDFKNAFNLNKRGHLLTEISKHAPALYPMMHQAYSKPTPLAFGEVEIRLSAGCQQGDVAVPLAFSLLLHQYVKQVAAKVPLFYLDDRTLLDNDPSVLLRDIKHLRAFEQWCGLQLIPSKFLQGFEDEERQQVIAEFNSNLPGILVKDRCDLDLLGTAVFPDMIGPILAEKGEQLSRLYQRLGHLGRHQAYFLHRHAMGVQKVLYVLRTSPVFLLPSETLNLDDQVRRALENILDVTLDDKAWTQASLPVRLGGMGIRSATDLALPAFLASSHSCASAVAATAGGLISHQQDAARIWDARQSGRPSEEQVTRQKGWDQIATQATHLTLLSACELDIDGIRLKAVSSDAAGAWLDVFPSELVGSKLADDHFRAASGLRLGIAMFKTEACPCGGTVDERGLHRLSCTKLAGLTQGRHDAINDILRRAFRQAGYRVTLEPGGLQSDDKRRPDGLTSRDWDRNRPLAWDVTVSDTYALGYRALANAGVGNIIHQREMHKRRLYAHLLEDHVVMAFGLESSGVWGKDALKLTKELGKKLFEATAEPRSTAFLRQSVSLELQRGNAKMMLSDHRHSSNKNNISNIVDII

SEQ ID NO: 20504 - protein, 743 aa, Dermanyssus gallinae
MTSKHPREPAELDLPPRPPCADPPITSAELLREAVWTFPAGSNAGMDGLRPRHLRDLLATTNANIASRSLRDLGKVVDVIRSGTVPEAIRPILFGGRLIAIKKPSGSLRPIVISSVFRRIAAKITVKLGADLVREKLGDHQLGFNTPNGIEAAVHTTRAFVASAPNNFVVAKLNFKNAFNQIRRDHALKTVLVDWPEAAHLVDQAYRSRSELSLDDKTIFSCSGVQQGDPLGPPLFCLAIKELVDSIQSPLNLWYLDDGTIGGEAPVVLADIKRVADFGLKSGLELNSEKCELIYKGHPNLSALEALLPGCKLVEAADMTLLGSPVGSAAIRPELAGRIESLRSRLTRLNLLSPHSAYHLLKSSLGSARIVHILRSTDVGPNQDLLRDLDESLSDLLNLTLADNNWAQATLPLRFGGLGIRSTADLAASCHASSLHASESTVRHISPPMALQAFQDTKEVADTKFKNLAGLLPETNKHLQRSYDDLIVSMKYQRLLSDALTTADKARLRAVVQKGASKWLQAIFSSNLGTLLDHESFRLCIGLRLGTRLTEEHRCPCGTQVDIWGTHGLSCSRSEGRQSRHSEVNEITARAFRSALIPCIREPAGLLRSDGKRPDGLTLIPFERGKALVWDATITDTLASSNLEASASSAGSAARKAERLKTNKYAQLANEFIFVPLVFETLGGPGHEAWSLLQKIGKQIELATGEKRALEFLLQRLSLAVQRGNAAAIMGTMRGCLEDKLDW

SEQ ID NO: 20505 - protein, 974 aa, Dermanyssus gallinae
MPQDASGNKAGPSHSDDPPQADYQSSLGPGTGSLTPAPLNNRVICTHCQKSFTSRGIKRHMTAAHSDTNRSLPPASYPVDDVDGTHLRNKLVEYTKAYKRLDTIPKSARPAVAAALADTLSLVHLNNDTRSWANLLLFAHTVLRTPSRKRNNLSWATFIRDRIEDHRSGREPPSESVPRAHRNKQRNDDEAAARRATKLLGEGDIGGAARALLSVGSPVCAADAYTEMTSKHPREPADLDLPPRPPCADPPITSAELLREAVWTFPAGSTAGMDGLRPRHLRDLLATTNANIASRLLRELGKVVDIIRSGTVPEAIRPILFGGRLIAIKKPSGSLRPIVISSVFRRIAAKITVKLGADLVREKLGDRQLGFNTPNGIEAAVHTTRAFVASAPNNFVVAKLDFKNAFNQIRRDHVLKTVLVDWPEAAPLVDQAYRSRSELSLDDKTIFSCSGVQQGDPLGPPLFCLAIKELVDSIQSPLNLWYLDDGTIGGEAPVVLADIKRVADFGLNSGLELNFEKCELIYKGHPNLSALEALLPGCKLVEAADMTLLGSPVGSAAIRPELAGRIESLRSRLTRLNLLSPHSAYHLLKSSLGSARIVHILRSTDVGPNQDLLRDLDESLRISLSDLLNLTLADNNWAQATLPLRFGGLGIRSTADLAASCHASSLHASESTVRHISPPMALQAFQDTKEVADTKFKNLAGLLPETNKHLQRSYDDLIVSMKYQRLLSDALTTADKARLRAVVQKGASKWLQAIPSSNLGTLLDHESFRLCIGLRLGTRLTEEHRCPCGTQVDIWGTHGLSCSRSEGRQSRHSEVNEITARAFRSALIPCIREPAGLLRSDGKRPDGLTLIPFEKGKALVWDATITDTLAPSNLEASASSAGSAARKAERLKTNKYAQLANEFIFVPLVFETLGGPGPEAWSLLQKIGKQIELATGEKRALEFLLQRLSLAVQRGNAAAIMGTMRGCLEDKLDW

SEQ ID NO: 20506 - protein, 970 aa, Dermanyssus gallinae
MTELNRVSRYIYIYIYIYIYIYIYIYIYIYIYIYIYIYIYTHYQRNFTRRGIKRHMTAAHSNIEHPFLPPVSNPVDNTDGTHLREKLAEYTKTYKRLDTIPKSARPAVAVALADTLSLVHQNNDAHSWANLLVFAHTVLRAPSRKQNNLSWTTYLRDRIEEHRSGSGPSPELIPRKHWNKRPNEDKAAARRATRLLGEGDIGGAVRALLSVGSPVCAAEAFVEMTSKHPSEPADLDLPPRLSHAEPLVTSSEEMREAVRTFPAGSTAGMDGLRPRHLRDLIATTNTNIASRLLRDLAKVIDIIRNGTVPEAIRPIIFGGRLIAIKEPSGSFRPIVISSVFRRIAAKITVKLGTNIVCEKLGAHQLGFNTPNGIEAVVHTTRAFMSSAPNNFVAAKLDFKNAFNQVRRDHILKTVQTDWPEAAPLVDQTYRSSSELSLGERTIFSRSGVQQGDPLGPPLFCLAIKELVNSIQSPLNLWYLDDGTIGGEASVVQVDIKRVLDFGQKSGLELNPQKCEIIYKGHPNIYAFEALLPGCKQVEAADMTLLGSPVGSAATHPELAGKIKSLCSRLNRLNLLNPHSAYHLLKSSLGSSRIIHFLRSTDVGANQDLLRELDNSLRTSLSDLLNLNLADNNWGQATLPLRLGGLGIRSAADLAASCHVASLHASEATVQHISPVIALQAFQDAKKAADTRFKNLAGLLPDANKHLQRSYDDLIVSKKYQRLLSDALSTADKARLQAVVQKGASKWLQAIPSSNLGTLLDHESFRLCIGLRLGTRLTEEHRCPCGAQVDIWGTHRLSCNRSEERQSRHSEINEITARALRSALLPCIREPTGLLRSDGKRPDGLTLIPFERGKALIWDATVTDTLAPSNMEASASAAGSAARKAERLKTNKYAQLTDEFIFVPLVLETLGGPGPEAWSLLQKIGKRIELTTGDKRACDFLLQRLSLAVQRGNAAAIMGTMRGCLEDKLDW

SEQ ID NO: 20507 - protein, 975 aa, Dermanyssus gallinae
MPQDASGNKAGPSHSDDPPQADYQSSLGPGTGSLTPAPLNNRVICTHCQKSFTSRGIKRHMTAAHSDTNRSLPPPASDPVDDVDGTHLRNKLVEYTKAYKRLDTIPKSARPAVAAALADTLSLVHLNNDTRSWANLLLFAHTVLRTPSRKRNNLTWATFIRDRIEDHRSGREPPSESVPRAHRSKQRNDDEAAARRATKLLGEGDIGGAARALLSVGSPVCAADAYTEMTSKHPREPADLDLPPRPPYADPPITSAELLREAVWTFPAGSTAGMDGLRPRHLRDLLATTNANIASRLLCDLGKVVDIIRSGTVPEAIRLILFGGRLVAIKKPSGSLRPIVISSVFRRIAAKITVKLGADLVREKLGAHQLGFNTPNGIEAAVHTTRAFVASAPNNFVVAKLDFKNAFNQIRRDHVLKTVLVHWPEAAPLVDQAYRSRSELSLDDKTIFSCSGVQQGDPLGPPLFCLAIKELVDSIQSPLNLWYLDDGTIGGEAPVVLADIKRVADFGLKSGLELNSEKCELIYKGHPNLSALEALLPGCKLVEAADMTLLGSPVGSAAIRPELAGKIESLRSRLTRLNLLSPHSAYHLLKSSLGSARIVHILRSTDVGPNQDILRDLDESLRISLSDLLNLTLADNNGAQATLPLRFGGLGIRSTADLAASCHASSLHASESTVRHISPPMALQAFQDTKEVADTKFKNLAGLLPETNKHLQRSYDDLIVSMKYQRLLSDALTTADKARLRAVVQKGASKWLQAIPSSNLGTLLDHESLRLCIGLRLGTRLTEEHRCPCGTQVDIWGTHGLSCSRSEGRQGRHSEVNEITARAFRSALIPCIREPAGLLRTDGKRPDGLTLIPFERGKALVWDATITDTLAPSNLEASASSAGSAARKAERLKTNKYAQLANEFIFVPLAFETLGGPGPGAWSLLQKIGKQIKLATGEKRALEFLLQRLSLAVQRGNAAAIMGTMRGCLEDKLDW

SEQ ID NO: 20508 - protein, 974 aa, Dermanyssus gallinae
MPQDASGNKAGPSHSDDPPQADYQSSLGPGTGSLTPAPLNNRVICTHCQKSFTSRGIKRHMTAAHSDTNRSLPPASYPVDDVDGTHLRNKLVEYTKAYKRLDTIPKSARPAVAAALADTLSLVHLNNDTRSWANLLLFAHTVLRTPSRKRNNLTWATFIKDRIEDHRSGREPPSESVPRAHRNKQRNDDEAAARRATKLLGEGDIGGAARALLSVGSPVCAADAYTEMTSKHPREPADLDLPPRPPCADPPITSAELLREAVWTFPAGSTAGMEGLRPRHLRDLLATTNANIASRLLRDLGKVVDIIRSGTVPEAIRPILFGGRLVAIKKPSGSLCPIVISSVFRRIAAKITVKLGADLVREKLGDHQLGFNTPNGIEAAVHTTRAFVASAPNNFVVAKLDFKNAFNQIRRDHVLKTVLVDWPEAAPLADQAYRSRSELSLDDKTIFSCSGVQQGDPLGPPLFCLAIKELVDSIQSPLNLWYLDDGTIGGEAPVVLADIKRVADFGLKSGLELNSEKCELIYKGHPNLSALEALLPGCKLVEAADMTLLGSPVGSAAIRPELAGRIESLRSRLTRLNLLSPHSAYHLLKSSLGSARIVHILRSTDVGPNQDLLRDLDESLRISLSDLLNLTLADNNWAQATLPLRFGGLGIRSTADLAASCHASSLHASENTVRHISPPMALQAFQDTKEVADTKFKNLAGLLPETNKHLQRSYDDLIVSMKYQRLLSDALTTADKARLRAVVQKGASKWLQAIPSSNLGTLLDHESFRLCIGLRLGIRLTEEHRCPCGTQVDIWGTHGLSCSRSEGRQSRHSEVNEITARAFRSALIPCIREPAGLLRSDGKRPDGLTLIPFERGKALVWDATITDTLAPSNLEASAYSAGSAARKAERLKTNKYAQLANEFIFVPLVFETLGGPGPEAWSLLQKIGKQIELATGEKRALEFLLQRLSLAVQRGNAAAIMGTMRGCLEDKLDW

SEQ ID NO: 20509 - protein, 975 aa, Dermanyssus gallinae
MPQDTSENKAGPSHSDNLPQTDHLSSLGSDTGNLSPAPHYNRVTCTHCQRNFTRRGIKRHITAAHSNIEHPFLPPVSNPVDNTDGTHLREKLAEYTKTYKRLDTIPKSARPAVAIALADTLSLVHQNNDAHSWANLLVFAHTVLRAPSRKQNNLSWTTYLRDRIEEHRSGSGPSPELVPRKHWNKRPNEDEAAARRATRLLGEGDIGGAARALLSVGSPVCAAEAFVEMTSKHPSEPADLDLPPRLSLAEPLVTSSEEIREAVRTFPAGSTAGMDGLRPRHLRDLMATTNTNIASRLLRDLAKVIDIIRNGTVPEAIRPIIFGGRLIAIKKPSGSFRPIVISSVFRRIAAKITVKLGTNIVCEKLGAHQLGFNTPNGIEAVVHTTRAFMSSAPNNFVAAKLDFKNAFNQVRRDYILKTVQTDWPEAAPLVDQTYRSSSELSFGERTIFSRSGVQQGDPLGPPLFCLAIKELVNSIQSPLNLWYLDDGTIGGEASVVQADIKRVLDFGQKSGLELNPQKCEIIYKGHPNIPAFEALLPGCKQVEAADMTLLGSPVGSSATHPELAGKIKSLCSRLNRLNLLNPHSAYHLLKSSLGSSRIIHFLRSTDVGANQDLLRELDNSLRTSLSDLLNLNLADNNWAQATLPLRLGGLGIRAAADLAASCHVASLYASEATVQQISPAIALQAFQDAKKAADTRFENLAGLLPEANKHLQRSYDDLIVSKKYQRLLSDALSTADKARLQAVVQKGASKWLQAIPSSNLGTLLDHESFRLCIGLRLGTRLTEEHRCPCGAQVDIWGTHGLSCNRSEGRQSRHSEINEITARTLRSALLPCIREPTGLLRSDGKRPDGLTLIPFERGKALIWDATVTDTLAPSNMEASASAAGSAARKAERLKTNKYAQLTDEFIFVPLVLETLGGPGPEAWSLLQKIGKRIELTTGDKRAFDFLLQRLSLAVQRGNAAAIMGTMRGCLEDKLDW

SEQ ID NO: 20510 - protein, 969 aa, Dermanyssus gallinae
MPQDASGNKAGPSHSDDPPQADYQSSLGPGTGSLTPAPLNNRVICTHCQKSFTSRGIKRHMTAAHSDTNRSLPPASYPVDDVNGTHLRNKLVEYTKAYKRLDTIPKSARPAVAAALADTLSLVHLNNDTRSWANLLLFAHTVLRTPSRKRNNLSWATFIRDRIEDHRSGREPPSESVPRAHRNKQRNDDEAAARRATKLLGGAARALLSVGSPVCAADAYTEMTSKHPREPADLDLPPRPPCADPPITSAELLCEAVWTFPAGSTAGMDGLRPRHLRDLLATTNAKIASRLLRELGKVVDIIRSGTVPEAIRPILFGGRLIAIKKPSGSLRPIVISSVFRRIAAKITVKLGADLVREKLGDRQLGFNTPNGIEAAVHTTRAFVASAPNNFVVAKLDFKNAFNQIRRDHVLKTVLVDWPEAAPLVDQAYRSRSELSLDDKTIFSCSGVQQGDPLGPPLFCLAIKELVDSIQSPLNLWYLDDSTIGGEAPVVLADIKRVADFGLKSGLELNSEKCELIYKGHPNLSALEALLPGCKLVEAADMTLLGSPVGSAAIRPELAGRIESLRSRLTRLNLLSPHSAYHLLKSSLGSARIVHILCSTDVGPNQDLLRDLDESLRISLSDLLNLTLADNNWAQATLPLRFGGLGIRSTADLAASCHASSLHASESTVRHISPPMALQAFQGTKEVADTKFKNLAGLLPETNKHLQRSYDDLIVSMKYQRLLSDALTTADKARLRAVVQKGANKWLQAIPSSNLGTLLDHESFRLCIGLRLGTRLTEEHRCPCGTQVDIWGTHGLSCSRSEGRQSRHSEVNEITARAFRSALIPCIREPAGLLRSDGKRPDGLTLIPFERGKALVWDATITDTLAPSNLEASASSAGSAARKAERLKTNKYAQLANEFIFVPLVFETLGGPGPEAWSLLQKIGKQIELATGEKRALEFLLQRLSLAVQRGNAAAIMGTMRGCLEDKLDW

SEQ ID NO: 20511 - protein, 941 aa, Dermanyssus gallinae
MPQDASGNKAGPSHSDDPPQADYQSSLGPGTGSLTPAPLNNRVICTHCQKSFTSRGIKRHMTAAHSDTNRSLPPASYPVDDVDGTHLRNKLVEYTKAYKRLDTIPKSARPAVAAALADTLSLVHLNNDTRSWANLLLFAHTVLRTPSRRRNNLTWATFIRDRIEDRRSGREPPSESVPRAHRNKQRNDDEAAARRATKLLGEGDIGGAARALLSVGSPVCAADAYTEMTSKHPREPADLDLPPRPPCAHPPITSAELLREAVWTFPAGSTAGMDGLRPRHLRDLLATTNANIASRLLRDLGKVVDIIRSGTVPEAIRPILFGGRLIAIKKPSGSLRPIVISSVFRRIAAKITVKLGADLVREKLEDHQLGFNTPNGIEAAVHTTRAFVASAPNNFVVAKLDFKNAFNQIRRDHVLKTVLVDWPEAAPLVDQAYRSRSELSLDDKTIFSCSGVQQGDPLGPPLFCLAIKELVDSIQSPLNLWYLDDGTIGGEAPVVLADIKRVADFGLKSGLELNSEKCELIYKGHPNLSALEALLPGCKLVEAADMTLLGSPVGSAAIRPELAGRIESLRSRLTRLNLLSPHSAYHLLKSSLGSARIVHILRSTDVGPNQDLLRDLDESLRISLSDLLNLTLADNNWAQATLPLRFGGLGIRSTADLAASCHASSLHASESTVRHISPPTALQAFQDTKEVADTKFKNLAGLLPETNKHLQRSYDDLIVSTKYQRLLSDALTTADKARLRAVVQKGASKWLQAIPSSNLGTLLDHESFRLCIGLRLGTRLTEEHRCPCGTQVDIWGTHGLSCSRSEGRQSRHSEVNEITARAFRSALIPCIREPAGLLRSDGKRPDGLTLIPFERGKALVWDATITDTLAPSNLEASASSAGSAARKAERLKTNKYAQLANEFIFVPLVFETLGGPGPEAWSLLQKIGKQIELATGEKKST

SEQ ID NO: 20512 - protein, 975 aa, Dermanyssus gallinae
MPQDASENKAGPSHSDNLPQTDNLSSLGSDTGNLSPAPHYNRVTCTHCQRNFTRREIKRHMTAAHSNIEHPFLPPVSNPVDNTDGTHLREKLAEYTKTYKRLDTIPKSARPAVAVALADTLSLVHQNNDAHSWANLLVFAHTVLRVPSRKQNNLSWTTYLRDRIKEHRSGSGPSPELVPRKHWNKRPNEDNAAARRATRLLGEGDIGGAARALLSVGSPVCAAEAFVEMTSKHPSEPADLDLPPRLSHAEPLVTSSEEIREAVRTFPAGSTAGIDGLRPRHLRDLIATTNTNIASRLLRDLAKVIDIIRSGTVPEAIRPIIFGGRLIAIKKPSGSFRPIVISSVFRRIAAKITVKLGTNIVCEKLGAHQLGFNTPNGIEAVVHTTRAFMSSAPNNFVAAKLDFKNAINQVRRDHILKTVQTDWPEAAPLVDQTYRCGSELSFGERTIFSCSGVQQGDPLGPPLFCLAIKELVNSIQSPLNFWYLDDGTIGGEACVVQADIKRVLDFGQKSGLELNPQKCEIIYKGQPNISAFEALLPGCKQVEAADMTLLGSPVGSAATRPELAGKIKSLCSRLNRLNLLNPHSAYHLLKSSLGSSRIVHFLRSTDVGANQNLLWELDNSLRTSLSDLLNLNLADNNWAQATLPLRLGGLGIRSAADLAASCHVASLHASEATVQHISPAIALQAFQDAKKAADTRFENLAGQLPEANKHLQRSYDDLIVSKKYQRLLSDALSTADKARLQAVVRKGASKWLQAIPSSNLGTLLDHESFRLCIGLRLGTRLTEEHRCPCGAQVDIWGTHGLYCNRSEGRQSRHSEINEITARAVRSALLPCIREPTGLLRSDGKRPDGLTLIPFERGKALIWDATVTDTLAPSNMEASASAAGSAARKAERLKTNKYVQLTDEFIFVPLVLETLGGPGPEAWSLLQKIGKRIELTTGDKRAFDFLLQRLSLAVQRGNAAAIMGTMRVCLEDKLDW

SEQ ID NO: 20513 - protein, 975 aa, Dermanyssus gallinae
MPQDASGNKAGPSHSDDPPQADYQSSLGPGTGSLTPAPLNNRVICTHCQKSFTSRGIKRHMTAAHSDTNRSLPPPASDPVDDVDGTHLRNKLVEYTKAYKRLDTIPKSARPAVAAALADTLSLVHLNNDTRSWANLLLFAHTVLRTPSRKRNNLTWATFIRDRIEDHRSGREPPSESVPRAHRSKQRNDDEAAARRATKLLGEGDIGGAARALLSVGSPVCAADAYTEMTSKHPREPADLDLPPRPPYADPPITSAELLREAVWTFPAGSTAGMDGLRPRHLRDLLATTNANIASRLLRDLGKVVDIIRSGTVPEAIRPILFGGRLVAIKKPSGSLRPIVISSVFRRIAAKITVKLGADLVREKLGAHQLGFNTPNGIEAAVHTTRAFVASAPNNFVVAKLDFKNAFNQIRRDHVLKTVLVDWPEAAPLVDQAYRSRSELSLDDKTIFSCSGVQQGDPLGPPLFCLAIKELVDSIQSPLNLWYLDDGTIGGEAPVVLADIKRVADFGLKSGLELNSEKCELIYKGHPNLSALEALLPGCKLVEAADMTLLGSSVGSAAIRPELAGKIESLRSRLTRLNLLSPHSAYHLLKSSLGSARIVHILRSTDVGPNQDLLRDLDESLRISLSDLLNLTLADNNWAQATLPLRFGGLGIRSTADLAANCHASSLHASESTVRHINPPMALQAFQDTKEVADTKFKNLAGLLPETNKHLQRSYDDLIVSMKYQRLLSDALTTADKARLRAVVQKGASKWLQAIPSSNLGTLLDHERFRLCIGLRLGTRLTEEHRCPCGTQVDIWGTHGLSCSRSEGRQSRHSEVNEITARAFRSALIPCIREPAGLLRTDGKRPDGLTLIPFERGKALVWDATITDTLAPSNLEASASSAGSAARKAERLKTNKYAQLAHEFIFVPLVFETLGGPGPGAWSLLQKIGKQIKLATGEKRALEFLLQRLSLAVQRGNAAEIMGTMRGCLEDKLDW

SEQ ID NO: 20514 - protein, 915 aa, Dermanyssus gallinae
MTAAHSNIEHPFLPPVSNPVDNTDGTHLREKLAEYTKTYKRLDTIPKSARPAVAVALADTLSLVHQNNDAHSWANLLVFAHTVLRAPSQKQNNLSWTTYLRDRIEEHRSGSGPSPELVPRKHWNKRPNEDEAAARRATRLLGEGDIGGAARALLSVGSPVCAAEAFVEMTSKHPSEPADLDLPPRLSLAEPLVISSEEIREAVRTFPAGSTAGMDGLRPRHLRDLIATTNTNIASRLLRDLAKVIDIIRNGTVPEAIRPIIFGGRLIAIKKPSGSFRPIVISSVFRRIAAKITVKLGTNIVCEKLGAHQLGFNTPSGIEAVVHTTRAFMSSAPNNFVAAKLDFKNAFNQVRRDHILKTVQTDWPEAAPLVDQTYRSSSELSFGERTIFSRSGVQQGDPLGPPLFCLAIKELVNSIQSPLNLWYLDDGTIGGEASVVQADIKRVLDFGQKSGLELNPQKCEIIYKGHPNIPAFEALLPGCKQVEAADMTLLGSPVGSAATHPELAGKIKSLCSRLNRLNLLNPHSAYHLLKSSLGSSRIIHFLRSTDVGANQDLLRELDNSLRTSLSDLLNLNLADNNWAQATLPLRLGGLGIRSAADLAASCHVASLYASEATVQHISPAIALQAFQDAKKAADTRFENLAGLLPEANKHLQRSYDDLIVSKKYQRLLSDALSTADKARLQAVVQKGASKWLQAIPSSNLGTLLDHESFRLCIGLRLGTRLTEEHRCPCGAQVDIWGTHGLSCNRSEGRQSRHSDINEITARALRSALLPCIREPTGLLRSDGKRPDGLTLIPFERGKALIWDATVTDTLAPSNMEASASAAGSAARKAERLKTNKYAQLTDEFIFVPLVLETLGGPGPEAWSLLQKIGKRIELTTGDKRAFDFLLQRLSLAVQRGNAAAIMGTMRGCLEDKLDW

SEQ ID NO: 20515 - protein, 975 aa, Dermanyssus gallinae
MPQDASENKAGPSHSDNLPQTDHLSSLGSDTGNLSPAPHYNRVTCTHCQRNFTRRGIKRHMTAAHSNIEHPLLPPVSNPVDNTDGTHLREKLAEYTKTYKRLDTIPKSARTAVAVALADTLSLVHQNNDAHSWANLLVFAHTVLRAPSRKQNNLSWTTYLRDRIEEHRSGSGPSPELVPKKHWNKQPNEDKAAARRATRLLGEGDIGGAARALLSVGSPVCAAEAFVEMTSKHPNEPADLDLPPRLSNAEPLVTSSEEIREAVRTFPAGSTAGMGGLRPRHLRDLIATTNTNIASRLLRELAKVIDIIRNGTVPEAIRPIIFGGRLIAIKRPSGSFRPIVISSVFRRIAAKITVKLGTNIVCEKLGAHQLGFNTPNGIEAVVHTTRAFMSSAPNNFVAAKLDFKNAFNQVRRDHILKTVQTDWPEAAPLVDQTYRSSSELSFGERTIFSRSGVQQGDPLGPPLFCLAIKELVNSIQSPLNLWYLDDGTIGGEASVVQADIKRVLDFGQKSGLELNPQKCEIIYKGHPNISAFEALLPGCKQVKAADMTLLGSPVGSAATHPELAGKIKSLCSRLNRLNLLNPHSAYHLLKSSLGSSRIIHFLRSTDVGANQDLLRELDNSLRTSLCDLLNLNLADNNWAQATLPLRLGGLGIRSAADLAASCHVASLHASEATVQHISPTIALQAFQDAKKAADTRFENLAGLLPEANKHLQRSYDDLIVSKKYQRLLSDALSTADKARLQAVVQKGASKWLQAIPSSNLGTLLDHESFRLCIGLRLGTRLTEEHRCPCGAQVDIWGTNGLSCNRSEGRQSRHSEINEITARALRSALLPCIREPTGLLRSDGKRPDGLTLIPFERGKALIWDATVTDTLAPSNMEASASAAGSAARKAERLKTNKYAQLTDEFIFVPLVLETLGGPGPEAWSLLQKIGKRIELTTGDKRAFDFLLQRLSLAVQRGNAAAIMGTMRGCLEDKLDW

SEQ ID NO: 20516 - protein, 975 aa, Dermanyssus gallinae
MPQDASENKAGPSHSDNLPQTDHLSSLGSDTGNLSPAPHYNRVTCTHCQRNFTRRGIKRHMTAAHSNIEHPFLPPVSNPVDNTDGTHLREKLAEYTKTYKRLDTIPKSARPAVAVALADTLSLVHQNNDAHSWANLLVFAHTVLRATSRKQNNLSWTTYLRDRIEEHRSGSGPSPELVPRKHWNKRPNEDEAAARRATRLLGEGDIGGAARALLSVGSPVCAAEAFVEMTSKHPSEPADLDLPPRLSLAEPLVTSSEEIREAVRTFPAGSTAGMDGLRPRHLRDLIATTNTNIASRLLRDLAKVIDIIRNGTVPEAIRPIIFGGRLIAIKKPSGSFRPIVISSVFRRIAAKITVKLGTNIVCEKLGAHQLGFNTPSGIEAVVHTTRAFMSSAPNNFVAAKLDFKNAFNQVRRDHILKTVQTDWPEAAPLVDQTYRSSSELSFGERTIFSRSGVQQGDPLGPPLFCLAIKELVNSIQSPLNLWYLDDGTIGGEASVVQADIKRVLDFGQKSGLELNPQKCEIIYKGHPNIPAFEELLPGCKQVEAADMTLLGSPVGSAATHPELAGKIKSLCSRLNRLNLLNPHSAYHLLKSSLGSSRIIHFLRSTDVGANQDLLRELDNSLRTSLSDLLNLNLADNNWAQATLPLRLGGLGIRSAADLAASCHVASLYASEATVQHISPAIALQAFQDAKKAADTRFENLAGLLPEANKHLQRSYDDLIVSKKYQRLLSDALSTADKARLQAVVQKGASKWLQAIPSSNLGTLLDHESFRLCIGLRLGTRLTEEHRCPCGAQVDIWGTHGLSCNRSEGRQSRHSEINEITARALRSALLPCIREPTGLLRSDGKRPDGLTLIPFERGKALIWDATVTDTLAPSNMEASASAAGSAARKAERLKTNKYAQLTDEFIFVPLVLETLGGPGPEAWSLLQKIGKRIELTTGDKRAFDFLLQRLSLAVQRGNAAAIMGTMRGCLEDKLDW

SEQ ID NO: 20517 - protein, 975 aa, Dermanyssus gallinae
MPQDASENKAGPSHSDNLPQTDHLSSLGSNTGNLSPAPHYNRVTCTHCQRNFTRRGIKRHMTAAHSNIEHPFLPPVSNPVDNTDGTHLREKLAEYTKTYKRLDTIPKSARPAVAIALADTLSLVHQNNDAHSWANLLVFAHTVLRAPSRKQNNLSWTTYLRDRIEEHRSGSGPSPELVPKKHWNKQPNEDKAAARRATRLLGEGDIGGAARALLSVGSPVCAAEAFVEMTSKHPNEPADLDLPPRLSNAEPLVTSSEEIREAVRTFPAGSTAGMDGLRPRHLRDLIATTNTNIASRLLRDLAKVINIIRNGTVPEAIRPIIFGGRLIAIKKPSGSFRPIVISSVFRRIAAKITVKLGTNIVREKLGAHQLGFNTPNGIEAVVHTTRAFMSSAPNNFVAAKLDFKNAFNQVRRDHILKTVQTDWPEAAPLVDQTYRSSSELSFGERTIFSRSGVQQGDPLGPPLFCLAIKELVNSIQSPLNLWYLDDGTIGGEASVVQADIKRVLDFGQKSGLELNPQKCEIIYKGHPNIPAFEALLPGCKQVEAADMTLLGSPVGSSATHPELAGKIKSLCSRLYRLNLLNPHSAYHLLKSSLGSSRIIHFLRSTDVGANQDLLRELDNSLRTSLSDLLNLNLADNNWAQATLPLRLGGLGIRSAADLAASCHVASLYASEVTVQQISPAIALQAFQDAKKAADTRFENLAGLLPEANKHLQRSYDDLIVSKKYQRLLSDALSTADKARLQAVVQKGASKWLQAIPSSNLGTLLDHESFRLCIGLRLGTRLTEEHRCLCGAQVDIWGTHGLSCNRSEGRQKRHSEINEITARALRSALLPCIREPTGLLRSDGKRPDGLTLIPFERGKALIWDATVTDTLAPSNMEASASAAGSAARKAERLKTNKYAQLTDEFIFVPLVLETLGEPGPEAWSLLQKIGKRIELTTGDKRAFDFLLQRLSLAVQRGNAAAIMGTMRGCLEDKLDW

SEQ ID NO: 20518 - protein, 975 aa, Dermanyssus gallinae
MPQDASGNKAGPSHSDDPPQADYQSSLGPGTGSLTPAPLNNRVICTHCQKSFTSRGIKRHMTAAHSDTNRSLPPPARDPVDDVDGTHLRNKLVEYTKAYKRLDTIPKSARPAVAAALADTLSLVHLNNDTRSWANLLLFAHTVLRTPSRKRNNLTWATFIRDRIEDHRSGREPPSESVPRAHRSKQRNDDEAAARRATKLQGEGDIGGAARALLSVGSPVCAADAYTEMTSKHPREPADLDLPPRPPYADPPITSAELLREAVWTFPAGSTAGMDGLRPRHLRDLLATTNANIASRLLRDLGKVVDIIRSGTVPEAIRPILFGGRLVAIKKPSGSLRPIVISSVFRRIAAKITVKLGADLVREKLGAHQLGFNTLNGIEAAVHTTRAFVASAPNNFVVAKLDFKNAFNQIRRDHVLKTVLVDWPEAAPLVDQAYRSRSELSLDDKTIFSCSGVQQGDPLGPPLFCLAIKELVDSIQSPLNLWYLDDGTIGGEAPVVLADIKRVADFGLKSGLELNSEKCELIYKGHPNLSALEALLPGCKLVEAADMTLLGSPVGSAAIRPELAGKIESLRSRLTRLNLLSPHSAYHLLKSSLGSARIVHILRSTDVGPNQDLLRDLDESLRISLSDLLNLTLADNNWAQATLPLRFGGLGIRSTADLAASCHASSLHASESTVRQISPPMALQAFQDTKEVADTKFKNLAGLLPETNKHLQRSYDDLIVSMKYQRLLSDALTTADKARLRAVVQKGASKWLQAIPSSNLGTLLDHESFRLCIGLRLGTRLTEEHRCPCGTQVDIWGTHGLSCSRSEGRQSRHSEVNEITARAFRSALIPCIREPAGLLRTDGKRPDGLTLIPFERGKALVWDATITDTLAPSNLEASASSAGSAARKAERLKTNKYAQLANEFIFVPLVFETLGGPGPGAWSLLQKIGKQIKLATGEKRALEFLLQRLSLAVQLGNAAAIMGTMRGCLEDKLDW

SEQ ID NO: 20519 - protein, 974 aa, Dermanyssus gallinae
MPQDASGNKAGPSHSDDPPQADYQSSLGPGTGSLTPAPLNNRVICTHCQKSFTSRGIKRHMTAAHSDTNRSLPPASYPVDDVDGTHLRNKLVEYTKAYKRLDTIPKSARPAVAAALADTLSLVHLNNDTRSWANLLLFAHTVLRTPSRKRNNLTWATFIRDRIEDHRSGREPPSESVPRAHRNKQRNDDEAAARRATKLLGEGDIGGAARALLSVGSPVCAADAYTEMTSKHPREPADLDLPPRPPCADPPITSAELLREAVWTFPAGSTAGMDGLRPRHLRDLLATTNANIASRLLRDLGKVVDIIRSGTVPEAIRPILFGGRLIAIKKPSGSLRPIVISSVFRRIAAKITVKLGADLVREKLGDHQLGFNTPNGIEAAVHTTRAFVASAPNNFVVAKLDFKNAFNQIRRDHVLKTVLVDWPEAAPLVDQAYRSRSELSLDDKTIFSCSGVQQGDPLGPPLFCLAIKELVDSIQSPLNLWYLDDGTIGGEAPVVLADIKRVADFGLKSGLELNSEKCELIYKGHPNLSALEALLPGCKLVEAADMTLLGSPVGSAAIRPELAGRIESLRSRLTRLNLLSPHSAYHLLKSSLGSARIVHILRSTDVGPNQDLLRDLDESLRISLSDLLNLTLADNNWAQATLPLRFGGLGIRSTADLAASCHASSLHASESTVRHISPPMALQAFQDTKEVADTKFKNLAGLLPETNKHLQRSYDDLIVSMKYQRLLSDALTTADKARLRAVVQKGASKWLQAIPSSNLGTLLDHESFRLCIGLRLGTRLTEEHRCPCGTQVDIWGTHGLSCSRSEGRQSRHSEVNEITARAFRSALIPCIREPAGLLRSDGKRPDGLTLIPFERGKALVWDATITDTLAPSNLEASASSAGSAARKAERLKTNKYAQLANEFIFVPLVFETLGGPGPEAWSLLQKIGKQIELATGEKRALEFLLQRLSLAVQRGNAAAIMGTMRGCLEDKLDW

SEQ ID NO: 20520 - protein, 957 aa, Dermanyssus gallinae
MPQDASGNKAGPSHSDDPPQADYQSSLGPGTGSLTPAPLNNRVICTHCQKSFTSRGIKRHMTAAHSDTNRSLPPASYPVDDVDGTHVRNKLVEYTKAYKRLDTIPKRARPAVAAALADTLSLVHLNNDTRSWANLLLFAHTVLRTPSRKRNNLTWATFIRDRIEDHRSGREPPSESVPRAHRNKQRNDDEAAARRATKLLGEGDIGGAARALLSVGSPVCAADAYTEMTSKHPREPADLNLPPRPPCADPPITSAELLREAVWTFPAGSTAGMDGLRPRHLRDLLATTNANIASRLLRDLGKVVDIIRSGTVPEAIRPILFGGRLIAIKKPSGSLRPIVISSVFRRIAAKITVKLGADLVHEKLGDHQLGFNTPNGIEAAVHTTRAFVASAPNNFVVVKLDFKNAFNQIRRDHVLKTVLVDWPEAASLVDQAYRSRSELSLDDKTIFSCSGVQQGDPLGPPLFCLAIKELVDSIQSPLNLWYLDDGTIGGEAPVVLADIKRVADFGLKSGLELNSEKCELIYKGHPNLSTLEALLPECKLVEAADMTLLGSPVGSAAIRPELAGRIVSLRSRLTRLNLLSPHSAYHLLKSSLGSARIVHILRSTDVGPNQDLLRDLDESLRISLSDLLNLTVADNNWAQATLPLRFGGLGIRSTADLAASCHASSLHASESTVRHISTPMALQAFQDTKEVADTKFKNLAGLLPETNKHLQRSYDDLIVSMKYQRLLSDALTTADKARLRAVVQKGASKWLQAIPSSNLGTLDHESFRLCIGLRLGTRLTEEHRCPCGTQVDIWGTHGLSCSRSEGRQSRHSEVNEITARAFRSALIPCIREPAGLLRSDGKRPDGLTLIPFERGKALVWDATITDTLVPSNLEASASSAGFAARKAERLKTNKYAQLANEFIFVPLVFETLGGPGPEAWSLLQKIGKQIELAGKKEHLSFYFSDYRWQFNAAMRQQ

SEQ ID NO: 20521 - protein, 747 aa, Dermanyssus gallinae
MTSKHPREPADLDLPPRPPCADPPITSAELLREAVWTFPAGSTAGMDGLRPRHLRDLLATTNANIASRLLRELGKVVDIIRSGTVPEAIRPILFGGRLIAIKKPSGSLRPIVISSVFRRIAANITVKLGADLVREKLGDRQLGFNTPNGIEAAVHTTRAFVASAPNNFVVAKLDFKNAFNQIRRDHVLKTVLVDWPEAAPLVDQAYRSRSELSLDDKTIFSCSGVQQGDPLGPPLFCLAIKELVDSIQSPLNLWYLDDGTIGGEAPVVLADIKRVADFGLKSGLELNSEKCELIYKGHPNLSALEALLPGCKLVEAADMTLLGSPVGSAAIHPELAGRIESLRSRLTRLNLLSPHSAYHLLKSSLGSARIVHILRSTDVGPNQDLLRDLDESLRISLSDLLNLTLADNNWAQATLPLRFGGLGIRSTADLAASCHASSLHASESTVRHISPPMALQAFQDTKEVADTKFKNLAGLLPETNKHLQRSYDDLIVSMKYQRLLSDALTTADKARLRAVVQKGASKWLQAIPSSNLGTLLDHESFRLCIGLRLGTRLTEEHRCPCGTQVDIWGTHGLSCSRSEGRQSRHSEVNEITARAFRSALIPCIREPAGLLRSDGKRPDGLTLIPFERGKALVWDATITDTLAPSNLEASASSAGSAARKAERLKTNKYAQLANEFIFVPLVFETLGGPGPEAWSLLQKIGKQIELATGEKRALEFLLQRLSLAVQRGNAAAIMGTMRGCLEDKLDW

SEQ ID NO: 20522 - protein, 975 aa, Dermanyssus gallinae
MPQDASGNKAGPSHSDDPPQADYQSSLGPGTGSLTPAPLNNRVICTHCQKSFTSRGIKRHMTAAHSDTNRSLPPPASDPVDDVDGTHLRNKLVEYTKAYKRLDTIPKSARPAVAAALADTLSLVHLNNDTRSWANLLLFAHTVLRTPSRKRNNLTWATFIRDRIEDHRSGREPPSESVPRAHRSKQRNDDEAAARRATKLLGEGDIGGAARALLSVGSPVCAADAYTEMTSKHPREPADLDLPPRPPYADPPITSAELLREAVWTFPAGSTAGMDGLRPRHLRDLLATTNANIASRLLRDLGKVVDIIRSGTVPEAIRPILFGGRLVAIKKPSGSLRPIVISSVFRRIAAKITVKLGEDLVREKLGAHQLGFNTPNGIEAAVHTTRAFVASAPNNFVVAKLDFKNAFNQIRRDHVLKTVLVDWPEAAPLVDQAYRSRSELSLDDKTIFSCSGVQQGDPLGPPLFCLAIKELVDSIQSPLNLWYLDDGTIGGEAPVVLADIKRVADFGLKSGLELNSEKCELIYKGHPNLSALEALLPGCKLVEAADMTLLGSPVGSAAIRPELAGKIESLRSRLTRLNLLSPHSAYHLLKSSLGSARIVHILRSTDVGPNQDLLRDLDESLRISLSDLLNLTLADNNWAQATLPLRFGGLGIRSTADLAASCHASSLHASESTVRHISPPMALQAFQDTKEVADTKFKNLAGLLPETNKHLQRSYDDLIVSMKYQRLLSDALTTADKARLRAVVQKGASKWLQAIPSSNLGTLLDHESFRLCIGLRLETRLTEEHRCPCGTQVDIWGTHGLSCSRSEGRQSRHSEVNEITARAFRSALIPCIREPAGLLRTDGKRPDGLTLIPFERGKALVWDATITDTLAPSNLEASASSAGSAARKAERLKTNKYAQLANEFVFVPLVFETLGGPGPGAWSLLQKIGKQIKLATGEKRALEFLLQRLSLAVQRGNAAAIMGTMRGCLEDKLDW

SEQ ID NO: 20523 - protein, 972 aa, Dermanyssus gallinae
MPQDASGNKAGPSHSDDPPQADYQSSLGPGTGSLTPAPLNNRVICTHCQKSFTSRGIKRHMTAAHSDTNRSLPPPASDPVDGTHLRNKLVEYTKAYKRLDTIPKSARPAVAAALADTLSLVHLNNDTRSWANLLLFARTVLRTPSRKRNNLTWATFIRDRIEDHRSGREPPSESVPRAHRSKQRNDDEAAARRATKLLGEGDIGGAARALLSVGSPVCAADAYTEMTSKHPREPADLDLPPRPPYADPPITSAELLREAVWTFPAGSTAGMDGLRPRHLRDLLATTNANIASRLLRDLGKVVDIIRSGTVPEAIRPILFGGRLVAIKKPSGSLRPIVISSVFRRIAAKITVKLGADLVREKLGAHQLGFNTPNGIEAAVHTTRAFVASAPNNFVVAKLDFKNAFNQIRRDHVLKTVLVDWPEAAPLVDQAYRSRSELSLDDKTIFSCSGVQQGDPLGPPLFCLAIKELVDSIQSPLNLWYLDDGTIGGEAPVVLADIKRVADFGLKSGLELNSEKCELIYKGHPNLSALEALLPGCKLVEAADMTLLGSPVGSAAIRPELAGKIESLRSRLTRLNLLSPHSAYHLLKSSLGSARIVHILRSTDVGPNQDLLRDLDESLRISLSDLLNLTLADNNWAQATLPLRFGGLGIRSTADLAASCHASSLHASESTVRHISPPMALQAFQDTKEVADTKFKNLAGLLPETDKHLQRSYDDLIVSMKYQRLLSDALTTAEKARLRAVVQKGASKWLQAIPSSNLGTLLDHESFRLCIGLRLGTRLTEEHRCPCGTQVDIWGTHGLSCSRSEGRQSRHSEVNEITARAFRSALIPCIREPAGLLRTDGKRPDGLTLILFKRGKALVWDATITDTLAPSNLEASASSAGSAARKAERLKTNKYAQLANEFIFVPLVFETLGGPGPGAWSLLQKIGKQIKLATGEKRALEFLLQRLSLAVQRGNAAAIMGTMRGCLEDKLDW

SEQ ID NO: 20524 - protein, 975 aa, Dermanyssus gallinae
MPQDASGNKAGPSHSDDPPQADYQSSLGPGTGSLTPAPLNNRVVCTHCQKSFTSRGIKRHMTAAHSDTNRSLPPPASDPVDDVDGTHLRNKLVEYTKAYKRLDTIPKSARPAVAAALADTLSLVHLNNDTRSWANLLLFAHTVLRTPSRKRNNLTWATFIRDRIEDHNSGREPPSESVPRAHRSKQRNDDEAAARRATKLLGEGDIRGAARALLSVGSPVCAADAYTEMTSKHPREPADLDLPPRPPYADPPITSAELLREAVWTFPAGSTAGMDGLRPRHLRDLLATTNANIASRLLRDLGKVVDIIRSGTVPEAIRPILFGGRLVAIKKPSGSLRPIVISSVFRRIAAKITVKLGADLVREKLGAHQLGFNTPNGIEAAVHTTRAFVASAPNNFVVAKLDFKNAFNQIRRDHVLKTVLVDWPEAAPLVDQAYRSRSELSLDDKTIFSCNGVQQGDPLGPPLFCLAIKELVDSIQSPLNLWYLDDGTIGGEAPVVLADIKRVADFGLKSGLELNSEKCELIYKGHPNLSALEALLPGCKLVEAADMTLLGSPVGSAAIRPELAGKIESLRSRLTRLNLLSPHSAYHLLKSSLGSARIVHILRSTDVGPNQDLLRDLDESLRISLSDLLNLTLADNNWAQATLPLRFGGLGIRSTADLAASCHASSLHASESTVRHISPPMALQAFQDTKEVADTKFKNLAGLLPETNKHLQRSYDDLIVSMKYQRLLSDALTTADKARLRAVVQKGASKWLQAIPSSNLGTLLDHESFRLCIGLRLGTRLTEEHRCPCGTQVDIWGTHGLSCSRSEGRQSRHSEVNEITARAFRSALIPCIREPAGLLRTDGKRPDGLTLIPFERGKALVWDATITDTLAPSNLEASASSAGSAARKAERLKTNKYAQLANEFIFVPLVFETLGGPGPGAWSLLQKIGKQIKLATGEKRALEFLLQRLSLAVQRGNAAAIMGTMRGCLEDKLDW

SEQ ID NO: 20525 - protein, 975 aa, Dermanyssus gallinae
MPQDASENKAGPSHSDNLPQTDHLSSLGSDTGNLSPAPHYNRVTCTHCQRNFTRRGIKRHMTAAHSNIEHPFLPPVSNPVDNTDGTHLRKKLAEYTKTYKRLDTIPKSARPAVAVALADTLSLVHQNNDAHSWANLLVFAHTVLRAPSRKQNNLSWTTYLRDRIEEHRSGSGPSPELVPRKHWNKRPNEDEAAARRATRLLGEGDIGGAARALLSVGSPVCAAEAFVEMTSKHPSEPADLDLPPRLSLAEPLVTSSEEIREAVRTFPAGSTAGMDGLRPRHLRDLIATTNTNIASRLLRDLAKVIDIIRNGTVPEAIRPIIFGGRLIAIKKPSGSFRPIVISSVFRRIAAKITVKLGTNIVCEKLGAHQLGFNTPNGIEAVVHTTRAFMSSAPNNFVAAKLDFKNAFNQVRRDHILKTVQTDWPEAAPLVDQTYRSSSELSFGERTIFSRSGVQQGDPLGPPLFCLAIKELVNSIQSPLNLWYLDDGTIGGEASVVQADIKRVLDFGQKSGLELNPQKCEIIYKGHPNISAFEALLPGCKQVEAADMTLLGSPVGSAATHPELAGKIKSLCSRLNRLNLLNPHSAYHLLKSSLGSSRIIHFLRSTDVGANQDLLRELDNSLRTSLSDLLNLNLADNNWAQATLPLRLGGLGIRSAADLAASCHVASLYASEATVQHISPAIALQAFQDAKKAADTRFENLAGLLPETNKHLQRSYDDLIVSKKYQRLLSDALSTADKARLQAVAQKGASKWLQAIPSSNLGTLLDHESFRLCIGLRLGTRLTEEHRCSCGAQVDIWGTHGLSCNRSEGRQSRHSEINEITARALRSALLPCIREPTGLLRSDGKRPDGLTLIPFERGKALIWDATVTDTLAPSNLEASASAAGSAARKAERLKTNKYAQLTDEFIFVPLVLETLGGPGPEAWSLLQKIGKRIELTTGDKRAFDFLLQRLSLAVQRGNAAAIMGTMRGCLEDKLDW

SEQ ID NO: 20526 - protein, 1309 aa, Dermanyssus gallinae
MPKVVISGQDKPPDSLDISRLRAVTTLVENNMEADRASAKTTASPICERDNETVATDNKEGRQLGVKRARPSSETQASVQAINTEAAPQELPEEEGFKEVMNKSRRRNIRKKEEVLAKLKQKVESGAHKVFRVAFSAAEDGSSLPGGNVLGMCKDLHLKVADANISAQNGQISATVDKLEDARKLMCITELAGLRVKAASKNIDNIWGAINHVSPDFQEGEILQELSSAGVIEVKRICRRAGLGPQQAAIPTRKVLLKFKGAPPATVYLGFQTHAVTVEPPRPSRCFKCQRLGHHASSCSGQVACVNCGSNRHLVKDCKSAPKCASCGGAHRSASPSCPIYAIAWERSKIITGARVLRQVQSDYPAATIVEKTGDSDESGTMQRNFTRREIKRHMTAAHSNIEHPFLPPVSNPVDNTDGTHLREKLAEYTKTYKRLDTIPKSARPAVAVALADTLSLVHQNNDAHSWANLLVFAHTVLRAPSRKQNNLSWTTYFRDRIEEHRSGSGPSPELVPRKHWNKRPNEDEAAARRATRLLGEGDIGGAARALLSVGSPVCAAEAFVEMTSKHPSEPADLDLPPRLSLAEPLVTSSEEIREAVRTFPAGSTAGMDGLRPRHLRDLIATTNTNIASRLLRDLAKVIDIIRNGTVPEAIRPIIFGGRLIAIKKPSGSFRPIVISSVFRRIAAKITVKLGTNTVCEKLGAHQLGFNTPNGIEAVVHTTRAFMSSAPNNFVAAKLDFKNAFNQVRRDHILKTVQTDWPEAAPLVDQTYRSSSELSFGERTIFSRSGVQQGDPLGPPLFCLAIKELVNSIQSPLNLWYLDDGTIGGEASVVQADIKRVFDFGQKSGLELNPQKCEIIYKGHPNIPAFEALLPGCKQVEAADMTLLGSPVGSSATHPELAGKIKSLCSRLNRLNLLNPHSAYHLLKSSLGSSRIIHFLRSTDVGANQDLLRELDKSLRTSLSDLLNLNLADNNWAQATLPLRLGGLGIRSAADLAASCHVASLYASEATVQQISPAIALQAFQDAKKAADTRFENLAGLLPEANKHLQRSYDDLIVSKNYQRLLSDALSTADKARLQAVVQKGASKWLQAIPSSNLGTLLDHESFRLCIGLRLGTRLTEEHRCPCGAQVDIWGTHGLSCNRSEGRQSRHSEINEITARALRSALLPCIREPTGLLRSDGKRPDGLTLIPFKRGKALIWDATVTDTLAPSNMEASASAAGSAARKAERLKTNKYAQLTDEFIFVPLVLETLGGPGPEAWSLLQKIGKQIELTTGDKRAFDFLLQRLSLAVQRGNAAAIMGTMRGCLEDKLDW

SEQ ID NO: 20527 - protein, 912 aa, Dermanyssus gallinae
MTAAHSGTDRSLLPPASYPVDDVDGTHLRNKLVEYTKAYKRLDTIPKSARPAMAAALADTLSLVHLNNDTRSWANLLLFAHTVLRTPSRKRNNLTWATFIRDRIEDHRSGREPPSESVPRAHRNKQRNDDEAAARRATKLLGEGDIGGSVRALLSVGSPVCAADAYTEMTSKHPREPADLDLPPRPPYADPPITSAELLREAVWTFPAVSTAGMDGLRPRHLRDLLATTNANIASRLLRDLGKVVDIIRSGTVPEAICPFLFGGGLIAIKKPSGSLRPIVISSVFRRIAAKITVKLGADLVREKLGAHQLGFNTPNGIEAAVHTTKAFVASAPNNFVVAKLDFKNAFNQIRRDHVLKTVLVDWPEAAPLVDQAYRSRPELSLDDKTIFSCSGVQQGDPLGPPLFCLAIKGLVDSIQSPLNLWYLDDGTIGGEAPVVLADIKRVADFGLKSGLELNSEKCELIYKGHPNLSALEALLPGSKLAEAADMTLLGSPVRSAAIRPELAGRIESLRSRLTRLNLLSPHSAYHLLKSSLGSARFVHILRSTDVGPNQDLLRDLDESLRISLSDLLNLTLADNNWAQATLPLRFGGLGIRSTADLAASCHASSLHASESTVRHISPPMALQAFQDTKEVADTKFKNLAGLLPETNKHLQRSYDDLIVSVKYQRLLSDALTTADKARLRAVVQKGASKWLQAIPSSNLGTLLDHKSFRLCIGLRLGTRLTEEHRCPCGTQVDIWGTHGLSCSRSEGRQSRHSEVNEITARAFRSALIPCIRKPAGLLRSDGKRPDGLTLIPFERGKALVWDATITDTLALEASASSAGSAARKAERLKTNKYAQLANEFIFVPLVFETLGGPDPEAWSLLQKIGKQIELATGEKRALEFLLQRLSLAVQRGNAAAIMGTMRGCLEDKLDW

SEQ ID NO: 20528 - protein, 975 aa, Dermanyssus gallinae
MPQDASENKAGSSHSDNLPQTDHLSSFGSGTGNLSPAPHYNRVTCTHCQRNFTRRGIKRHMTAAHSNIEHPFLPPVCNPVDNTDGTHLREKLAEYTKTYKRLDTIPKSARPAVAVALADTLSLVHQNNDAHSWANLLVFAHTVLRAPSRKQNNLSWTTYLRDRIEEHRSGSGPSPELVPRKHWNKRPNEDKAAARRATRLLGEGDIGGAARALLSVGSPVCAAEAFVEMTSKHPSEPADLDLPPRLSHAEPLVTSSEEIREAVRTFPAGSTAGMDGLRPRHLRDLIATTNTNIASRLLRDLAKVIDIIRNGTVPEAIRPIIFGGRLIAIKKPSGSFRPIVISSVFRRIAAKITVKLGTNIVCEKLGAHQLGFNTPNGIEAVVHTTRAFMSSAPNNFVAAKLDFKNAFNQVRRDHILKTVQTDWPEAAPLVDQTYRSSSELSFGERTIFSRSGVQQGDPLGPPLFCLAIKELVNSIQSPLNLWYLDDGTIGGEASVVQADIKRVLDFGQKSGLELNPQKCEIIYKGHPNISAFEALLPGCKQVEAADMTLLGSPVGSAATHPELAGKIKSLCSRLNRLNLLNPHCAYHLLKSSLGSSRIIHFLRSTDVGANQDLLRELDNSLRTSLSDLLNLNLADNNWAQATLPLRLGGLGIRSAADLAASCHVASLHASEATVQHISPAIALQAFQDAKKAADTRFENLAGLLPEANKHLQRSYDDLIVSKKYQRLLSDALSTADKARLQAVVQKGASKWLQAIPSSNLGTLLDHESFRLCIGLRLGTRLTEEHRCPCGAQVDIWGTHGLSCNRSEGRQSRHSEINEITARALRSALLPCIREPTGLLRSDGKRPDGLTLIPFERGKALIWDATVTDTLAPSNMEASASAAGSAARKAERLKTNKYAQLTDEFIFVPLVLETLGGPGPEAWSLLQKIGKRIELTTGDKRAFDFLLQRLSLAVQRGNAAAIMGTMRGCLEDKLDW

SEQ ID NO: 20529 - protein, 975 aa, Dermanyssus gallinae
MPQDASENKAGPSHSDNLPQTDHLSSLGSDTGNLSPAPHYNRVTCTHCQRNFTRRGIKRHMTAAHSNIEHPFLPPVSNPVDNTDGTHLREKLAEYTKTYKRLDTIPKSARPAVAVALADTLSLVHQNNDAHSWANLLVFAHTVLRAPSRKQNNLSWTTYLRDRIEEHRSGSGPSPELVPRKHWNKRPNEDEAAARRATRLLGEGDIGGAARALLSVGSPVCAADAFVEMTSKHPSEPADLDLPPRLSLAEPLVTSSEEIREAVRTFPAGSTAGMDGLRPRHLRDLIATTNTNIASRLLRDLAKVIDIIRNGTVPEAIRPIIFGGRLIAIKKPSGSFRPIVISSVFRRIAAKITVKLGTNVVCEKLGAHQLGFNTPSGIEAVVHTTRAFMSSAPNNFVAAKLDFKNAFNQVRRDHILKTVQTDWPEAAPLVDQTYRSSSELSFGERTIFSRSGVQQGDPLGPPLFCLAIKELVNSIQSPLNLWYLDDGTIGGEASVVQADIKRVLDFGQKSGLELNPEKCEIIYKGHPNIPAFEALLPGCKQVEAADMTLLGSPVGSAATHPELAGKIKSLCSRLNRLNLLNPHSAYHLLKSSLGSSRIIHFLRSTDVGANQDLLRELDNSLRTSLSDLLNLNLADNNWAQATLPLRLGGLGIRSAADLAASCHVASLYASEATVQHISPAIALQAFQDAKKAADTRFENLAGLLPEANKHLQRSYDDLIVSKKYQRLLSDALSTADKARLQAVVQKGASKWLQAIPSSNLGTLLDHESFRLCIGLRLGTRLTEEHRCPCGAQVDIWGTHGLSCNRSEGRQSRHSEINEITARALRSALLPCIREPTGLLRSDGKRPDGLTLIPFERGKALIWDATVTDTLAPSNMEASASAAGSAARKAERLKTNKYAQLTDEFIFVPLVLETLGGPGPEAWSLLQKIGKRIELTTGDKRAFDFLLQRLSLAVQRGNAAAIMGTMRGCLEDKLDW

SEQ ID NO: 20530 - protein, 975 aa, Dermanyssus gallinae
MPQDASGNKAGPSHSDDPPQADYQSSLGPGTGSLTPAPLNNRVICTHCQKSFTSRGIKRHMTAAHSDTNRSLPPPASDPVDDVDGTHLRNKLVEYTKAYKRLDTIPKSARPAVAAALADTLSLVHLNNDTRSWANLLLFAHTVLRTPSRKRNNLTWATFIRDRIEDHRSGREPPSESVPRAHRSKQRNDDEAAARRATKLLGEGDIGGAARALLSVGSPVCAADAYTEMTSKHPREPADLDLPPRPPYADPPITSAELLREAVWTFPAGSTAGMDGLRPRHLRDLLATTNANIASRLLRDLGKVVDIIRSGTVPEAIRPILFGGRLVAIKKPSGSLRPIVISSVFRRIAAKITVKLGADLVREKLGAHQLGFNTPNGIEAAVHTTRAFVASAPNNFVVAKLDFKNAFNQIRRDHVLKTVLVDWPEAAPLVDQAYRSRSELSLDDKTIFSCSGVQQGDPLGPPLFCLAIKELVDSIQSPLNLWYLDDGTIGGEAPVVLADIKRVADFGLKSGLELNSEKCELIYKGHPNLSALEALLPGCKLVEAADMTLLGSPVGSAAIRPELAGKIESLRSRLTRLNLLSPHSAYHLLKSSLGSARIVHILRSTDVGPNQDLLRDLDESLRISLSDLLNLTLADNNWAQATLPLRFGGLGIRSTADLAASCHASSLHASESTVRHISPPMALQAFQDTKEVADTKFKNLAGLLPETNKHLQRSYDDLIVSMKYQRLLSDALTTADKARLRAVVQKGASKWLQAIPSSNLGTLLDHESFRLCIGLRLGTRLTEEHRCPCGTQVDIWGTHGLSCSRSEGRQSRHSEVNEITARAFRSALIPCIREPAGLLRTDGKRPDGLTLIPFERGKALVWDATITDTLAPSNLEASASSAGSAARKAERLKTNKYAQLANEFIFVPLVFETLGGPGPGAWSLLQKIGKQIKLATGEKRALEFLLQRLSLAVQRGNAAAIMGTMRGCLEDKLDW

SEQ ID NO: 20531 - protein, 865 aa, Dermanyssus gallinae
MTAAHSDTNRSLPPSASYPVDDVDGTHLRNKLVEYTKAYKRLDTIPKSARLAVAAALADTLSLVHLNNDTRSWANLLLFAHTVLRTPSRKRNNLIWATFIRNRIEDHRSGRKPPSESVPRAHRNKQRNDDEAAARRATKLLGEGDIGGAARALLSVGSPVCAADAYTEMTSKHPREPADLDLPLRPPYADPPITSAELLREAVCTFPAGSTAGMDGLRPRYLRDLLATTNANIASRLLRDLGKVVDIIRSGTVPEAIRPILFGGRLIAIKKPSGSLRPIVISSVFRRIAAKITVKLGADLVRDKLGAHQLGFNTPNGIEAAVHTTRAFVASAPNNFVVAKLDFKNAFNQIRRDHVLKTVLVDWPEAAPLVDQAYRSRSELDDKTIFSCSGVQQGDPLGPPLFCLAIKELVDSIQSPLNLWYLDDGTIGGEAPVVLADIKRVADFGLKSGLELNSEKCELIYKSHPNLSAFEALLPGCKLVEAADMTLLGSPVGSAAIRPELAGKIESLRSRLTRLNLLSPHSAYHLLKSSLGSARIVHILRSTDVGPNQDLLRDLDESLRISLSDLLNLTLADNNWAQATLPLRFGGLGIRSTADLAASCHASSLHASESTVRHISPPMALQAFQDTKEVADTKFKNLAGLLPETNKHLQRSYDDLIVSMKYQRLLSDALTTADKARLRAVVQKGASKWLQAIPSSNLGTLLDHESFRLCIGLRLGTRLTEEHRCPCGTQVDIWGTHGLSCSRTEGRQSRHSEVNEITARAFRSALIPCILEPAGLLRSDGKRPDGLTLIPFERRKALVWDATITDTLAPSNLEASASSAGSAARKAERLKTNKYAQLANEIIFVPLIFETLGGPALRNYYLHTL

SEQ ID NO: 20532 - protein, 915 aa, Dermanyssus gallinae
MTAAHSNIEHPFLPPVSNPVDNTDGTHLREKLAEYTKTYKRLDTIPKSARPAVAVALADTLSLVHQNNDAHSWANLLVFAHTVLRAPSRKQNNLSWTTYLRDRIEEHRSGSGPSPELVPRKHWNKRPNEDEAAARRATRLLGEGDIGGAARALLSVGSPVCAAEAFVEMTSKHPSEPADLDLPPRLSLAEPLVTSSEEIREAVRTFPAGSTAGMDGLRPRHLRDLIATTNTNIASRLLRDLAKVIDIIRNGTVPEAIRPIIFGGRLIAIKKPSGSFRPIVISSVFRRIAAKITVKLGTNVVCEKLGAHQLGFNTPSGIEAVVHTTRAFMSSAPNNFVAAKLDFKNAFNQVRRDHILKTVQTDWPEAAPLVDQTYRSSSELSFGERTIFSRSGVQQGDPLGPPLFCLAIKELVNSIQSPLNLWYLDDGTIGGEASVVQADIKRVLDFGQKSGLELNPEKCEIIYKGHPNIPAFEALLPGCKQVEAADMTLLGSPVGSAATHPELAGKVKSLCSRLNRLNLLNPHSAYHLLKSSLGSSRIIHFLRSTDVGANQDLLRELDNSLRTSLSDLLNLNLADNNWAQATLPLRLGGLGIRSAADLAASCHVASLYASEATVQHISPAIALQAFQDAKKAADTRFENLAGLLPEANKHLQRSYDDLIVSKKYQRLLSDALSTADKARLQAVVQKGASKWLQAIPSSNLGTLLDHESFRLCIGLRLGTRLTEEHRCPCGAQVDIWGTHGLSCNRSEGRQSRHSEINEITARALRSALLPCIREPTGLLRSDGKRPDGLTLIPFERGKALIWDATVTDTLAPSNMEASASAAGSAARKAERLKTNKYAQLTDEFIFVPLVLETLGGPGPEAWSLLQKIGKRIELTTGDKRAFDFLLQRLSLAVQRGNAAAIMGTMRDCLEDKLDW

SEQ ID NO: 20533 - protein, 1048 aa, Dermanyssus gallinae
MRPRQAEYRRAPGTTWVDLSPSRARSTRKADPLAGLTSAAKMLSGLDPQAASALRNLANLLGPVIRNLSGRNIMPQDASENKAGPSHSDNLPQTDHLSSLGSDTGNLSPAPYYNRVTCTHCQRNFTRRGIKRHMTAAHSNIEHPFLPPVSNPVDNTDGTHLREKLAEYTKTYKRLDTNPKSARPAVAVALADTLSLVHQNNDAHSWANLLVFAHTVLRVPSRKQNNLSWTTYLRDRIKEHRSGSGPSPELVPRKHWNKRPNEDNAAARRATRLLGEGDIGGAARALLSVGSPVCAAEAFVEMTSKHPSKPADLDLPPRLSHAEPLVTSSEEIREAVRTFPATSTAGMDGLRPRHLRDLIATTNTNIASRLLRDLAKVIDIIRSGTVPEAIRPIIFGGHLIAIKKPSGSFRPIVISSVFRRIAAKITVKLGTNIVCEKLGAHQLGFNTPNGIEAVVHTTRAFMSSAPNNFVAAKLDFKNAFNQVRRDHILKTVQTDWPEAAPLVDQTYRSSSELSFGERTIFSCSGMQQGDPLGPPLFCLAIKELVNSIQSPLNLWYLDDGTIGGEASVVQADIKRVLDFGQKSGLELNPQKCEIIYKGQPNISAFEALLPGCKQVEAADMTLLGSPVGSAATCPELAGKIKSLCSRLNRLNLLNPHSAYHLLKSSLGSSRIVHFLRSTDVGANQDLLWELDNSLRTSLSELLNLNLADNNWAQAPLPLRLGGLGIRSAADLAASCHVASLHASEATVQHISPAIALQAFQDAKKAADTRFENLAGQLPEANKHLQRSYDDLIVSNKYQRLLSDALSTADKARLQAVVQKGASKWLQAIPSSNLGTLLDHESFRLCIGLRLGTRLTEEHRCPCGAQVDIWGTHGLSCKRSEGRQSRHSEINEITARALKSALLPCIREPTGLLRSDGKRPDGLTLIPFERGKALIWDATVTDTLAPSNMEASASAAGSAARKAERLKTNKYAQLTDEFIFVPLVLETLGGPGPEAWSLLQKIGKQIELTTGDKRAFDFLLQRLSLAVQRGNAAAFMGTMRGCLEDKLDW

SEQ ID NO: 20534 - protein, 975 aa, Dermanyssus gallinae
MPQDASENKAGPSHSDNLPQTDHLSSLGSDTGNLSPAPHYNRVTCTHCQRNFTRRGIKRHMTAAHSNIEHPFLPPVSNPVDNTDGTHLREKLAEYTKTYKRLDTIPKSARPAVAVALADTLSLVHQNNDAHSWANLLVFAHTVLRAPSRKQNNLSWTTYLRDRIEEHRSGSGPSPELVPRKHWNKRPNEDEAAARRATRLLGEGDIGGAARALLSVGSPVCAAEAFVEMTSKHPSEPADLDLPPRLSLAEPLVTSSEEIREAVRTFPAGSTAGMDGLRPRHLRDLIATTNTNIASRLLRDLAKVIDIIRNGTVPETIRPIIFGGRLIAIKKPSGSFRPIVISSVFRRIAAKITVKLGTNVVCEKLGAHQLGFNTPSGIEAVVHTTRAFMSSAPNNFVAAKLDFKNAFNQVRRDHILKTVQTDWPEAAPLVDQTYRSSSELSFGERTIFSRSGVQQGDPLGPPLFCLAIKELVNSIQSPLNLWYLDDGTIGGEASVVQADIKRVLDFGQKSGLELNPEKCEIIYKGHPNIPAFEALLPGCKQVEAADMTLLGSPVGSAATHPELAGKIKSLCSRLNRLNLLNPHSAYHLLKSSLGSSRIIHFLRSTDVGANQDLLRELDNSLRTSLSDLLNLNLADNNWAQATLPLRLGGLGIRSAADLAASCHVASLYASEATVQHISPAIALQAFQDAKKAADTRFENLAGLLPEANKHLQRSYDDLIVSKKYQRLLSDALSTADKARLQAVVQKGASKWLQAIPSSNLGTLLDHESFRLCIGLRLGTRLTEEHRCPCGAQVNIWGTHGLSCNRSEGRQSRHSEINEITARALRSALLPCIREPTGLLRSDGKRPDGLTLIPFERGKALIWDATVTDTLAPSNMEASASAAGSAARKAERLKTNKYAQLTDEFIFVPLVLETLGGPGPEAWSLLQKIGKRIELTTGDKRAFDFLLQRLSLAVQRGNAAAIMGTMRGCLEDKLDW

SEQ ID NO: 20535 - protein, 967 aa, Dermanyssus gallinae
MYIHTACTYLPQTDHLSSLGSDTGNLSPAPHYNRVTCTHCQRNFTRRGIKRHMTAAHSNIEHPFLPPVSNPVDNTEGTHLREKLAEYTKTYKRLDTIPKSARPAVAVALADTLSLVHQNNDAHSWANLLVFAHTVLRVPSRKQNNLSWTTYLRDRIKEHRSGSGPSPELVPRKHWNKRPNEDNAAARRATRLLGEGDIGGAAKAQLSVGSPVCAAEAFVEMASKHPSEPADLDLPPRLSHAEPLVTSSEEIREAVRTFPAGSTAGMDGLRLRHLRDLIATTNTNIASRLLRDLAKVIDIIRSGTVPEAIRPIIFGGRLIAIKKSSGSFRPIVISSVFRRIAAKITVKLGTNIVCEKLGAHQLGFNTPNGIEAVVHTTRAFMSSAPNNFVAAKLDFKNAFNQVRRDHILKTVQTYWPEAAPLVDQTYRSSSELSFGERKIFSCSGMQQGDPLGPPLFCLAIKELVNSIQSPLNLWYLDDGTNGGEASVVQADIKRVLDFGQKSGLELNRQKCEIIYKGQPNISAFEALLPGCKQVEAADMTLLGSPVGSAATRPELAGKIKSLCSRLNRLNLLNPHSAYELLKSSLGSSRIVHFLRSTDVGANQDLLWELDNSLRTSLSDLLNLNLADNNWAQATLPLRLGGLGIRSAADLAASCHVASLHASEATVQHISPAIALQAFQDAKKAADTRFENLAGQLPEANKHLQRSYDDLIVSKKYQRLLSDALSTADKARLQAVVQKGASKWLQAIPSSNLGTLLDHKSFRLCIGLRLGTRLTEEHRCPCGAQVDIWGTHGLSCNRSEGRQSRHSEINEITARALRSALLPCIREPTGLLRSDGKRPDGLTLIPIERGKALIWDATVTDTLAPSNMEASASAAGSAARKAERLKTNKYAQLTDEFIFVPLVLETLGGPGPEARSLLQKIGKRIELTTGDKRAFDFLLRRLSLAVQRGNAAAIMGTMRGCLEDKLDW

SEQ ID NO: 20536 - protein, 893 aa, Dermanyssus gallinae
MAPTCTTNLSSTQRHTYKRLDTIPKSARPAVAAALADTLSLVHLNNDTRSWANLLLFAHTVLRTPSRKRNNLTWATFIRDRIEDHRSGREPPSESVPRAHRNKQRNDDEAAARRATKLLGEGDIGGAARALLSVGSPVCAANAYTEMTSKHPREPADLDLPPRPPCADPPITSAELLREAVWTFPAGSTAGMDGLRPRHLRDLLATTNANIASRLLRDLGKVVDIIRSGTVPEAIRPILFGGRLIAIKTPSGSLRPIVISSVFRRIAAKITVKLGADLVREKLGDHQLGFNTPNGIEAAVHTTRAFVASAPNNFVVAKLDFKNAFNQIRRDHVLKTVLVDWPEAAPLVDQAYRSRSELSLDDKTIFSCSGVQQGDPLGPPLFCLAIKELVDSIQSPLNLWYLDDGTIGGEAPVVLADIKRVADFGLKSGLELNSEKCELIYKGHPNLSALEAPLPGCKLVEAADMTLLGSPVGSAAIRPELAGRIESLRSRLTRLNLLSPHSAYHLLKSSLGSARIVHILRSTDVGPNQDLLRDLDESLKNSLSDLLNLTLADNSWAQATLPLRFGGLGIRSTAGLAASCHASSSHASESFVRHISPPMALQAFQDTKEVADTKFKNLAGLLPETNKHLQRSYDDLIVSMKYQRLLSDALTTADKARLRAVVQKGASKWLQAIPSSNLGTLLDHESFRLCIGLRLGTRLTEEHRCPCGTQVDIWGTHGLSCSRSEGRQSRHSEVNEITAKAFRSALIPCIREPAGLLRSDGKRPDGLTLIPFERGKALVWDATITDTLASSNLEASASSAGSAARKAERLKTNKYAQLANEFIFVPLVFETLGGPGPEAWSLLQKIGKQIELATGEKRALEFLLQRLSLAVQRGNAAAIMGTMRGCLEDKLDW

SEQ ID NO: 20537 - protein, 975 aa, Dermanyssus gallinae
MPQDATENKAGPSHSDNLPQTDHLSSFGSGTGNLSPAPHYNRVTCTHCQRNFTRRGIKRHMTAAHSNIEHPFLPPVSNPVDNTDGTHLREKLAEYTKTYKRLDTIPKSARPAVAVALADTLSLVHQNNDAHSWANLLVFAHTVLRAPSRKQNNLSWTTYLRDRIEEHRSGSGPSPELVPRKHWNKRPNEDKAAARRATRLLGEGDIGGAARALLSVGSPVCAAEAFVEMTSKHPSEPADLDLPPRLSHAEPLVTSSEEIREAVRTFPAGSTAGMDGLRPRHLRDLIATTNTNIASRLLRDLAKVIDIIRNGTVPEAIRPIIFGGRLIAIKKPSGSFRPIVISSVFRRIAAKITVKLGTNIVCEKLGAHQLGFNTPNGIEAVVHTTRAFMSSAPYNFVAAKLDFKNAFNQVRRDHILKTVQTDWPEAAPLVDQTYRSSSELSFGERTIFSRSGVQQGDPLGPPLFCLAIKELVNSIQSPLNLWYLDDGTIGGEASVVQADIKRVLDFGQKSGLELNPQKCEIIYKGHPNISAFEALLPGCKKVEAADMTLLGSPVGSAATHPELAGKIKSLCSRLNRLNLLNPHSAYHLLKSSLGSSRIIHFLRSTDVGANQDLLRELDNSLRTSLSDLLNLNLADNNWAQATLPLRLGGLGIRSAADLAASCHVASLHASEATVQHISPAIALQAFQDAKKAADTRFENLAGLLPEANKHLQRSYDDLIVSKKYQRLLADALSTADKARLQAVVQKGASKWLQAIPSSNLGTLLDHESFRLCIGLRLGTRLTEEHRCPCGAQVDIWGTHGLSCNRSEGRQSRHSEINEITARALRSALLPCIREPTGLLRSDGKRPDGLTLIPFERGKALIWDATVTDTLAPSNMEASASAAGSAARKAERLKTNKYAQLTDEFIFVPLVLETLGGPGPEAWSLLQKIGKRIELTTGDKRAFDFLLQRLSLAVQRGNAAAIMGTMRGCLEDKLDW

SEQ ID NO: 20538 - protein, 975 aa, Dermanyssus gallinae
MPQDASENKAGPSHSDNLPQTDHLSSFGSGTGNLSPAPHYNRVTCTHCQRNFTRRGIKRHMTAAHSNIEHPFLPPVSNPVDNTDGTHLREKLAEYTKTYKRLDTIPKSARPAVAVALADTLSLVHQNNDAHSWANLLVFAHTVLRAPSRKQNNLSWTTYLRDRIEEHRSGSGPSPELVPRKHWNKRPNEDKAAARRATRLLGEGDIGGAARALLSVGSPVCAAEAFVEMTSKHPSEPADLDLPPRLSHAEPLVTSSEEIREAVRTFPAGSTAGMDGLRPRHLRDLIATTNTNIASRLLRDLAKVIDIIRNGTVPEAIRPIIFGGRLIAIKKPSGSFRPIVISSVFRRIAAKITVKLGTNIVCEKLGAHQLGFNTPNGIEAVVHTTRAFMSSAPYNFVAAKLDFKNAFNQVRRDHILKTVQTDWPEAAPLVDQTYRSSSELSFGERTIFSRSGVQQGDPLGPPLFCLAIKELVNSIQSPLNLWYLDDGTIGGEASVVQADIKRVLDFGQKSGLELNPQKCEIIYKGHPNISAFEALLPGCKQVEAADMTLLGSPVGSAATHPELAGKIKSLCSRLNRLNLLNPHSAYHLLKSSLGSSRIIHFLRSTDVGANQDLLRELDNSLRTSLSDLLNLNLADNNWAQATLPLRLGGLEIRSAADLAASCHVASLHASEATVQHISPAIALQAFQDAKKAADTRFENLAGLLPEANKHLQRSYDDLIVSKKYQRLLADALSTADKARLQAVVQKGASKWLQAIPSSKLGTLLDHESFRLCIGLRLGTRLTEEHRCPCGAQVDIWGTHGLSCNRSEGRQSRHSEINEITARALRSALLPCIREPTGLLRSDGKRPDGLTLIPFERGKALIWDATVTDTLAPSNMEASASAADSAARKAERLKTNKYAQLTDEFIFVPLVLETLGGPGPETWSLLQKIGKRIELTTGDKRAFDFLLQRLSLAVQRGNAAAIMGTMRGCLEDKLDW

SEQ ID NO: 20539 - protein, 975 aa, Dermanyssus gallinae
MPQDASENKAGPSHSDNLPQTDHLSSLGSDTGNLRPAPHYNRVTCTHCQRKFTRRGIKRHMTAAHSNIEHPFLPPVSNPVDNTDGTHLREKLAEYTKTYKRLDTIPKSARPAVAIALADTLSLVHQNNDAHSWANLLVFAHTVLRAPSRKQNNLSWTTYLRDRIKEHRSGSGPSPELVPRKHWNKRPNEDEAAARRATRLLGEGDIGGAARALLSVGSPVCAAEAFLEMTSKHPSEPADLDLPPRLSLAEPLVTSSEEIREAVRTFPAGSTAGMDGLRPRHLRDLIATTNTNIASRLLRDLAKVIDIIRNGTVPEAIRPIIFGGRLIAIKKPSGSFRPIVISSVFRRIAAKITVKLGTNIVCEKLGAHQLGFNTPSGIEAVVRTTRAFMSSAPNNFVAAKLDFKNAFNQVRRDHILKTVQTDWPEAAPLVDQTYRSSSELSFSERTIFSRSGVQQGDPLGPPLFCLAIKELVNSIQSPLNLWYLDDGTIGGEASVVQADIKRVLDFGQKSGLELNPQKCEIIYKGHPNIPAFEALLPGCKQVEAADMTLFGSPVGSSATHPELAGKIKSLCSRLNRLNLLNPHSAYHLLKSSLGSSRIIHFLRSTDVGANQDLLRELDNSLRTSLSDLLNLNLADNNWAQATLPLRLGGLGIRSAADLAASCHVASLYASEATVQQISPAIALQAFQDAKKAADTRFENLAGLLPEADKHLQRSYDDLIVSKKYQRLLSDALSTADKARLQAVVQKGASKWLQAIPSSNLGTLLDHESFRLCIGLRLGTRLTEEHRCPCGAQVDIWGTHGLSCNRSEGRQSRHSEINEITARALRSALLPCIREPTGLLRSDGKRPDGLTLIPFERGKALIWDATVTDTLAPSNMEASASAAGSAARKAERPKTNKYAQLTDEFIFVPLVLETLGGPGPEAWSLLQKIGKRIELTTGDKRAFDFLLQRLSLAVQRGNAAAIMGTMRGCLEDKLDW

SEQ ID NO: 20540 - protein, 975 aa, Dermanyssus gallinae
MPQDASENKAGPSHSDNLPQTDHLSSLGSDTGNLSPAPHYNRVTCTHCQRNFTRRGIKRHMTAAHSNIEHPFLPPVSNPVDNTDGTHLREKLAEYTKTYKRLDTIPKSARPAVAVALADTLSLVHQNNDAHSWANLLVFAHTVLRAPSRKQNNLSWTTYLRDRIEEHRSGSGPSPELVPKKHWNKQPNEDKAAARRATRLLGEGDIGGAARALLSVGSPVCAAEAFVEMTSKHPNEPADLDLPPRLSNAEPLVTSSEEIREAVRTFPAGSTAGMDGLRPRHLRDLIATTNTNIASRLLRDLAKVINIIRNGTVPEAIRPIIFDGRLIAIKKPSGSFRPIVISSVFRRIAAKITVKLGTNIVCEKLGAHQLGFNTPNGIEAVVHTTKAFMSSAPNNFVAAKLDFKNAFNQVRRDRILKTVQTDGPEAAPLVDQTYRSSSELSFGERTIFSRSGVQQGDPLGPPLFCLAIKELVNSIQSPLNLWYLDDGTIGGEASVVQADIKRVLDFGQKSGLELNPQKCEIIYKGHPNISAFEALLPGCKQVKAADMTLLGSPVGSAATHPELTGKIKSLCSRLNRLNLLNPHSAYHLLKSSLGSSRIIHFLRSTDIGANQDLLRELDNSLRTSLCDLLNLNLADNNWAQATLPLRLGGLEIRSAADLAASCHVASLHASEATVQHISPTIALQAFQDAKKAADTRFENLAGLLPEANKHLQRSYDDLIVAKKYQRSLSDALSTADKARLQAVVQKGASKWLQAIPSSNLGTLLDHESFRLCIGLRLGTRLTEEHRCPCRAQVDIWGTHGLSCNRSEGRQSRHSEINEITARALRSALLPCVREPTGLLRSDGKRPDGLTLIPFEREKALIWDATVTDTLAPSNMEASASAAGSAARKAERLKTNKYAQLTDEFIFVPLVLETLGGPGPEAWSLLQKIGKRIELTTGDKRAFDFLPQRLSLAVQRGNAAAIMGTMRGCLEDKLDW

SEQ ID NO: 20541 - protein, 973 aa, Dermanyssus gallinae
MPQGRLRNRPSHSDNLPQTDHLSSLGSDTENLSPAPHYNRVTCTHCQRNFTRRGIKRHMTAAHSNIEHPFLPPVSNPVDNTDGTHLRKKLAEYTKTYKRLDTIPKSARPAVAVALADTLSLVHQNNDAHSWANLLVFAHTVLRAPSRKQNNLSWTTYLRDRIEEHRSGSRPSPELVPRKHWNKRPNEDETAARRATRLLGEGDIGGAARALLSVGSPVCAAEAFVEMTSKHPSEPADLDLPPRLSLAEPLVTSSEEIREAVRTFPAGSTAGMDGLRPRHLRDLIATTNTNIASRLLRDLAKVIDIIRNGTVPEAIRPIIFGGRLIAIKKPSGSFRPIVISSVFRRIAAKITVKLGTNIVCEKLGAHQLGFNTPNGIEAVVHTTRAFMSSAPNNFVAAKLDFKNAFNQVRRDHILKTVQTDWPEAAPLVDQTYRSSSELSFGERTIFSRSGVQQGDPLGPPLFCLAIKELVNSIQSPLNLWYLDDGTIGGEASVVQADIKRVLDFGQKSGLELNPQKCEIIYKGHPNIPAFEALLPGCKQVEAADMTLLGSPVGSAATHPELAGKIKSLCSRLNRLNLLNPHSAYHLLKSSLGSSSIIHFLRSTDVGANQDLLRELDNSLRTSLSDLLNLNLADNNWAQATLPLRLGGLGIRSAADLAASCHVASLYASEATVQHISPAIALQAFQDAKKAADTRFENLAGLLPEANKHLQRSYDDLIVSKKYQRLLSDALSTADKARLQAVVQKGASKWLQAIPSSNLGTLLDHESFRLCIGLRLGTRLTEEHRCPCGAQVDIWGTHGLSCNRSEGRQSRHSEINEITARALRSALLPCIREPTGLLRSDGKRPDGLTLIPFERGKALIWDATVTDTLAPSNMEASASAAGSAARKAERLKTNKYAQLTDEFIFVPLVLETLGGPGPEAWSLLQKIGKRIELTTGDKRAFDFLLQRLSLAVQRGNAAAIMGTMRDCLEDKLDW

SEQ ID NO: 20542 - protein, 899 aa, Dermanyssus gallinae
MTAAHSGTDRSLLPPASYPVDDVDGTHLRNKLVEYTKAYKRLDTIPKSARPAVAAALADTLSLVHLNNDTRSWANLLLFAHTVLRTPSRKRNNLTWATFIRDRIEDHRSGREPPSESVPRAHRNKQRNDDEAAARRATKLLDEGDIGGAVRALLSVGSPVCAADAYTEMTSKHPREPADLDLPPRPPYADPPITSAELLREAVWTFPAVSTAGMDGLRPRHLRDLLATTNANIASRLLRDLGKLVDIIRSGTVPEAISPILFGGGLIAIKKSSGSLRPIVIFSVFRRIAAQITVKLGADLVREKLRAHQLGFNTPNGIEAAVHTTKAFVASAPNNFVVAKLDFKNAFNQIRRDHVLKTVLVDWPEAAPLVDQAYSSRSELSLDDKTIFSCSGVQQGDPLGPPLFCLAIKGLVDSIQSPLNLWYLDDGTIGGEAPVVLADIKRVADFGLKSGLELNSEKCELIYKGHPNLSALEALLPGSKLVEAADMTLLGSPVRSAAIRPELASRIESLRSRLTRLNLLSPHSAYHLLKSSLGSARIVHILRSTDVGPNQDLLRDLDESLRISLSDLLNLTLADNNWAQATLPLRFGGLGIRSTADLAASCHASSLHASESTVRHISPPMALQAFQDTKEVADTKFKNLAGLLPETNKHLQRSYDDLIVSVKYQRLLSDALTTADKARLRAVVQKGASKWLQAIPSSNLGTLLDHKSFRLCIGLRLGTRLTEEHRCPCGTQVDIWGTHGLSCSRSEGRQSRHSEVNEITARAFRSALIPCIRKPAGLLRSNGKRPDDLTLIPFERGKALVWDATITDTLALEASASSAGSAARKAERLKINKYAQLANEFIFVPLVFETLGGAGPEAWSLLQKIVLANKLNWRQGKKEHLSFYFSDYRWQFNAAMRQQ

SEQ ID NO: 20543 - protein, 961 aa, Morbakka virulenta
MMMIIIIIIIIISSSNDVIKKILAENEMDITSLNNLLYATAFVTTELCGSKIKTSGRNVNKKLAWQEKIRKQINMLRSDIEILININSPNKRVRKSKTEKLKSKYNITHESDINMIVETIKQTIQAKSARIRRFEKRSRFYKDNNMFKNNPKKFYRSIGKNPIKVNTPPNKDQIENFWTKIWAEEKVHDINAPWIERQAKMLEEVQEQTWNNVSPEDLQSALRKSSKWKAPGKDKIPNFWLNSLSASHAKLTTLYNTIILEPENIPPWLVNGITYLHPKSDETDNPKNYRPITCLTTMYKILTSILTEYTYSFLTDNNLFPNEQKGCKRGSYGCKDQLLINKMILEDCHNNHKNLSVAWIDYKKAFDSVPHSWIEKCLEMYHISPVIRNFLSRSMKLWKTTVILNSEKGSINAGDININSGIFQGDSLSPILFCVALFPLSTLLNESESGYKIFDKIINHLLYMDDLKLFAKNDSQLNGLLNIVAQFSEDIRMEFGLDKCAKATFIRGKLLQTFNVTLNRNIEIRELNQEEAYKYLGISEGDGINHSAMREKIRKECYRRVRSILKSELNARNRIDAINSLAIPVVTYSFNVINWSIGEIKKVDTKIRKLLTIHRMHHPKADVDRLYLPRKEGGRGMIQLELSLMTSTIGLCTYLNNSKDWMLKLVVKHEKRKKLFSISNDACKFQDTLRIESVNLQSKVVVDKPIEIARNAKLNAKSKGLKILAEKWGNKALHGQYLNRANDKDISKYQTHQWLASSGLKSETEGYIIAAQDQCLKTRNFQANVLKTGADPTCRICDQHKETIDHIVSACPILAPTEYQKRHDRVGQYIHWMLCKKFELPHDKYWWEHKPLCVTENNFITILWDFSIQTDRTIQANRPDIVIKNHEDKTCFLIDMSIPADSNTSLKIFEKLSKYKDLEIEITKMWHLKTTTIPVVVGALGMVSKNTQYYIDQIPGNISLS

SEQ ID NO: 20544 - protein, 854 aa, Morbakka virulenta
MSDRKSLPKIQNSKKNQRIISSSNAVIKKILAENEMDITSLNNLLYATAFVTTELCGSKIKASGRNVNKKPAWQEKIRKQINMLRSDIEILININSPNKRVRKSKTEKLKSKYNITHESDINMIVETIKQTIQAKSARIRRFEKRSRFYKDNNMFKNNPKNFYRSVGKNPIKVNTPPNIDQIENFWTKIWAEEKVHDINAPWIERQAKMLEEVQEQTWNNVSPEDLQSALRKSSKWKAPGKDKIPNFWLNSLSASHAKLTTLYNTIILEPENIPPWLVNGITYLHPKSDETDNPKNYRPITCLTTMYKILTSILTEYTYSFLTDNNLFPNEQKGCKRGSYGCKDQLLINKMILEDCHNNHKNLSVAWIDYKKAFDSVPHSWIEKCLEMYHISPVIRNFLSRSMKLWKTTVILNSEKGSINAGDININSGIFQGDSLSPILFCVALFPLSTLLNESESGYKIFDKIINHLLYMDDLKLFAKNDSQLNGLLNIVAQFSEDIRMEFGLDKCAKATFIRGKLLQTFNVTLNRNIEIRELNQEEAYKYLGISEGDGINHSAMREKIRKECYRRVRSILKSELNARNRIDAINSLAIPVVTYSFNVINWSIGEIKKVDTKIRKLLTIHRMHHPKADVDRLYLPRKEGGRGMIQLELSLMTSTIGLCTYLNNSKDWMLKLVVKHEKRKKLFSISNDACKFQDTLRIESVNLQSKVVVDKPIEIARNAKLNAKSKGLKILAEKWGNKALHGQYLNRANDKDISKYQTHQWLASSGLKSETEGYIIAAQDQCLKTRNFQANVLKTGADPTCRICDQHKETIDHIVSACPILAPTEYQKRHDRVGQYIHWMLCKKFELPHDKYW

SEQ ID NO: 20545 - protein, 891 aa, Morbakka virulenta
MSDRKSLPKIQNSKKNQRIISSSNAVIKKILAENEMDITSLNNLLYATAFVTTELCGSKIKASGRNVNKKPAWQEKIRKQINMLRSDIEILININSPNKRVRKSKTEKLKSKYNITHESDINMIVETIKQTIQAKSARIRRFEKRSRFYKDNNMFKNNPKNFYRSVGKNPIKVNTPPNIDQIENFWTKIWAEEKVHDINAPWIERQAKMLEEVQEQTWNNVSPEDLQSALRKSSKWKAPGKDKIPNFWLNSLSASHAKLTTLYNTIILEPENIPPWLVNGITYLHPKSDETDNPKNYRPITCLTTMYKILTSILTEYTYSFLTDNNLFPNEQKGCKRGSYGCKDQLLINKMILEDCHNNHKNLSVAWIDYKKAFDSVPHSWIEKCLEMYHISPVIRNFLSRSMKLWKTTVILNSEKGSINAGDININSGIFQGDSLSPILFCVALFPLSTLLNESESGYKIFDKIINHLLYMDDLKLFAKNDSQLNGLLNIVAQFSEDIRMEFGLDKCAKATFIRGKLLQTFNVTLNRNIEIRELNQEEAYKYLGISEGDGINHSAMREKIRKECYRRVRSILKSELNARNRIDAINSLAIPVVTYSFNVINWSIGEIKKVDTKIRKLLTIHRMHHPKADVDRLYLPRKEGGRGMIQLELSLMTSTIGLCTYLNNSKDWMLKLVVKHEKRKKLFSISNDACKFQDTLRIESVNLQSKVVVDKPIEIARNAKLNAKSKGLKILAEKWGNKALHGQYLNRANDKDISKYQTHQWLASSGLKSETEGYIIAAQDQCLKTRNFQANVLKTGADPTCRICNQHKETIDHIVSACPILAPTEYQKRHDKVGQYIHWMLCKKFELPHDKYWWEHKPLCVTENNFITILWDFSIQTDRTIQANRPDIVI

SEQ ID NO: 20546 - protein, 1055 aa, Morbakka virulenta
MDSNKLANMRRNIISTKVFSEIEIDQIKEKIREHHQKHDTCATVPATPVPLQEPNEHPNLQPKSEEVPNEDPNEDPNELNKNDEVDQNLKDVILSEWLKIAETDMSDRKSLPKIQNSKKNQRIISSSNAVIKKILAENEMDITSLNNLLYATAFVTTELCGSKIKASGRNVNKKPAWQEKIRKQINMLRSDIEILININSPNKRVRKSKTEKLKSKYNITHESDINMIVETIKQTIQAKSARIRRFEKRSRFYKDNNMFKNNPKNFYRSVGKNPIKVNTPPNIDQIENFWTKIWAEEKVHDINAPWIERQAKMLEEVQEQTWNNVSPEDLQSALRKSSKWKAPGKDKIPNFWLNSLSASHAKLTTLYNTIILEPENIPPWLVNGITYLHPKSDETDNPKNYRPITCLTTMYKILTSILTEYTYSFLTDNNLFPNEQKGCKRGSYGCKDQLLINKMILEDCHNNHKNLSVAWIDYKKAFDSVPHSWIEKCLEMYHISPVIRNFLSRSMKLWKTTVILNSEKGSINAGDININSGIFQGDSLSPILFCVALFPLSTLLNESESGYKIFDKIINHLLYMDDLKLFAKNDSQLNGLLNIVAQFSEDIRMEFGLDKCAKATFIRGKLLQTFNVTLNRNIEIRELNQEEAYKYLGISEGDGINHSAMREKIRKECYRRVRSILKSELNARNRIDAINSLAIPVVTYSFNVINWSIGEIKKVDTKIRKLLTIHRMHHPKADVDRLYLPRKEGGRGMIQLELSLMTSTIGLCTYLNNSKDWMLKLVVKHEKRKKLFSISNDACKFQDTLRIESVNLQSKVVVDKPIEIARNAKLNAKSKGLKILAEKWGNKALHGQYLNRANDKDISKYQTHQWLASSGLKSETEGYIIAAQDQCLKTRNFQANVLKTGADPTCRICDQHKETIDHIVSACPILAPTEYQKRHDRVGQYIHWMLCKKFELPHDKYWWEHKPLCVTENNFITILWDFSIQTDRTIQANRPDIVIKNHQDKTCFLIDMSIPADSNTSLKIFEKLSKYKDLEIEITKMWHLKTTTIPVVVGALGMV

SEQ ID NO: 20547 - protein, 938 aa, Pissodes strobi
MQTNIAIKEELVTCNTLEETCHLIYCAAITVIEVLGNPLKTKNRYQNQHNTNKQPPWAKRIQSRINKFRKEIGRIYTYLNSPSPSPRVQKLMKILCKKIKVKYNLPEAKARLTSYMEDLKQKIKMLGSRIRRYQERTNRYKENRLFQENQKLFYRLLGEKKATANASQPATQEQMHQYWSQLWENPKEHNRNAYWINNEAERMAQTQQMADIEIATVDVENALKNVANWKAPGTDKIHAYWWKSFGSIHETLANQLNEALKDPSKIPPYSTKGITYLLPKNNNVENPQNYRPITCLPIVYKILTGILEQKIKNHLNEHHILAWQQNGSKAGARGCKEWLILDSVVTNHAKTKKRNLSVAWIDYRKAFDSVPHSWLLQVLDIYKINKIVITFLTSIMSTWETYLNVNVGDIQYTTAGVKIKRGIFQGDSLSPLWFCVALNPLSNMLEDSNFGYILSRRSNIILSHLLYFDDLKLYGANFDQLKGQLEIVASFSKAISMDFGLEKCAFVHVKAGKVQETENITLMDHNQFTPLPLDEKYKYLGMQQALNIEQTETKRLVETALKNRLQLILRSNLYSLAKVTAINTWVLPIVTYSFGIVKWSTTDLDTLDRFVRTSLTKNRLHHPNASVNRLYLPRSRGGRGIRNLKEAHNRECEKLFNYLKSKAHPTYRAITIMDTSMTPLKLANTDPPVKENKNYFTELEEVWRSKELHGRFATSLNSQNVDSQFSTLYLTSGTLFMETEGFLLAIQDQVINTRNYRRFILHQDIPSDRCRLCQEKPETIQHLLAGCSYLAPRDHKKRHDDVAKVFHQAICKKYDLLTDLKPYYKYIPKDQVEDNQTKVYWDRAIITDREILHNKPDILVIRKQEKVARIIDITIPTDQNIREAKNQKITKYIDLVISDTGLVENNLKKEMERYQAIDPHRSESCSPGHVDGHANSQV

SEQ ID NO: 20548 - protein, 958 aa, Pissodes strobi
MQTNIAIKEELVTCNTLEETCHLIYCAAITVIEVLVNPLKTKNRYQNQNNTNKQPPWAKRIQSRINKFRKEIGRIHTYLNSPSPSPRVQKLMKILCKKIKVKYNLPEAKARLTSYMEDLKQKIKMLGSRIRRYQERTKRYKENRLFQENQKLFYRLLGGKKATANASQPATQEQMHQYWSQLWENPKEHNRNAYWINNEAERMTQTQQMADIEIATVDVENALKNVANWKAPGTDKIHAYWWKSFGSIHETLANQLNEALKDPSKIPPYFTKGITYLLPKNNNVENPQNYRPITCLPIVYKILTGILEQKIKNHLNEHHILAWQQNGSKARARGCKEWLILDSVVTNHAKTKKRNLSVAWIDYRKAFDSVPHSWLLQVLNKIVITFLTSIMSTWETYLNVNVGDIQYTTAGVKIKRGIFQGDSLSPLWFCVALNPLSNMLEESNFGYILSRRSNIILSHLLYFDDLKLYGANFDQLKGQLEIVASFSKAICMDFGLEKCAFVHVKAGNVQETENITLMDHNQFTPLPLDEKYKYLGMQQTLNIEQTETKRLVETALKNRLQLILRSNLYSLAKVTAINTWVLPIVTYSFGIVKWSSTDLDNLDRFVRTSLTKNRLHHPNASVNRLYLPRSRGGRGIRNLKETHNRECEKLFNYLKSKAHPTYRAITIMDTSMTPLKLANTDPPVKENKNYFTELEEVWRSKELHGRFATSLNSQNVDSQFSTLYLTSGTLFMETEGFLLAIQDQVINTRNYRRFILHQDIASDLCRLCQQKPETIQHLLAGCSYLAPRDHKKRHDDVAKVFHQAICKKYDLLTDLKPYYKYVPKDLVEDNQTKVYWDRAIITDREILHNKPDILVIRNQEKVARIIDITIPTDHNIREARNQKITKYIDLSHELKAIYQLDQVTIHPLVISATGLVENNLKKEMEKMGMGNIKQLILTAQKAAVLGTCRTVRRTLTHD

SEQ ID NO: 20549 - protein, 1102 aa, Pissodes strobi
MRWNRQDNIDLMRAYYFVTNAGQDKTNYRTRLHERWQYVRQDLRREPQQLSDQVRSIMRRKVLTEAELEQLKIETRQPQQQQQQQQVNQNNINDERRGSIPAQRGSTIFEKQPERTPGEILNTLRENRVKYAGITLTDRPALPRLRYSKTSKETVMQTNIAIKEELVTCNTLEETCHLIYCAAITVIEVLGNPLKTKNRYQNQNNTNKQPPWAKRIQSRINKFRKEIGRIHTYLNSPSPSPRVQKLMKILCKKIKVKYNLPEAKARLTSYMEDLKQKIKMLGSRIRRYQERTNRYKENRLFQENQKLFYRLLGEKKATANASQPATQEQMYQYWSQLWENPKEHNRNAYWINNEAERMAQTQQMADIEIATVDVENALKNVANWKAPGTDKIHAYWWKSFGSIHETLANQLNEALKDPSKIPPYFTKGITYLLPKNNNVENPQNYRPITCLPIVYKILTGILEQKIKNHLNEHHILAWQQNGSKAGARGCKEWLILDSVVTNHAKTKKRNLSVAWIDYRKAFDSVPHSWLLQVLDIYKINKIVITFLTSIMSTWETYLNVNVGDIQYTTAGVKIKRGIFQGDSLSPLWFCVALNPLSNMLEESNFGYILSRRLLYGANFDQLKGQLELVASFSKAISMDFGLEKCAFVHVKAGKVQETENITHMDHNQFTPLPLDEKYKYLGMQQTLNIEQTETKRLVETALKNRLQLILRSNLYSLAKVTAINTWVLPIVTYSFGIVKWSTTDLDTLDRFVRTSLTKNRLHHPNASVNRLYLPRSRGGRGIRNLKEAHNRECEKLFNYLKSKAHPTYRAITIMDTSMTPLKLANTDPPVKENKNYFTELEEVWRSKELHGRFATSLNSQNVDSQFSTLYLTSGTLFMETEGFLLAIQDQVINTRNYRRFILHQDIPSDRCRLCQEKPETIQHLLAGCSYLAPRDHKKRHDDVAKVFHQAICKKYDLLTDLKPYYKYVPKDQVEDNQTKVYWDRAIITDREILHNKPDILVIRNQEKVARIIDITIPTDHNIREARNQKITKYIDLSHELKAIYQLDQVTIHPLVISATGLVENNLKKEMEKMGMGNIKQLILTAQKAAVLGTCRTVRHTHT

SEQ ID NO: 20550 - protein, 979 aa, Pyrgus malvae
MQFVSRINNNESLLRCPICAGDRVFKGPRGLKIHCSRMHVPRVDVSVNQTLISAANTGADGDRSNDPIHKRLAYFKKNIKLVKRIPKGARLTVARSLTECIAKVVSENTTNAWHDLLTFAYKILNIENRSTKISLAKLIKQNSAKNIIPSIQTTPKPYNNLESNSHIKLKIVENKLSEGNTKGAIKILFSDDSLAAHSPETLDALCEKHPTTSASPTRGTDQEHISLRVAEEATDRAIRSFSNGSAGGLDGISPQHLKDLTDPFLGDVRKDLLRELTSLLNLMLAGRVPSDITPILYGANLVALKKKDGGIRPIAVGSTLRRLASKLCCREYRERLTQRFKPRQLGFGVNGGCEAAVHAARSFLQQQNFEVFVKIDVKNAFNSVDRGAILSEIQKEVPEIFEYMWQCYGTPSKLLFGDNVIESCVGCQQGDPLGPVIFSLAIQPIINQLNSKFNAWYLDDGSLGGTASSVLEDLDIIIRRFDDIGLSLNFNKCEILFSDKLSTDKISSLLEQFNIITPNISVMKKENLILLGAPIFDEAVSPIINSKLENFNLISRRLFDLKPHMAMYILRLCLFAPKFMYLLRCCPFWKFHSITNILDSTLKDTLSKILNLKFDDRSWMQATLPINFGGLGVRTSESLALPAFLASCHSVLALISSILNSPIEDVWVAYLTEATEVWRASFPDEDINNMSRNKQSAWDIPAVKSVYACLLERCSRGVDRARLLAVAESESGHWLRALPSKNIGTVLDPSTFRIVVGLRLGAKICEPHLCPCGQPVDRFGRHGLSCTRSAGRLYRHGTLNDLVRRALVTASLPATLEPTGLSRSDGKRPDGITLVPWHLGRPLVWDVTCVDTLAPSHICDTAERAGSAADQAQLLKRRKYSNLSDNYLFAALAVETLGPWSSDMKKFMSEMSSKLVLACGDPRAGEYFAQRLSLAVQRGNAASVLGAMPNTDILEEVFLFIIFLFVISFNVQFFLLVNS

SEQ ID NO: 20551 - protein, 960 aa, Mellicta athalia
MQFINSSNNNESLLRCPICDGDRVFRGPRGLKIHCSRMHVPRVDVSVNQTIFSAADTGTDGDRSNDPIHTRLAYFKKNIKLVKRIPKGARLTVARSLTECIAKVVSENSTNAWYDLLTFAYKILNIGNRSAKISLTNLIKQNSTNKIIPLIQTAPKFNSNFETNSSNKLKIVENKLSEGDTKGAIKLLFSDDSLAVHSPDTLGALREKHPTTAASPTRGTDHKQISLRVTEEATDRAIRSFSNGSAGGLDGISPQHLKDLTDPFLGDVRKDLLRELTSLLNLMLAGRVPSDITPILYGANLVALKKKDGGIRPIAVGCTLRRLASKLCCREYRERLTQRFKPRQLGFGVNGGCEAAVHAARSFLLHQNFDVFVKIDVKNAFNSVDRGALLSEIQKEVPEIFEYMWQCYGTPSKLLFGDNIIESCVGCQQGDPLGPVIFSLAIQPIIDELNSKFNVWYLDDGSLGGTASSVLEDLDIIIRRFDQIGLSLNFNKCEILFSDNLSTEKITSLSQQFNIITPNISIMKKENLLLLGAPIFFEAFSPIINSKLENFNLISGRLFDLKPHMATYILRLCLFAPKFIYLLRCCPFWKFISITNILDSSLKDTLSKILNLKFDDRSWMQATLPINFGGLGVRTSASLALPAFLASCHSTLTLISSILNTPIEDVRVAYLTEATECWRASFPDEDTNNLTKNKQSAWDIPAVKSVYACLLEQCSSSADRARLLAVAESESGHWLRALPSKNIGTVLDPTTLRIVVGLRLGAKICEPHICPCGQQVDRLGRHGLSCTRSAGRLYRHGTLNDLVRRALVTASLPATLEPSGLSRSDGKRPDGMTLVPWHLGRPLVWDVTCVDTLAPSHINNTAERAGSAADQAQILKRRKYCNLSDNYLFAALAVETLGPWSSDMKKFISELSSRLVLACGDLRAGEYFAQRLSLAIQRGNAASVLGAMPNTDILEEVFYL

SEQ ID NO: 20552 - protein, 951 aa, Epargyreus clarus
MSSDSLLRCPICADNKFYKGQRGLKIHCSRIHVPRIESINLPLLSNYINNTDGDRNDEPLHKRLASLKHNIRVVKRIPKGARYAVAVCLYERVARVVAENNFNAWKDLLLFTYKKLHLNNRSHNQTLTSLIKHNITQDVLPVNTSSVNFNSLRNNILKLVENKLSDGDVKGAAKILFSEDTMATRSSETLGALREKHPTPITSSQLPSPLPNSQRDFLRVSEEATKSAIRSFPNGSAGGLDGLTPQHLKDLTDPSLGEAGVNLVKELTALINIMLAGAVPPEITPVLYGANLVALKKKDGGIRPIAVGCTLRRLASKLCCRNYSELLATRFKPRQLGFGVKGGCEAAVHAARTFLSNNDYDVFLKIDVKNAFNSVDRGALLTEIQKEMPDIFGYMWQCYGTPSKLLFGDNVIESCVGCQQGDPLGPVIFSLAIQPIITQLNSKFNVWYLDDGSLGGNASTVLEDLRIIIHHFNKIGLSLNFNKCEIFFSEKLSVEQCHHIYDQFASISPNISILEKENLTLLGAPIFDDAFLPIVNSKLHNFENISERLFDLKPHMAIYILRLCLFAPKFLYLLRCCPFWKFPSVTHILDTLLQNCLSKILNLKFDDRSWMQATLPVRFGGIGVRTTESLALPAFLASCHSTIALISDILNTNLDDVRVTYMPEAEEAWSGCFPAEDISLSDKTKQSVWDTPALKSVFACLLERCSDNSDRARLLAVAQSESGHWLHALPSNNIGTVLDPITLRISIGLRLGAKICESHFCPCGQEVDTLGRHGLSCIRSAGRLYRHGTLNSLIRRALATVSIPATLEPPGLFRDDGKRPDGITLVPWSLGRPLIWDATCVDTLAPSHLANTSVKAGAAADHAQTLKRRKYSNLLDNYLFAALALETMGPWSSDMKKFMSDMSTKLVTASGDQKAGGYFAQRLSLAVQQGNAASVLGTMPHTEILDGLFYL

SEQ ID NO: 20553 - protein, 770 aa, Pyrgus malvae
MAPCSPDTLDALREKHPASTAASYASTQCTDTTHLPLRVSEEVTLNAIRSFPNGSAGGLDGITPQLLKDLTDPFLGDVGKNLLRELTSLLNLMLAGQVPSDITPIIYGANLVALRKKDGGIRPIAVGCTLRRLASKLCCREYRERLTQKLKPRQLGFGVKGGCEAAVHSARSFLMKQNFDVFVKIDVKNAFNSVDRGAILTVIQKEIPEILDYIWQCYGTPSKLMYGDNVIESCVGCQQGDPLGPVIFSLVIQPIINQLNSEFNVWYLDDGSLGGTASTVLEDLETIIRRFEQTGLSLNFDKCELFFSDLLTEDQILSLTNKFNIITPNINITKKENLSLLGAPIFDDAIVPIINSKLDKFNMISDRLFDIKPHMATYILRLCLFAPKFLYLLRCCPFWKFPLITKSLDLSLQNCLSKILNLNFDDRSWMQATLPVKFGGLGIRTTEGLALPAFLASCHSTLTLITEILNTNVDDVWVAYMMEAIGVWGATFPSEDIPSVSQDRQSTWDIPALKASYASLLERCSDSTDRARLLAVAQSESGHWLHALPSKNIGTVLDPVALRIAVGLRLGVRVCEPHVCPCGQKVDSFGRHGLSCIRSAGRLFRHGTLNDLVRRALATASIPATLEPSGLSRSDGKRPDGVTLVPWSLGRPLVWDVTCADTLAPSHISDTAERVGSAADHAQSLKHRKYSNLSNNYLFAALAVETMGPWSSDMKKFMSEMSTRLILACGDLRAGGYFAQRLSLAIQRGNAGSVLGTMPHTDFLDEIFYL

SEQ ID NO: 20554 - protein, 958 aa, Entheus sp.
MSFINSNNNDLVRCPICADNKFYKGQRGLKIHSSRIHVPRIETVQRVAASGIPNLDSFVSTDGNHNKSLHERLAHLKHNIRLVKRIPKGARTTVATGLTDCVAKVVVENTSDAWESLLYFAYKTLHLGNRREKQSLCNLIKDNCSTNLIPFTNNTYIKSCKSNTVKLIENKLSDGDIKGAAKILFSTDTVATQSSDTLAALREKHPTYSETSQLPAPPSDSRQIFLRVSEEATVNTIRSFPNGSAGGLDGISPQHLKDLTDPFLGEVSKKLVRELTALVNLMLEGRVPSNICPVIYGANLVALNKKDGGIRPIAVGNTLRRLVSKLCCREFHNRLTQKLKPKQLGFGVKGGCEAAVHAARTFLYNKDFDIFVKIDVKNAFNSVDRGVLLSQIQKDIPEIFGYLWQCYGTPSKLLFGNNVIDSCVGCQQGDPLGPVIFSLAIHPIITQLNSEFNVWYLDDGSLGGSAATVLEDLELIIRRFDEIGLNLNFNKCEIFFSDRLSGEQRSILAHEFNSLIPSISVLSKNNLTLLGAPIFDEAFFPIINSKLDLFNEISHRLFDLNPHMATYILRLCLFAPKFMYLLRCCPFWKFRSHTKIVDDCLHNCLSKILNLKFDNSSWMQANLPIKYGGIGIRTTESLALPAFLASCHSTITLIADILNIDLVDVRVIYMAEAVEAWSATFPSEVIADLYKDKQSSWDIPGIKTVFACLLERCTENFDRARLLAAAQSESGHWLYALPSNNLGTLLDASSLRIAVGLRLGICLCEPHICPCGQNVDRFGRHGLSCTRAAGRLYRHGALNDLIRRALATVSMPATLEPLGLFRDDGKRPDGLTLVPWSHGRPLVWDATCVDTLAPSHIGETAVRSGAAADRAQALKRRKYCNLLESYNFAALAIETMGPWSSDMKKFMSDMSTKLIIACSDLKAGSYFAQRISIAVQRGNAASVLGTMPHGPFLEVLFL

SEQ ID NO: 20555 - protein, 954 aa, Gorgopas trochilus
MSFVSCNNSSLLRCPICVDDKLFKGQRGLNIHCSRVHVPRIELVNTLSQSLNLPTDGVCNNDEIHKKLAYYKHNVKLVKRIPKGARTTVARCLTECIAKVVSENSCDAWQSLLFFAYKILHIENKPQKMSLCNLIKHNSIENNFPFISLHSNIKKNTGNKIKLIENKLSDGDVNGAAKILFSEDTMAMYSPDTLEALREKHPISTAANNPSQCNNFPHSSLRVSEEATRNAIHSFSNGSAGGLDGLTPQHLKDLTDHFLGEVGKNLLKEITNLLNLMLSGKVPSAIAAVIYGANLIALKKKDGGIRPIAVGFTLRRLASKLCCREYRERLTQKFKPRQLGFGVKGGCEAAVHAARTFMLSKDFDVFVKIDVKNAFNSVDRGALLSEVQKEIPEIYEYIWQCYGTPSKLLFRNNVIESCVGCQQGDPLGPVLFSLVILPLINQLNSEFNVWYLDDGSLGGTATTVLEDLEFIIRRFSQVGLNLNFNKCELFYSENLTADQICTLSQKFNAITPHIKILSKQNLTLLGAPIFNEAFSPIINSKLANFHLISDLLFGLKPHMAIYILRLCLFAPKFMYLLRCCPFWKFRHITDILDTTLRDYLSKILNLNFDDRSWMQASLPIRFGGLGIRTTEGLSLPAFLSSCHSTITLISDILNTHLADVRIAYMAEALEAWRISFPTEDISNMVGSQQAAWDLPAIKAAFACLLEGSSNSFDKARLHSVAQSESGHWLHALPSKNLGTVLDPTTLHIAVGLRLGVKLCEPHLCPCGQRVDKFGRHGLSCTRSAGRLYRHGTLNDLIRRALATVSIPATLEPAGLSRTDGKRPDGMTLVPWSLGRPLVWDATCVDTLAPCYISDTGSRAGAAADHAQSLKRRKYSNLSDNYVFAALAMETMGPWSSDMKKFMSEMSTKLIIASGDLRAGGYFAQRLSIAIQRGNAASILGTMPHAGILEEIFLL

SEQ ID NO: 20556 - protein, 960 aa, Mellicta athalia
MQFINSSNNNESLLRCPICDGDRVFRGPRGLKIHCSRMHVPRVDVSVNQTIFSAADTGTDGDRSNDPIHTRLAYFKKNIKLVKRIPKGARLTVARSLTECIAKVVSENSTNAWYDLLTFAYKILNIGNRSAKISLTNLLKQNSTNKIIPLIQTAPKFNSNFETNSSNKLKIVENKLSEGDTKGAIKLLFSDDSLAVHSLDTLGALREKHPTTAASPTRGTDHKQISLRVTEEATDRAIRSFSNGSAGGLDGISPQHLKDLTDPFLGDVRKDPLRELTSLLNLMLAGRVPSDITPILYGANLVALKKKDGGIRPIAVGCTLRRLASKLCCREYRERLTQRFKPRQLGFGVNGGCEAAVHAARSFLLHQNFDVFVKIDVKNAFNSVDRGALLSEIQKEVPEIFEYMWQCYGTPSKLLFGDNIIESCVGCQQGDPLGPVIFSLAIQPIIDELNSKFNVWYLDDGSLGGTASSVLEDLDIIIRRFDQIGLSLNFNKCEILFSDNLSTEKITSLSQQFNIITPNISIMKKENLLLLGAPIFFEAFSPIINSKLENFNLISDRLFDLKPHMATYILRLCLFAPKFMYLLRCCPFWKFISITNILDSSLKDTLSKILNLKFDDRSWMQATLPINFGGLGVRTSASLALPAFLASCHSTLTLISSILNTPIEDVRVAYLTEATECWRASFPDEDTNNLTKNKQSAWDIPAVKSVYACLLEQCSSSADRARLLAVAESESGHWLRALPSKNIGTVLDPTTLRIVVGLRLGAKICEPHICPCGQQVDRLGRHGLSCTRSAGRLYRHGTLNDLVRRALVTASLPGTLEPSGLSRSDGKRPDGMTLVPWHLGRPLVWDVTCVDTLAPSHINNTAERAGSAADQAQILKRRKYCNLSDNYLFAALAVETLGPWSSDMKKFMSELSSRLVLACGDLRAGEYFAQRLSLAIQRGNAASVLGAMPNTDILEEVFYL

SEQ ID NO: 20557 - protein, 923 aa, Pyrgus malvae
MHVPRVDDSVNQTLFSVADTGTDGDRSNDPIHKRLAYFKKNIKLVKRIPKGARLTVARSLTDCIAKVVSENTTDAWHDLLLFAYKILNIQNRSTKLSLAKLIKQNSTNNIIPLIQTTSKPNNNLDTNNHNKLKTVENKLSEGNTKGAIKILFSDDTLAVHSPETLDVLREKHPTTSASPTRGTDQEQISLRVTEEATDRAIRSFSNGSAGGLDGISPQHLKDLTDPFLGDVRKDLLRELTSLLNLMLAGRVPSDITPILYGANLVALKKKDGGIRPIAVGSTLRRLASKLCCREYRDRLTQWFKPRQLGFGVNGGCEAAVHAARSFLLHQNYDVFVKIDVKNAFNSVDRGALLSEIKKEVPEIFEYMWQSYGTPSKLLFGDNVIESCVGCQQGDPLGPVIFSLAIQPIINQLNSKFNVWYLDDGSLGGTASSVLEDLDIIIRRFDDIGLSLNFNKCEILFSDKLSSDKISSLLEQFNIITPNISVMKKENLVLLGAPIFDEAVSPIINSKLENFILISGRLYDLKPHMAMYILRLCLFAPKFMYLLRCCPIWKFHSITNILDSTLNDSLSKILNLKFDDRSWMQATLPINFGGLGVRTTGSLALPAFLASCHSTLALISSILYTPIEDVWVAYLTEAMELWRASFPHVDTNSLSKNKQSTWDIPTVKSVYACLLERCPSSVDRARLLAVAESESGHWLRALPSKNIGTVLDPATFRIVVGLRLGAKICEPHLCPCGHQVDRFGRHGLSCTRSAGRLYRHGTLNDLVRRALVTASLPATLEPSGLSRSDGKRPDGVTLVPWHLGRPLVWDVTCVDTLAPSHISNTAERAGSAADQAQLLKRRKYSNLSDNYLFAALAVETLGPWSSDMKKFMSEMSSKLVLACGDLRAGEYFAQRLSLVVQRGNAASVLGTMPNTDILEEVFYL

SEQ ID NO: 20558 - protein, 956 aa, Ardaris eximia
MSLISSNNVPLLQCPICINSKRFKGQRGLKIHCSRIHVPRIDAVNPTFPSNTNVINRYCNNDEVHQRLADLKHNVHLVKRIPKGARSNVACCLTECIAKVVDENTSNAWQDLLFFAYKNLNIEHRHQNQSLCKSIKQNCLDNKLPVFRIDSKSNKVTIRNKIKLVENKLSVGDVNGAAKILFSNDTLAIHSPETLEALREKHPTSSATAHSPSQFANEQVKLLTVNEEATLNAIRSFSNGSAGGLDGITPQHLKDLTDSFLGKVGKDLVRELTRLINLMFIGKVPSDIIPIIYGANLVALKKKDGGIRPIAVGCTLRRLASKLCCRVYREQLTQKFKPRQLGFGVKGGCEAAVHAARTFITKQNFDVFLKVDVKNAFNSVDRGALITEIQKEIPEIYNYIRQCYGTPSKLLFGNNVIESCAGCQQGDPLGPVLFSLVLQPIINQLNSEFNVWYLDDGSLGGSALTVLEDLEFIIRRFSNVGLSLNFSKCELYFSDELTPEQILNLSQKFNNITPDINILNKKTLSLLGAPIFEDAFLPIINSKLNNFNLFSNDLLELKPHMALYILRLCLFAPKFMYLLRCCPFWKFHSVTNALDACLQNCLSKILNLKFDDRSWIQATLPISFGGLGVRSTESLALPAFLASCHSTLTLITDILNTNLVDVRVTYMAEALEAWSESFPNEDITTLAKNKQSAWDLPAIKAVFACILGKCTDSTNKARLLAVAQSESGYWLNALPSNNIGTVLDPTALRIAVGLRLGVKICEPHVCPCGQEVDMFGRHGLSCTRSAGRLYRHGALNDLVRRALATVSVPAVLEPPGLLRNDGKRPDGMTLVPWYLGRHLIWDVTCVDTLAPSHVKNTATCAGAAAESAQSLKRRKYSNLMADYLFTALAVETMGPWSIDTKKFMSEMSNKLVLVSGDQRAGSYFAQRLSLVIQRGNAASVLETMLHRDILDEVFFL

SEQ ID NO: 20559 - protein, 959 aa, Mellicta athalia
MQFINSSNNNESLLRCPICDGDRVFRGPRGLKIHCSRMHVPRVDVSVNQTIFSAADTGTDGDRSNDPIHTRLAYFKKNIKLVKRIPKGARLTVARSLTECIAKVVSENSTNAWYDLLTFAYKILNIGNRSAKISLTNLIKQNSTNKIIPLIQTAPFNSNFETNSSNKLKIVENKLSEGDTKGAIKLLFSDDSLAVHSPDTLGALREKHPTTAASPTRGTDHKQISLRVTEEATDRAIRSFSNGSAGGLDGISPQHLKDLTDPFLGDVRKDLLRELTSLLNLMLAGRVPSDITPILYGANLVALKKKDGGIRPIAVGCTLRRLASKLCCREYRERLTQRFKPRQLGFGVNGGCEAAVHAARSFLLHQNFDVFVKIDVKNAFNSVDRGALLSEIQKEVPEIFEYMWQCYGTPSKLLFGDNIIESCVGCQQGDPLGPVIFSLAIQPIIDELNSKFNVWYLDDGSLGGTASSVLEDLDIIIRRFDQIGLSLNFNKCEILFSDNLSTEKITSLSQQFNIITPNISIMKKENLLLLGAPIFFEAFSPIINSKLENFNLISGRLFDLKPHMATYILRLCLFAPKFMYLLRCCPFWKFISITNILDSSLKDTLSKILNLKFDDRSWMQATLPINFGGLGVRTSASLALPAFLASCHSTLTLISSILNTPIEDVRVAYLTEATECWRASFPDEDTNNLTKNKQSAWDIPAVKSVYACLLEQCSSSADRARLLAVAESESGHWLRALPSKNIGTVLDPTTLRIVVGLRLGAKICEPHICPCGQQVDRLGRHGLSCTRSAGRLYRHGTLNDLVRRALVTASLPATLEPSGLSRSDGKRPDGMTLVPWHLGRPLVWDVTCVDTLAPSHINNTAERAGSAADQAQILKRRKYCNLSDNYLFAALAVETLGPWSSDMKKFMSELSSRLVPACGDLRAGEYFAQRLSLAIQRGNAASVLGAMPNTDILEEVFYL

SEQ ID NO: 20560 - protein, 951 aa, Epargyreus clarus
MSSDSLLRCPICVDNKFYKGQRGLKIHCSRIHVPRIEKINIPSASNYINNTDRDRNDEPLHKRLANLKHNIRVVKRIPKGARHAVAVCLTEHVARVVAENSFNAWKDLLLFTFKKLHLNNRTQNQTLTNLIKQNISQNVLPINTSSVNFNSVRNNILKLIENKLSDGDVKGAAKILFSDDTMATRSSETLGALREKHPTPTTSLQLPSPPHSSQRDFLRVSEEATKIAIRSFTNGSAGGLDGLTPQHLKDLTDPSLGEAGVNLVKELTALINIMLAGVVPPEITPVLYGANLVALKKKDGGIRPIAVGCTIRRLASKLCCRNYSELLAIRLKPRQLGFGVKGGCEAAVHAARTFLNNKDYEVFLKIDVKNAFNSVDRGALLAEIQKEMPEIYGYMWQCYGTPSKLLFGDNVIESCVGCQQGDPLGPVIFSLAIQPIIMELNSKFNVWYLDDGSLGGNASTVLEDLKIIIRRFNNIGLSLNFNKCEIFFSEKLSVEQCHHIYGQFNSISPNISILEKENLTLLGAPIFDDAFLPIVNSKLHNFENISERLFDLKPHMAMYILRLCLFAPKFLYLLRCCPFWKFPSVTHILDTHLQNCLSKILNLKFDDRSWMQATLPVRFGGIGVRTTESLALPAFLASCHSTIALISDILNSNLDDVRVTYMPEAEEAWSGCFPDEDISMSDKTKQSVWDTPALKSVFACLLEQCSDNSDRARLLAVAQSESGHWLHALPSNNIGTVLDPITLRISIGLRLGAKICESHFCPCGQEVDTLGRHGLSCIRSAGRLYRHGTLNSLIRRALATVSIPATLEPPGLFRDDGKRPDGITLVPWSLGRPLIWDATCVDTLAPSHLANTSVKAGAAADHAQTLKRRKYSNLLDNYLFAALALETMGPWSSDMKKFMSDMSTKLVTASGDQKAGGYFAQRLSLAVQQGNAASVLGTMPHTAILDGLFYL

SEQ ID NO: 20561 - protein, 956 aa, Pyrgus malvae
MSVMNNSNGSLLQCSICGDNRYFKGQRGLNIHCSRIHIPRIASVDHIVSPIDATDGVRSDEPLHQRLAHLKHNIKLVKRIPKGARASVARSLTECVAKVVSENTSEVWQELLLFAYKTFHIEFRKQKVSLVKRIKQNIINNSIPISSSQQKSTHLNSSHNKSKIIENKLSDGDIKGAVKILFSDDSMATHSPDTLDALREKHPTATTVSLNTLQCTGHRNNSLRVSEEATENAIRSFPNGSAGGLDGITPQHLKDLTDPFLGQISKDLLRELTSLVNLMLTGRVPSDITPIVYGANLVALKKKDGGIRPIAVGSTLRRLTSKVCCREYRDRFVQKFKPRQLGFGVKGGCEAAVHAARSFLMTQHYDLFLKIDVKNAFNSVNRGAILTEIQKEAPEIFDYIWQCYGTPSKLLFGDNVIESCVGCHQGDPLGPVIFSLVIQSIINQLNSKFNIWYLDDGSLGGTASTVLEDLQILIRRFSDIGLSLNFKKCEVFFSDHLTSEQISNLTEKLNNITPNIIIIKKDNLTLLGAPIFDDAISPIINSKLENFNSISDRFFNLQPHMAIYILRLCLFAPKFLYLLRCCPLWKFPLVTEILDNCLKNCVTKILNLKFDDRSWMQATLPIRFGGLGVRTTEGLALPAFLASCHSTCTLITEILNTNLDDVWVPYMMEALDSWSASFPSEDMSNICKEKQYSWDLPKIKSVFACLLERCTDSTDRARLLAVAQSESGHWLHALPSMNIGTVLDPVTFRIAVGLRLGVEMCEPHICPCGQGVDRFGRHGLSCTRSAGRLFRHGTLNDLVRRALATASIPATLEPSGLSRSDGKRPDGTTLVPWSLGRPLIWDVTCADTLAPTHVKMSAEKAGSAADHAQCLKRRKYSNLSDNYIFAALAMETMGPWSSDMKKFMSEMSHKLVLACGDLRAGGYFAQRLSLTIQRGNAASVLGTMPHTGFLDEVFYL

SEQ ID NO: 20562 - protein, 956 aa, Erynnis tages
MSFVNVSQNVTLLPCSICADNRLYKGQRGLNIHCSRIHVPRTDAVNYTASSLSSYVCTDGDGDKVLYKMLAHFKKNVRIVRRIPKGARPTVARCLTECVAKVVKENNFNSWQDLLLFAYKTFKINNRQHHQSLCNLIKNNTCESSLPEISNHRRFGHENKKINIIEKKISDGDVKGAAKVLFSNDTMAPHSLDTLEALREKHPTSTAVSQLPNQSTYPRHDPLRVNEEATRGAIQSFQNGSAGGLDGITPQHLKDLTDPLLGEVGQNLLRELTALINLILEGRVPSEITPIIYGANLVALRKKDGGIRPIAVGCTLRRLVSKLCCREYRERLTQKFKPRQLGFGVKGGCEAAVHAARTFLIKQNYEVFVKIDVKNAFNSVDRGALLNEIQKEVPEIFDYLWQCYGSPSKLLFGDDVIESCVGCQQGDPLGPVIFSLVIQPIIQQLNSEFNVWYLDDGSLGGTASTVLEDLEFINRRFSEIGLAINFNKCEIFFSDQLVPEKYNSLLQHFYNITPNIKIVNKKNLTLLGAPLFDDAFVPIINSKLNNFNLISDRLFGLKPHMAVYILRLCLFAPKFIYLLRCCPFWKFHSVTNILDSTLKNCLSQILNLSFDDRSWMQATLPIKFGGLGIRRTESLALPAFIASCHSTVTLIADILNSKDVRVAYLSEAVETWRHGAIFPSEDLTGINPKIQAAWDMPFVKSTYACLLDRCTDSTDRARLLAVAQSESGHWLHALPSDNIGTVLDPVTLRIAVGLRLGVKVCEPHRCPCGQGVDIFGRHGLSCTRSAGRLYRHGTMNDLIRRALATASIPAILEPPGLSRSDGKRPDGSTLVPWCLGQSLVWDATCVDTLAPSHISVTAVSAGAAADQAQCLKRRKYSNLSENYIFVALAVETMGPWSSDMKKFMSEMSTRLVLASGDPRAGGYFAQRLSLCVQRGNAASVLGTMPHMGTLDEIFLL

SEQ ID NO: 20563 - protein, 956 aa, Pyrgus malvae
MSVMNNSNGSLLQCSICGDNRYFKGQRGLNIHCSRIHIPRIASVDHIVSPIDATDGVHSDEPLHQRLAHLKHNIKLVKRIPKGARTSVARSITECVAKVVSENTSEVWQELLLFAYKTFHIEFRKQKVSLVKRIKQNIINNSIPISSSQQKSTNLNSSHNKLKNIEKKLSDGDIKGAVKILFSDDSMATHSPDTLDALREKHPTATTVSLNTLQCTGHRNNSLRVSEEATENAIRSFPNGSAGGLDGITPQHLKDLTDPFLGQISKDLLRELTSLVNLMLTGRVPSDITPIVYGANLVALKKKDGGIRPIAVGSTLRRLTSKVCCREYRDRFVQKFKPRQLGFGVKGGCEAAVHAARSFLMTQHYDLFLKIDVKNAFNSVNRGAILTEIQKEAPEIFDYIWQCYGTPSKLLFGDNVIESCVGCQQGDPLGPVIFSLVIQSIINQLNSKFNIWYLDDGSLGGTASTVLEDLQILIRRFSDIGLSLNFKKCEVFFSDHLTSEQISNLTEKLNNITPNIIIVKKDNLTLLGAPIFDDAISPIINSKLENFNSISDRFFNLQPHMAIYILRLCLFAPKFLYLLRCCPLWKFPLVTEILDNCLKNCVTKILNLKFDDRSWMQATLPIRFGGLGVRTTEGLALPAFLASCHSTCTLITEILNTNLDDVWVPYMMEALDSWNASFPSEDMSNICKEKQYSWDLPKIKSVFACLLERCTDSTDRARLLAVAQSESGHWLHALPSMNIGTVLDPATFRIAVGLRLGVEMCEPHICPCGQGVDRFGRHGLSCTRSAGRLFRHGTLNDLVRRALATASIPATLEPSGLSRSDGKRPDGTTLVPWSLGRPLIWDVTCADTLAPTHVKMSAEKAGSAADHAQCLKRRKYSNLSDNYIFTALAMETMGPWSSDMKKFMSEMSHKLVLACGDLRAGGYFAQRLSLTIQRGNAASVLGTMPHTGFLDEVFYL

SEQ ID NO: 20564 - protein, 960 aa, Heliopetes ericetorum
MPFISRVNNNESLLRCPICAGDRLFKGPRGLKIHCSRMHVPRVDVSVNQTLFPSSNTGTDGDRSSDPIHKRLAYFKNNIKLVKRIPKGARLTVARSLTECIAKVVSQNNTKSWYDLLTFAYKILNIENRSGKVSLTNLIKENSSKNVFPNIIPATKLIHNFETNNHNKLKIVENKLSEGDTKGAIRILFSDDSLAMHSPDTLDALREKHPTTAALPTRGTDSEHFSLRVTEEATDRAIRSFSNGSAGGLDGISPQHLKDLTDPFLGDVRKDLLRELTSLLNLMLAGRVPSDITPILYGANLVALKKKDGGIRPIAVGCTLRRLASKLCCREYRERLTQRLKPRQLGFGVNGGCEAAVHAARSFLLQQDFDVFVKIDVKNAFNSVHRGALLSEIQKEVPEIFEYMWQCYGTPSKLLFGDNVIESCVGCQQGDPLGPVIFSLVIQPIINQLNSKFNVWYLDDGSLGGTASSVLEDLDIIIRRFDEIGLSLNFNKCEILFSDKLSTDQINSLSQQFNIVTPNISVMKKENLLLLGAPIFDEAFSPIINSKLENFNLISGRLYDLKPHMAIYILRLCLFAPKFMYLLRCCPFWKFPLITNILDSTLKNTLSNILNLKFDDRSWMQATLPINFGGLGIRTTGSLALPAFLASCHGAFTLISSILSTPIEDVWVAYMTEASEVWRSSFPDEDISNFYKNKQSSWDIPAVKSVYACLLERCSSNADKARLLAVAESESGHWLRALPSKNIGTVLDPATLRTVVGLRLGAKICEPHLCPCGQQVDKFGRHGLSCTRSAGRLYRHGTLNDLVRRALTTASLPATLEPSGLSRSDGKRPDGMTLVPWHLGCSLVWDVTCVDTLAPSHISDTAERAGSAADQAQVLKRRKYSNLSDNYLFAALAVETLGPWSSDMKKFMSEMSSRLVLAGGDLRAGEYFAQRLSLAVQRGNAASILGAMPNTDILEEVFYL

SEQ ID NO: 20565 - protein, 923 aa, Pyrgus malvae
MHVPRVDDSVNQTLFSVADTGTDGDRSNDPIHKRLAYFKKNIKLVKRIPKGARLTVARSLTDCIAKVVSENTTDAWHDLLLFAYKILNIQNRSTKLSLAKLIKQNSTNNIIPLIQTTSKPYNNLDTNNHNKLKTVENKLSEGNTKGAIKILFSDDTLAVHSPETLDVLREKHPTTSASPTRGTDQEQISLRVTEEATDRAIRSFSNGSAGGLDGISPQHLKDLTDPFLGDVRKDLLRELTSLLNLMLAGRVPSDITPILYGANLVALKKKDGGIRPIAVGSTLRRLASKLCCREYRDRLTQWFKPRQLGFGVNGGCEAAVHAARSFLLHQNYDVFVKIDVKNAFNSVDRGALLSEIKKEVPEIFEYMWQSYGTPSKLLFGDNVIESCVGCQQGDPLGPVIFSLAIQPIINQLNSKFNVWYLDDGSLGGTASSVLEDLDIIIRRFDDIGLSLNFNKCEILFSDKLSSDKISSLLEQFNIITPNISVMKKENLVLLGAPIFDEAVSPIINSKLENFILISGRLYDLKPHMAMYILRLCLFAPKFMYLLRCCPIWKFHSITNILDSTLNDSLSKILNLKFDDRSWMQATLPINFGGLGVRTTGSLALPAFLASCHSTLALISSILYTPIEDVWVAYLTEAMELWRASFPHVDTNSLSKNKQSTWDIPAVKSVYACLLERCPSSVDRARLLAVAESESGHWLRALPSKNIGTVLDPATFRIVVGLRLGAKICEPHLCPCGHQVDRFGRHGLSCTRSAGRLYRHGTLNDLVRRALVTASLPATLEPSGLSRSDGKRPDGVTLVPWHLGRPLVWDVTCVDTLAPSHISNTAERAGSAADQAQLLKRRKYSNLSDNYLFAALAVETLGPWSSDMKKFMSEMSSKLVLACGDLRAGEYFAQRLSLVVQRGNAASVLGTMPNTDILEEVFYL

SEQ ID NO: 20566 - protein, 960 aa, Pyrgus malvae
MQFVSRINNNESLLRCPICAGDRVFKGPRGLKIHCSRMHVPRVDVSVNQTLISAANTGADGDRSNDPIHKRLAYFKKNIKLVKRIPKGARLTVARSLTECIAKVVSENTTNAWHDLLTFAYKILNIENRSTKISLAKLIKENSTKNIIPSIQTTPKPYNNLESNSHIKLKIVENKLSEGNTKGAIKILFSDDSLAAHSPETLDALCEKHPTTSASPTRGTDQEHISLRVAEEATDRAIRSFSNGSAGGLDGISPQHLKDLTDPFLGDVRKDLLRELTSLLNLMLAGRVPSDITPILYGANLVALKKKDGGIRPIAVGSTLRRLASKLCCREYRERLTQRFKPRQLGFGVNGGCEAAVHAARSFLQQQNFEVFVKIDVKNAFNSVDRGAILSEIQKEVPEIFEYMWQCYGTPSKLLFGDNVIESCVGCQQGDPLGPVIFSLAIQPIINQLNSKFNAWYLDDGSLGGTASSVLEDLDIIIRRFDDIGLSLNFNKCEILFSDKLSTDKISSLLEQFNIITPNISVMKKENLILLGAPIFDEAVSPIINSKLENFNLISRRLFDLKPHMAMYILRLCLFAPKFMYLLRCCPFWKFHSITNILDSTLKVTLSKILNLKFDDRSWMQATLPINFGGLGVRTSESLALPAFLASCHSVLALISSILNSPIEDVWVAYLTEATEVWRASFPDEDTNNMSRNKQSAWDIPAVKSVYACLLERCSRGVDRARLLAVAESESGHWLRALPSKNIGTVLDPSTFRIVVGLRLGAEICEPHLCPCGQQVDRFGRHGLSCTRSAGRLYRHGTLNDLVRRALVTASLPATLEPSGLSRSDGKRPDGITLVPWHLGRPLVWDVTCVDTLAPSHICDTAERAGSAADQAQLLKRRKYSNLSDNYLFAALAVETLGPWSSDMKKFMSEMSSKLVLACGDPRAGEYFAQRLSLAVQRGNAASVLGAMPNTDILEEVFYL

SEQ ID NO: 20567 - protein, 770 aa, Chioides vintra
MATHSPDTLQALRDKHPTPNTSSQLPSPASLPQSGYLRVSEEATKCAIRSFPNGSAGGLDGLTPQHLKDLTDPFLGEAGKGLLKELTALINLMLAGRVPSDITPIIYGANLVALKKKDGGIRPIAVGCTLRRLVSKLCCRNYNELLSRQLQPRQLGFGVKGGCEAAVHAARTFLNKNEYDIFLKIDVKNAFNSVDRGPLLAEIQKELPEIFDYMWQCYGTPSKLLFGDKVIESCVGCQQGDPLGPLIFSLAIQPIITQLNSKFNVWYLDDGSLGGTTSHVLEDLQFIIERFNQIGLNLNFNKCEVFFSEKLSVEKCHNIYGQLNLLCPNISIVEKENLTLLGAPIFEDAFSPMINSKLTQFESISERLLDIKPHMAIYILRLCLFAPKFLYLLRCCPFWKFPSFTHNLDMSLQNYLSKILNLQFDDRSWMQATLPIKFGGIGIRKTESLALPAFLASCHSTSTLIADILNIPLDDVRVAYMSEAVEAWSALFPSEDTSVIDKCKQSVWEIPAIKSVYACLLERCSDNLDRARLLAVAQSESGYWLHALPSSNIGTVLDPVTLRISVGLRLGAKVCEPHICPCGQEVDTSGRHGLSCTRSAGRLYRHGTLNDLIRRALATVSIPATLEPPGLFRNDGKRPDGITLVPWSLGRPLVWDATCVDTLAPSHIGNTSVSAGAAADHAQILKRRKYSNIFDNYLFAALAVETLGPWSSDMKKFMSDMSTRLVHVSGDQRAGGYFAQRLSLAVQQGNAASVLGTMPHTAILDGLFYL

SEQ ID NO: 20568 - protein, 956 aa, Pyrgus malvae
MSVMNNSNGSLLQCSICGDNRYFKGQRGLNIHCSRIHIPRIASVDHIVSPIDATDGVHSDEPLHQRLAHLKHNIKLVKRIPKGARASVARSLTECVAKVVSENTSEVWQELLLFAYKTFHIEFRKQKVSLVKRIKQNIINNSIPISSSQQKSTNLNSSHNKLKNIEKKLSDGDIKGAVKILFSDDSMATHSPDTLDALREKHPTATKVSLNTLQCTGHRNNSLRVSEEATENAIRSFPNGSAGGLDGITPQHLKDLTDPFLGQISKDLLRELTSLVNLMLTGRVPSDITPIVYGANLVALKKKDGGIRPIAVGSTLRRLTSKVCCREYRDRFVQKFKPRQLGFGVKGGCEAAVHAARSFLMTQHYDLFLKIDVKNAFNSVNRGAILTEIQKEAPEIFDYIWQCYGTPSKLLFGDNVIESCVGCQQGDPLGPVIFSLVIQSIINQLNSKFNIWYLDDGSLGGTASTVLEDLQILIRRFSDIGLSLNFKKCEVFFSDHLTSEQISNLTEKLNNITPNIIIVKKDNLTLLGAPIFDDAISPIINSKLENFNSISDRFFNLQPHMAIYILRLCLFAPKFLYLLRCCPLWKFPLVTEILDNCLKNCVTKILNLKFDDRSWMQATLPIRFGGLGVRTTEGLALPAFLASCHSTCTLITEILNTNLDDVWVPYMMEALDSWNASFPSEDMSNICKEKQYSWDLPKIKSVFACLLERCTDSTDRARLLAVAQSESGHWLHALPSMNIGTVLDPATFRIAVGLRLGVEMCEPHICPCGQGVDRFGRHGLSCTRSAGRLFRHGTLNDLVRRALATASIPATLEPSGLSRSDGKRPDGTTLVPWSLGRPLIWDVTCADTLAPTHVKMSAEKAGSAADHAQCLKRRKYSNLSDNYIFTALAMETMGPWSSDMKKFMSEMSHKLVLACGDLRAGGYFAQRLSLTIQRGNAASVLGTMPHTGFLDEVFYL

SEQ ID NO: 20569 - protein, 955 aa, Oxynetra aureopecta
MFSVNSQNVTLLQCPICVDGRLFKGERGLNIHCSRVHVPRIDLVTKIFPCIDTPTDGDCNNDVHERLAHLKHNIKIVKRIPKGARSNVARVLTECVAKVVNENTSNTWQDLLFFAYKILNFENKSQKQSLCNLIKINSIENKFPNVINHSKCTTSSINNKLRIVENKISLGDVRGAAKILFSDDSMATHSPDTLAALREKHPAVSAASCSLNQCTNLQESSIIVTEESTVAAIRSFSNGSAGGLDGLTPQHLKDLTDPYLGEVGTNLVRQLTRLINLMLAGKVPSDISPIIYGANLVALKKKTGGIRPIAVGCTLRRLASKLCCRKYRERLTDKLKPRQLGFGVKGGCEAAVHAARTFLSNKNFDVFLKIDVKNAFNAIDRGALLNEIQKEFPEIYNYMWQCYGTPSKLLFGDNVIESCVGCQQGDPLGPVLFSLAIQPIINQLNSEFNVWYLDDGSLGGTALTVLEDLEFIIRRFNLIGLNLNFSKCELYFSDELTSEQIDILSRKFNIITPNINIVDKKKLSLLGAPIFDDAFFSIVNSKLENFNMFSGLLFDLKPHMAIYILRHCLFAPKFMYLLRCCPFWKFLSITNSLDTSLQNCLSKILNLKFDSRSWMQATLPIRFGGLGVRTSESLALPAFLASCHNTLALITDILNTDSGDVRVAFMAEASEAWRLSFPTEDTSTIVGSQQSAWDLPAVKAKFSYLLEQCTDSTDRARLVAVAQSESGHWLNALPSKNIGTVLDPSTLRIAVGLRLGVKICESHICPCGQEVDIFGRHGLSCVRSAGRLYRHGTLNDLIRRALATVSIPATLEPLGLLRNDGKRPDGMTLVPWSRGQNLVWDVTCVDTLAPSHINNTKMVAGAAANNAQCLKRRKYTNLMDDYIFTALAVETMGPWSSDTRKFLSEMSAKLVLATGDQRAGDYFAQRLSLTIQRGNAASVLGTMPHMDSLDEIFFL

SEQ ID NO: 20570 - protein, 923 aa, Pyrgus malvae
MLLLTSFTSMNQTIFSAADTGTDGDRSNDPIHTRLAYFKKNIKLVKRIPKGARLTVARSLTECIARVVSENTTNAWHNLLTFAYKILNIENRSSKISLTNLIKQNSTNKIIPLIHTAPKFINNFETNSSNKLKIVENKLSEGDTKGAIKILFSDDSLALHSPDTLGALREKHPTTAASPTRGTDYEQISLRVTEEATDRAIRSFSNGSAGGLDGISPQHLKDLTDPFLGDVRKDLLRELTSLLNLMLAGRVPSDITPILYGANLVALKKKDGGIRPIAVGCTLRRLASKLCCREFRERLTQRFKPRQLGFGVNGGCEAAVHAARSFLLHQNFEVFVKIDVKNAFNSVDRGALLSEIQKEVPEIFEYMWQSYGTPSKLLFGDNIIESCVGCQQGDPLGPVIFSLAIQPIIDQLNSKFNVWYLDDGSLGGTASSVLEDLDIIIRRFDQIGLSLNFNKCEILFSDNLSAEKISSLSQQFNMITPNISILKKENLILLGAPIFDEAFSPIINSKLEIFNLISGRLFDLKPHMAIYILRLCLFAPKFMYLLRCCPFWKFISITNILDSSLKDTLSKILNLKFDDRSWMQATLPINFGGLGVRTTGSLALPAFLASCHSTLALISSILNTPIEDVWVAYLTEATECWRASFPDEVTNNISKNKQSAWDIPAVKSVYACLLERCSSSADRARLLAVAESESGHWLRALPSKNIGTVLDPTTLRIVVGLRLGAKICEPHLCPCGQQVDRLGRHGLSCTRSAGRLYRHGTLNDLVRRALVTASLPATLEPSGLSRSDGKRPDGMTLVPWHLGRPLVWDVTCVDTLAPSHINNTAERPGSAADQAQVLKRRKYCNLSDNYLFAALAVETLGPWSSDMKKFMSEMSSRLVLACGDLRAGEYFAQRLSLAIQRGNAASVLGAMPNADILEEVFYL

SEQ ID NO: 20571 - protein, 951 aa, Autochton bipunctatus
MSNDSLLRCPICADNKYYKGQRGLNIHSSRIHVPKIELTNPPSHYNNINHADGDCYDETLHQRLVYLKHNVRVIKRIPKGARSTVAISLTECVAKVVAENNIKAWEELMLFPYKTLHLNNKYRNQTLCKLVKYNTLQNVLPDDTISANSTPVKNSILKLIENKLSDGDVRGAAKILFSNDTMAMHSPETLGELRDKHPIPTTSSQLPSHLSNPPHEHLRVNEEATKLAIRSFSNGSAGGLDGLTPQHLKDLTDSCLGEVGVILVRELTALINLMLAGRVPSEITPILYGANLVALKKKDGGIRPIAVGCTIRRLTSKLCCRNYSDLLARRFRPRQLGFGIKGGCEAAVHAARTFLYKNDYDVFLKIDVKNAFNSINREILLTEIQKEIPEIFGYMWQCYGTPSKLLFGTNVIESCVGCQQGDPLGPLIFSLAIQPIIMQLNSEFNVWYLDDGSLGGSASTVLEDLEFIIRRFDQIGLTLNYNKCEIFFSEHLSVEQRHILSGKFNLITPNISTLCKENLILLGAPIFDDAFLPIINSKLQHFELISERLYNLKPHMAIYILRLCLFAPKFMYLLRCCPFWKFPSVSHILDTSLQNCLSKILNLKFDNRSWMQATLPIRFGGIGVRTTESLALPAFLASCHSTITLITDILNTNLVDVRVAYMLEATRAWGALFPSEDITKLNKVNQSVWDTPGIKSVFACLLEGCPDNSDRARLLAVSQSESGHWLHALPSNNIGTVLDPITLRISIGLRLGAKICESHRCPCGQEVDMLGRHGLSCTRSAGRFYRHGTINNLIRRALATVSIPAILEPAGLFRDDGKRPDGITLVPWSLGRSLVWDATCIDTLAQSHVGSTCVSAGAAADQAQNLKRRKYSNLLDNYLFAALAIETMGPWSSDMKKFMSDMSTRLVHVSGDPKAGGYFSQRLSLAVQQGNAASVLGTMPHTAILDGLFYL

SEQ ID NO: 20572 - protein, 899 aa, Spialia doris
MSFTSSNALSLLRCPICADQKFFKGQRGLNIHCGKIHVPRIELVASTCRWNDTPADRGRNSDNIHLRLAYLKNNVKLVKRIPKGARPTVARCLTECVAKVVSENTYDAWENLLFFAYKTLHIGNRPQKMSLCNLIKQNSTENKLPSFIQNPKRNLNTNNKLKLIENKLSDGDVKGAAKILFSEDTLAMRSPDTLEALREKHPVSAAVSQIPDNYIGNNPVQSSLRVSEESITNAIHSFSNGSAGGLDGISPQHLKDLTDNFLGEIGRNLVQEITKLINLMLSGEVPSDITSVIYGANLVALKKKDGGIRPIAVGCTLRRLASKLCCREFRERLTQKFKPRQLGFGVKGGCEAAVHAARTFLLQKNFDVFLKIDVKNAFNSVNREALLSEIQKEIPEIFGYIWQCYGTPSKLMFGENVIESCVGCQQGDPLGPVLFSLVILPIIDQLNSEFNVWYLDDGSLGGTASTVLEDLECIIRRFSEVGLFLNYSKCELYFSDELTNDQRLTILRKFNSITPNIKILNEQNLTLLGAPIFDDAFVPIVNSKLESFNKISDVLLDLNPHMAIYILRLCLFAPKFMYLLRCCPFWKFQSVTDILDSSLQNCVSKILNLNFDQGSWMQATLPIRFGGIGIRLTNSLSLPAFLASCHSTLTLITNILNSNLVDVRVAYMAEALETWRISFPTEDISAINGIQQSAWDLPAIKSVFACLLEQCPDSYDRARLLAAAQSESGHWLHVLPSKNLGTVLDPTTLHIAVGLRLGVKLCEPHKCPCGQEVDKFGRHGLSCIRSAGRLYRHGTVNDLIRRALATVSIPATLEPPGLLRNDGKRPDGMTLVPWSLGRPLVWDATCVDTLAPSHVSDTGGRAGAAADHAQSLKRRKYSNLSDNYIFAALAMETMGPWSS

SEQ ID NO: 20573 - protein, 953 aa, Pyrgus malvae
MSFTDNNSVSLLRCPICANSRLFKGERGLRIHCSRIHVPRIGAVDQLELPSFDDRADGVRNDEPIHERLAFLKNNVRLVKRVPKGARLTVARCLTKCVARVVSENSCSAWYELLLFAYKTLHIEKRSPKTSLANLIKENTNTYLIPLPTVRIQHTSNKLKLIENKLSDGDVKGAAKNLFSEDSIATHSPDTLEALREKHPTSPAASYTPSQCTDPGLLPLRVSEEATRNAIHSFPNGSAGGLDGISPQLLKDLTDPFLGDVSKDLLRELTSLINLMLAGRVPSDITSILYGANLVALRKKDGGVRPIAVGCTFRRLASKLCCREYRERITQTLKPRQLGFGVKGGCEAAVHSARSFLMKQNFDIFVKIDVKNAFNSVDRGAILSVIQKEVPEILDYIRQCYGTPSKLMYGNTVIESCVGCQQGDPLGPVIFSLVIQPIINQLNSEFNVWYLDDGSLGGTASTVLEDLETIIRRFNEIGLCINFSKCELFFSDNLTDEQISTLSQKIKIITPDIYISKKNNLSLLGAPIFVDAFVPIINSKLDKFNMISDRLFDIKPHMATYILRLCLFAPKFLYLLRCCPFWKFPLVTKSLDLTLQNCLSKILNLNFDDRSWTQATLPVKFGGLGIRTTEGLALPAFLASCHSTLFLITEILNTNFDDVWVAYMTEAMGVWSTTFPSEDIPSVSKDRQSTWDMPALKASYASLLEQCSDSTDRARLLAVAQSESGQWLHALPSKNIGTVLDPVALRIAVGLRLGVRVCEPHVCPCGQRVDSFGRHGLSCIRSAGRLFRHGTLNDLVRRALATASIPATLEPSGLSRNDGKRPDGVTLVPWNLGRPLVWDVTCVDTLAPSHISDTAERVGSAADHAQSLKRRKYSNLSDNYLFAALAVETMGPWSSDMKKFMSEMSTKLVLACGDLRAGGYFAQRLSLAIQRGNAASVLGTMPHTDFLDEIFYL

SEQ ID NO: 20574 - protein, 923 aa, Pyrgus malvae
MHVPRVDVSVNQTIFSAADTGTDGDRSNDPIHTRLAYFKKNIKLVKRIPKGARLTVARSLTECIARVVSENTTNAWHNLLTFAYKILNIENRSSKISLTNLIKQNSTNKIIPLIHTAPKFINNFETNSSNKLKIVENKLSEGDTKGAIKILFSDDSLALHSPDTLGALREKHPTTAASPTRGTDYEQISLRVTEEATDRAIRSFSNGSAGGLDGISPQHLKDLTDPFLGDVRKDLLRELTSLLNLMLAGRVPSDITPILYGANLVALKKKDGGIRPIAVGCTLRRLASKLCCREFRERLTQRFKPRQLGFGVNGGCEAAVHAARSFLLHQNFEVFVKIDVKNAFNSVDRGALLSEIQKEVPEIFEYMWQSYGTPSKLLFGDNIIESCVGCQQGDPLGPVIFSLAIQPIIDQLNSKFNVWYLDDGSLGGTASSVLEDLDIIIRRFDQIGLSLNFNKCEILFSDNLSAEKISSLSKQFNMITPNISILKKENLILLGAPIFDEAFSPIINSKLEIFNLISGRLFDLKPHMAIYILRLCLFAPKFMYLLRCCPFWKFISITNILDSSLKDTLSKILNLKFDDRSWMQATLPINFGGLGVRTTGSLALPAFLASCHSTLALISSILNTPIEDVWVAYLTEATECWRASFPDEDTNNISKNKQSAWDIPAVKSVYACLLERCSSSADRARLLAVAESESGHWLRALPSKNIGTVLDPTTLRIVVGLRLGAKICEPHLCPCGQQVDRLGRHGLSCTRSAGRLYRHGTLNDLVRRALVTASLPATLEPSGLSRSDGKRPDGMTLVPWHLGRPLVWDVTCVDTLAPSHINNTAERPGSAADQAQVLKRRKYCNLSDNYLFAALAVETLGPWSSDMKKFMSEMSSRLVLACGDLRAGEYFAQRLSLAIQRGNAASVLGAMPNTDILEEVFYL

SEQ ID NO: 20575 - protein, 956 aa, Pyrgus malvae
MSVMNNSNGSLLQCSICGDNRYFKGQRGLNIHCSRIHIPRIASVDHIVSPIDATDGVHSDEPLHQRLAHLKHNIKLVKRIPKGARASVARSLTECVAKVVSENTSEVWQELLLFAYKTFHIEFRKQKVSLVKRIKQNIINNSIPISSSQQKSTNLNSSHNKLKNIEKKLSDGDIKGAVKILFSDDSMATHSPDTLDALREKHPTATTVSLNTLQCTGHRNNSLRVSEEATENAIRSFPNGSAGGLDGITPQHLKDLTDPFLGQISKDLLRELTSLVNLMLTGRVPSDITPIVYGANLVALKKKDGGIRPIAVGSTLRRLTSKVCCREYRDRFVQKFKPRQLGFGVKGGCEAAVHAARSFLMTQHYDLFLKIDVKNAFNSVNRGAILTEIQKEAPEIFDYIWQCYGTPSKLLFGDNVIESCVGCQQGDPLGPVIFSLVIQSIINQLNSKFNIWYLDDGSLGGTASTILEDLQILIRRFSDIGLSLNFKKCEVFFSDHLTSEQISNLTEKLNNITPNIIIVKKDNLTLLGAPIFDDAISPIINSKLENFNSISDRFFNLQPHMAIYILRLCLFAPKFLYLLRCCPLWKFPLVTEILDNCLKNCVTKILNLKFDDRSWMQATLPIRFGGLGVRTTEGLALPAFLASCHSTCTLITEILNTNLDDVWVPYMMEALDSWNASFPSEDMSNICKEKQYSWDLPKIKSVFACLLERCTDSTDRARLLAVAQSESGHWLHALPSMNIGTVLDPATFRIAVGLRLGVEMCEPHICPCGQGMDRFGRHGLSCTRSAGRLFRHGTLNDLVRRALATASIPATLEPSGLSRSDGKRPDGTTLVPWSLGRPLIWDVTCADTLAPTHVKMSAEKAGSAADHAQCLKRRKYSNLSDNYIFTALAMETMGPWSSDMKKFMSEMSHKLVLACGDLRAGGYFAQRLSFTIQRGNAASVLGTMPHTGFLDEVFYL

SEQ ID NO: 20576 - protein, 953 aa, Epargyreus clarus
MPNDSLLRCSICADNKHYKGQRGLRIHCSRIHIPRIDPINTTSVANFVSNSDGARNNEPLYLRLANLKHNVRVVKRIPKGARSTVAVSLTERVAKVVAENSFNAWEDLLLFPYKNLHLSNRQQKQSLCSLIKYNTIQNVLPIPNVPTNNQNCIPFRNNILKLIENKISDGDVKGAAKILFSNDTMATRSPETLGALRDKHPTQASSQLPYPSYNPQHEFLRVSEEATKFAIRSFSSGSAGGLDGLTPQHLKDLTDPFLGEAGVNLVKELTALINLMLAGRVPPEITPVLYGANLVALKKKDGGIRPIAVGCTLRRLASKLCCRNYNEPLASRFRPRQLGFGVKGGCEAAVHAARTFLNRKNYEVFLKIDVKNAFNSLDRGALLTEIQKEMPEVFGYMWQSYGTPSKLLFGDNVIESCVGCQQGDPLGPLIFSLAIQPIITQLNSEFNVWYLDDGSLGGTASTVLEDLKIIIQLFNHIGLSLNFNKCEIFFSEKLSVEQCHNIYDQFNSICPNISILEKENLTLLGAPIFDDAFVPIINSKLHHFENISERLFDLKPHMAMYILRLCLFAPKFMYLLRCCPFWKFPSVTHILDTLLQNCLSKILNLKFDDRSWMQATLPVRFGGIGVRTTEGLALPAFLASCHSTLALITEILNTNLNDVRVAYMSEAGEVWSDRFPSEDTSMSEKTKQSVWDTPGLKSVFACLLEGCPDNTDRARLLAVAQSDSGHWLHALPSNNIGTVLDPITLRISIGLRLGARICEPHLCPCGQEVDTLGRHGLSCTRSAGRLYRHGTLNSLIRRALATVSIPATLEPPGLFRDDGKRPDGITLVPWSLGRPLVWDATCVDTLAPSHVSNTSVCAGAAADHAQTLKRRKYNNLLDNYLFAALAIETMGPWSSDMKKFMSDMSAKLVTASGDQKAGGYFAQRLSLAVQQGNAASVLGTMPRTAILDGLFYL

SEQ ID NO: 20577 - protein, 958 aa, Pyrgus malvae
MSLVNNSNGSLLQCSICGDNRYFKGQRGLNIHCSRIHIPRIAAGDEIIPPQSNIATDGGRSNELLHQRLAHLKCNIKLVKRIPKGARASVARSLTECVAKVVSENTSEVWQELLLFAYKTFNIEFKNQKLSLVKRIKQNIINNSIPVSSPQQKSTHLNNSQNKVKIIENKLSDGDIKGAVKILFSDDSMATHSPDTLEALREKHPTATAVSLSTLQGTSHRQNSLRVSEEATENAIRSFPNGSAGGLDGITPQHLKDLTDPFLGEISKDLLRELTSLVNLMLTGRVPSDITPIIYGANLVALKKKDGGIRPIAVGSTLRRLTSKLCCREYRDRFMQKFKPRQLGFGVKGGCEAAVHAARSFLMTQNYDVFLKIDVKNAFNSVNRGAILTEIQKEAPEIFDYIWQCYGTPSKLLFGDNVIESCVGCQQGDPLGPVIFSLVIQSIINQLNSKFNIWYLDDGSLGGTASTVLEDLQILIRRFGDIGLSLNFKKCEVFFSDHLTSEQISNLTEKFNNITPNISIVNKVNLTLLGAPIYDDAISPIINSKLESFNAISDRLFNLQPHMAIYILRLCLFAPKFMYLLRCCPLWKFPLVTEILDNSLKNCVTKILNLKFDDRSWMQATLPIRFGGLGVRTTGGLALPAFLASCHSTCTLITDILNTNLDDVWVPYMMEALDSWSASFPSEDISTMCREKQQTWDLPKIKSDFACLLERCSDSTDRARLLAVAQSESGHWLHALPSMNLGTVVDPATFRIAVGLRLGVEMCEPHICPCGQGVDRFGRHGLSCIRSAGRLFRHGTLNDLVRRTLATASIPATLEPSGLSRSDGKRPDGITLVPWSLGRPLVWDVTCADTLAPTHVRMSAEKAGSAADHAQCLKRRKYSNLSDNYIFTALAMETMGPWSSDMKKFMSEMSHKLVLACGDLRAGGYFAQRLSLTIQRGNAASVLGTMPHTGFLDEVFYL

SEQ ID NO: 20578 - protein, 956 aa, Pyrgus malvae
MQFIVNNNESLLRCPICAGDRVFKGPRGLKIHCSRMHVPRVDVSVNQTLFSAANTGTDGDRNNDPIHKRLAYFKRNIKLVKRIPKGARLTVARSLTECIAKVVSENTTNAWHELLTFAYKILNIENKSTKFSLAKLIKHNSTNNIIPIIHRTCKPYIDTNSQNKIRIVENKLSEGNTKGAIKVLFSDDSLAVHSPDTLDALREKHPTTAALLTRGTDHELISLRVTEEATDRAIRSFSNGSAGGLDGISPQHVKDLTDPFLGDVRKDLLRELTSLLNLMLAGRVPSDITPILYGANLVALKKKDGGIRPIAVGCTLRRLASKLCCREYRERLTQRFKPRQLGFGVNGGCEAAVHAARSFLTQQNFDVFVKIDVKNAFNSVDRGALLSEIQKEIPEIFEYMWQCYGTPSKLLFGDDVIESCVGCQQGDPLGPVIFSLAIQPIINELNSKFNVWYLDDGSLGGTASSVLEDLDIIIRRFDQIGLNLNFNKCEILFSDKLSSDKISSLSQQFNIITPNISVMKKENLLLLGAPIFDEAFSPIINSKLYDFNLISGRLYDLKPHMAIYILRLCLFAPKFMYWLRCCPFWKFISITNILDSSLKDTLSKILNLKFDDRSWMQATLPINFGGLGVRTTGSLALPAFLASCHSTLALISSILNTPIEDVWVAYLTEATECWRASFPDEDTNNILKNKQSAWDITGVKSVYACLLERCSSIADRARLLAVAESESGHWLRALPSQNIGTVLDPTSLRIVVGLRLGAKICEPHLCPCGQQVDRLGRHGLSCTRSAGRLYRHGTLNDLVRRALVTASLPATLEPSGLSRSDGKRPDGMTLVPWHLGRPLVWDVTCVDTLAPSHINNTAERAGSAADQAQVLKRRKYCNLSDNYLFAALAVETLGPWSSDMKKFMSEMSSRLVLACGDLRAGEYFAQRLSLAIQRGNAASVLGAMPNTDILEEVFYL

SEQ ID NO: 20579 - protein, 960 aa, Mellicta athalia
MQFINSSNNNESLLRCPICVGDRVFRGPRGLKIHCSRMHVPRVDVSVNQTIFSAADTGTDGDRSNDPIHTRLAYFKKNIKLVKRIPKGARLTVARSLTECIAKVVSENSTTAWYDLLTFAYKILNIGNRSAKISLTNLIKQNSTNKIIPLIQTAPKFNSNFETKSSNKLKIVENKLSEGDTKGAIKLLFSDDSLAVHSPDTLGALREKHPTTAASPTRGTDHKQISLRVTEEATDRAIRSFSNGSAGGLDGISPQHLKDLTDPFLGDVRKDLLRELTSLLNLMLAGRVPSDITPILYGANLVALKKKDGGIRPIAVGCTLRRLASKLCCREYRERLTQRFKPRQLGFGVNGGCEAAVHAARSFLLHQNFDVFVKIDVKNAFNSVDRGALLSEIQKEVPEIFEYMWQCYGTPSKLLFGDNIIESCVGCQQGDPLGPVIFSLAIQPIIDELNSKFNVWYLDDGSLGGTASSVLEDLDIIIRRFDQIGLSLNFNKCEILFSDNLSTEKITSLSQQFNIITPNISIMKKENLLLLGAPIFFEAFSPIINSKLQNFNLISGRLFDLKPHMATYILRLCLFALKFMYLLRCCPFWKFISITNILDSSLKDTLSKILNLKFDDRSWMQATLPINFGGLGVRTSASLALPAFLASCHSTLTLISSILNTPIEDVRVAYLTEATECWRASFPDEDTNNLIKNKQSAWDIPAVKSVYACLLEQCSSSADRARLLAVAESESGHWLRALPSKNIGTVLDPTTLRIVVGLRLGAKICEPHICPCGQQVDRLGRHGLSCTRSAGRLYRHGTLNDLVRRALVTASLPATLEPSGLSRSDGKRPDGMTLVPWHLGRPLVWDVTCVDTLAPSHINNTAERAGSAADQAQILKRRKYCNLSDNYLFAALAVETLGPWSSDMKKFMSELSSRLVLACGDLRAGEYFAQRLSLAIQRGNAASVLGAMPNTDILEEVFYL

SEQ ID NO: 20580 - protein, 951 aa, Epargyreus clarus
MSSDSLLRCPICVDNKFYKGQRGLKIHCSRIHVPRIEKINIPSASNYINNTDRDRNDEPLHKRLANLKHNIRVVKRIPKGARHAVAVCLTEHVARVVAENSFNAWKDLLLFTFKKLHLNNRTQNQTLTNLIKQNISQNVLPINTSSVNFNSVRNNILKLIENKLSDGDVKGAAKILFSDDTMATRSSETLGALREKHPTPTTSSQLPSPPHSSQRDFLRVSEEATKIAIRSFTNGSAGGLDGLTPQHLKDLTDPSLGEAGVNLVKELTALINIMLAGVVPPEITPVLYGANLVALKKKDGGIRPIAVGCTIRRLASKLCCRNYSELLAIRLKPRQLGFGVKGGCEAAVHAARTFLNNKDYEVFLKIDVKNAFNSVDRGALLAEIQKEMPEIYGYMWQCYGTPSKLLFGDNVIESCVGCQQGDPLGPVIFSLAIQPIIMELNSKFNVWYLDDGSLGGNASTVLEDLKIIIRRFNNIGLSLNFNKCEIFFSEKLSVEQCHHIYGQFNSISPNISILEKANLTLLGAPIFDDAFLPIVNSKLHNFENISERLFDLKPHMAMYILRLCLFAPKFLYLLRCCPFWKFPSVTHILDTHLQNCLSKILNLKFDDRSWMQATLPVRFGGIGVRTTESLALPAFLASCHSTIALISDILNSNLDDVRVTYMPEAEEAWSGCFLDEDISMSDKTKQSVWDTPALKSVFACLLEQCSDNSDRARLLAVAQSESGHWLHALPSNNIGTVLDPITLRISIGLRLGAKICESHFCPCGQEVDTLGRHGLSCIRSAGRLYRHGTLNSLIRRALATVSIPATLEPPGLFRDDGKRPDGITLVPWSLGRPLIWDATCVDTLAPSHLANTSVKAGAAADHAQTLKRRKYSNLLDNYLFAALALETMGPWSSDMKKFMSDMSTKLVTASGDQKAGGYFAQRLSLAVQQGNAASVLGTMPHTAILDGLFYL

SEQ ID NO: 20581 - protein, 951 aa, Epargyreus clarus
MPNDSLLRCSICADNKLYKGIRGLRIHCSRIHIPRIDVVSQDPILATTNPAGGHRNDEPLYKRLAHLKHNIKVVKRIPKGARSIVAMSLTKCVAKVVSENNNNAWEELLLFAYKNLHLHNRSPKQTLCNLIKFNTVQNVIPDNTISINYDPIRNNIVKLIENKISDGDIKGAVKLLFSDDTMATHSPDTLGALRDKHPIPNTSSQLPSPASIPQREILRVSEEATKTAIRSFPNGSAGGLDGLTPQHFKDLTDPLLGEVGKGLLKELTALINLMLEGRVPSSITPIIYGANLVALKKKDGGIRPIAVGCTLRRLVSKLCCRNYTDLLSRQLQPRQLGFGVKGGCEAAVHAARTFLNKNDYDVFVKIDVKNAFNSVDRGPLLAEIQKEMPEIFDYMWQCYGTPSKLLFGDKVIESCVGCQQGDPLGPVMFSLAIQPIITQLNSKFNVWYLDDGSLGGNASTVLEDLQFIIDRFNQIGLNLNFNKCEIFFSDKLSVESCHHIYEQFNLLSPNITIVDKENLTLLGAPIFEDAFLPIINSKLTHFELNSERLYDIKPHMAIYILRLCLFAPKFLYLLRCCPIWKFPTFTHILDLSLKNCVSKILNLQFDDRSWMQATLPIKFGGIGIRRTESLALPAFLASCHSTTTLIADILNISMDDVRVAYMSEATEAWSALFPSEDTSIIDKSKQYIWDMPAIKSVFACLLERCSDNFDRARLLAVAQSESGYWLHALPSSNIGTVLDPVTLRISVGLRLGAKVCESHFCPCGQAVDTLGRHGLSCTRSAGRLYRHGTLNDLIRRALATVSVPATLEPSGLFRDDGKRPDGITLVPWSLGRPLVWDATCVDTLAPSHVGNTSVSAGAAADHAQILKRRKYSNILDNYLFAALAVETMGPWSSDMKKFMSDMSTRLVLASGDQRAGGYFAQRLSLAVQQGNAASVLGTMPHTAILDGLFYL

SEQ ID NO: 20582 - protein, 951 aa, Epargyreus clarus
MPNDSLLRCSICADNKLYKGIRGLRIHCSRIHIPRIDVVSQYPILATTNPSGGHRNDEPLYKRLAHLKHNIKLVKRIPKGARSTVAMSLTKCVAKVVSENNNNAWEELLLFAYKNLHLHNRSPKTTLCNLIKLNTVQNVIPDNTISINYDPIRNNIVKLIENNISDGDIKGAVKLLFSDDTMATHSPDTLGALRDKHPIPNTSSQLPSPASIPQRETLRVSEEATKTAIRSFPNGSAGGLDGLTPQHFKDLTDPLLGEVGKGLLKELTALINLMLEGRVPSSITPIIYGANLVALKKKDGGIRPIAVGCTLRRLVSKLCCRNYNELLSRQLQPRQLGFEVKGGCEAAVHAARTFLNKNDYDVFLKIDVKNAFNSVDRGPLLAEIQKKMPEIFDYMWQCYGTPSKLLFGDKVIESCVGCQQGDPLGPVMFSLAIQPIITQLNSKFNVWYLDDGSLGGNASTVLEDLQFIIDRFNQIGLNLNFNKCEFFFSDKLSVESCHHIYEQFNLLSPNITIVDKENLTLLGAPIFEDAFLAIINSKLTHFELNSERLFDIKPHMAIYILRLCLFAPKFLYLLRCCPIWKFPTFTHILDLSLKNCVSKILNLQFDDRSWMQATLPIKFGGIGIRRTESLALPAFLASCHSTTTLIADILNISMDDVRVAYMSEATEAWSALFPSEDTSINDKSKQYIWDMPAIKSVFACLLERCSDNFDRARLLAVAQSESGYWLHALPSSNIGTVLDPVTLRISVGLRLGAKVCESHFCPCGQAVDTLGRHGLSCTRSAGRLYRHGTLNDLIRRALATVSVPATLEPSGLLRDDGKRPDGITLVPWSLGRPLVWDATCVDTLAPSHVGNTSVSAGAAADHAQILKRRKYSNILDNYLFAALAVETMGPWSSDTKKFMSDMSTRLVLASGDQRAGGYFAQRLSLAVQQGNAASVLGTMPHTAILDGLFYL

SEQ ID NO: 20583 - protein, 956 aa, Pyrgus malvae
MQFIVNNNESLLRCPICAGDRVFKGPRGLKIHCSRMHVPRVDVSVNQTLFSAANTGTDGDRNNDPIHKRLAYFKRNIKLVKRIPKGARLTVARSLTECIAKVVSENTTNAWHELLTFAYKILNIENKSTKFSLAKLIKHNSTNNIIPIIHRTCKPYIDTNSQNKIRIVENKLSEGNTKGAIKVLFSDDSLAVHSPDTLDALREKHPTTAALPTRGTDHELISLRVTEEATDRAIRSFSNGSAGGLDGISPQHLKDLTDPFLGDVRKDLLRELTSLLNLMLAGRVPSDITPILYGANLVALKKKDGGIRPIAVGCTLRRLASKLCCREYRERLTQRFKPRQLGFGVNGGCEAAVHAARSFLTQQNFDVFVKIDVKNAFNSVDRGALLSEIQKEIPEIFEYMWQCYGTPSKLLFGDDVIESCVGCQQGDPLGPVIFSLAIQPIINELNSKFNVWYLDDGSLGGTASSVLEDLDIIIRRFDQIGLNLNFNKCEILFSDKLSSDKISSLSQQFNIITPNISVMKKENLLLLGAPIFDEAFSPIINSKLYDFNLISGRLYDLKPHMAIYILRLCLFAPKFMYWLRCCPFWKFISITNILDSSLKDTLSKILNLKFDDRSWMQATLPINFGGLGVRTTGSLALPAFLASCHSTLALISSILNTPIEDVWVAYLTEATECWRASFPDEDTNNILKNKQSAWDIPAVKSVYACLLERCSSIADRARLLAVAESESGHWLRALPSQNIGTVLDPTSLRIVVGLRLGAKICEPHLCPCGQQVDRLGRHGLSCTRSAGRLYRHGTLNDLVRRALVTASLPATLEPSGLSRSDGKRPDGMTLVPWHLGRPLVWDVTCVDTLAPSHINNTAERAGSAADQAQVLKRRKYCNLSDNYLFAALAVETLGPWSSDMKKFMSEMSSRLVLACGDLRAGEYFAQRLSLAIQRGNAASVLGAMPNTDILEEVFYL

SEQ ID NO: 20584 - protein, 960 aa, Pyrgus malvae
MQFINSINNNESLLRCPICADDRVFRGPRGLKIHCSRMHVPRVDVSVNQTIFSAADTGTDGDRSNDPIHTRHAYFKKNIKLVKRIPKGARLTVARSLTECIARVVSENTTNAWHNLLTFAYKILNIENRSSKISLTNLIKQNSINKIIPLIHTAPKFINNFETNSSNKLKIVENKLSEGDTKGAIKILFSDDSLALHSPDTLGALREKHPTTAASPTRGTDYEQISLRVTEEATDRAIRSFSNGSAGGLDGISPQHLKDLTDPFLGDVRKDLLRELTSLLNLMLAGRVPSDITPILYGANLVALKKKDGGIRPIAVGCTLRRLASKLCCHEFRERLTQRFKPRQLGFGVNGGCEAAVHAARSFLLHQNFEVFVKIDVKNAFNSVDRGALLSEIQKEVPEIFEYMWQSYGTPSKLLFGDNIIESCVGCQQGDPLGPVIFSLAIQPIIDQLNSKFNVWYLDDGSLGGTASSVLEDLDIIIRRFDQIGLSLNFNKCEILFSDNLSAEKISSLSQQFNMITPNISILKKENLILLGAPIFDEAFSPIINSKLEIFNLISGRLFDLKPHMAIYILRLCLFAPKFMYLLRCCPFWKFISITNILDSSLKDTLSKILNLKFDDRSWMQATLPINFGGLGVRTTGSLALPAFLASCHSTLALISSILNTPIEDVWVAYLTEATECWRASFPDEDTNNISKNKQSAWDIPAVKSVYACLLERCSSSADRARLLAVAESESGHWLRALPSKNIGTVLDPTTLRIVVGLRLGAKICEPHLCPCGQQVDRLGRHGLSCTRSAGRLYRHGTLNDLVRRALVTASLPATLEPSGLSRSDGKRPDGMTLVPWHLGRPLVWDVTCVDTLAPSHINNTAERPGSAADQAQVLKRRKYCNLSDNYLFAALAVETLGPWSSDMKKFMSEMSSRLVLACGDLRAGEYFAQRLSLAIQRGNAASVLGAMPNTDILEEVFYL

SEQ ID NO: 20585 - protein, 923 aa, Pyrgus malvae
MHVPRVDDSVNQTLFSVADTGTDGDRSNDPIHKRLAYFKKNIKLVKRIPKGARLTVARSLTDCIAKVVSENTTDAWHDLLLFAYKILNIQNRSTKLSLAKLIKQNSTNNIIPLIQTTSKPNYNLDTNNHNKLKTVENKLSEGNTKGAIKILFSDDTLAVHSPETLDVLREKHPTTSASPTRGTDQEQISLRVTEEATDRAIRSFSNGSAGGLDGISPQHLKDLTDPFLGDVRKDLLRELISLLNLMLAGRVPSDITPILYGANLVALKKKDGGIRPIAVGSTLRRLASKLCCREYRDRLTQWFKPRQLGFGVNGGCEAAVHAARSFLLHQNYDVFVKIDVKNAFNSVDRGALLSEIKKEVPEIFEYMWQSYGTPSKLLFGDNVIESCVGCQQGDPLGPVIFSLAIQPIINQLNSKFNVWYLDDNSLGGTASSVLEDLDIIIRRFDDIGLSLNFNKCEILFSDKLSSDKISSLLEQFNIITPNISVMKKENLVLLGAPIFDEAVSPIINSKLENFILISVHLYDLKPHMAMYILRLCLFAPKFMYLLRCCPIWKFHSITNILDSTLNDSLSKILNLKFDDRSWMQATLPINFGGLGVRTTGSLALPAFLASCHSTLALISSILYTPIEDVWVAHLTEAMEIWRASFPHVDTNSLSKIKQSTWDIPAVKSVYACLLERCPSSVDRARLLAVAESESGHWLRALPSKNIGTVLDSATFRIVVGLRLGAKICEPHLCPCGHQVDRFGRHGLSCTRSAGRLYRHGTLNDLVRRALVTASLPATLEPSGLSRSDGKRPDGVTLVPWHLGRPLVWDVTCVDTLAPSHISNTAERAGSAADQAQLLKRRKYSNLSDNYLFAALAVETLGPWSSDMKKFMSEMSSKLVLACGDLRAGEYFAQRLSLVVQRGNAASVLGTMPNTDILEEVFYL

SEQ ID NO: 20586 - protein, 924 aa, Azonax typhaon
MSLLTSSNVSLLQCPICLDSKLFKGERGLKIHCSRVHIPRTDIVNPTSHSFNNSTVRDCNNDDIHQRLAHLKHNIKLIKRIPKGARPNVARCLTECVAKVVTENSSIAWQDLLFFGYKILNFENRSKKQSLCNLLRQNSIENKFPNINHTERSPFLVSNKLRVVENKLSVGDINGAAKILFSGDSLAAHSAETFEALREKHPSSSASSNIFNSINLQENFLRVSEEATLYAIRSFPNGSSGGLDGITPQHLKDLTDPSLGEAGKDLLKELTNLINLMLSGLVPSDITPVIYGANLVALRKKDGGIRPIAVGCTLRRLTSKLCCRELRVHLSQKFKPRQLGFGVKGGCEAAVHAARTFLSKQNFDVFLKIDVKNAFNSVDRCALLNEILKETPEVFNYLWQCYGTPSKLLFGENVIESCVGCQQGDPLGPVLFSLVIQPIINQLNSEFNVWYLDDGSLGGKASTVLEDLEFIIRSFDHIGLKLNFGKCELFFSDKLNTDKINNITQKFNSITPNINILSKLNLSLLGAPIFDDAFLPIINSKLDNFNLISDLLFDLKPHMALYILRLCLFAPKFIYLLRCCPFWKFREVTYALDTSLKICLSKILNLKFDDRSWMQATLPISFGGLGVRLTESLALPAFLSSCHSTLTLISDILNANLTDVRVAYMGEALDSWRASFPTEDSATLTGSQQSAWDLPGVKKIFACLLERSPDSTDKARLLAVAERESGYWLNVLPSNNIGTVLDPSTLRIAVGLRLGVKVCEPHQCLCGHRVDMFGRHGLSCQRSAGRLFRHGTLNDLVRRALATASIPSTLEPLGLSRCDGKRPDGVTLVPWSLGRPLIWDVTCVDTLAPSHVFDTATNAGAAADHAQCLKRRKYSNLLNDYIFTALAMETMGPWSSDMKKFMSEMSAKLVVSSGDQRAGVYFAQ

SEQ ID NO: 20587 - protein, 954 aa, Spialia orbifer
MSFTSNNVSLLRCPICADEKVFKGQRGLKIHCSRIHVPRIELVSDTSTFQWNNTPIDDGRNNDNIHLRLAYFKSNIKLVKRIPKGARSTVARSLTECVARVVSENTYDAWQNLLFFAYKTLHIGKKPHNMSLCNLIKHNSSENKLPYITQITKRNSNTNNKLKLIENKLSDGDVKGAAKILFSEDTMAMHSPDTLEALREKHPVSAAVTPDLYNNTFQSPLRVGEEATMNAIRSFSNGSAGGLDGISPQHLKDLTDNFLGEVGRNLVRELTNLLNLMLSGKVPSDITSVIYGANLVALKKKDGGIRPIAVGCTLRRLASKLCCREFRERLTLKFKPRQLGFGVKGGCEAAVHAARTFLLQKNFDVFLKIDVKNAFNSVNREALLSEIQKEIPEIFGYIWQCYGTPSKLLFGENVIESCVGCQQGDPLGPVLFSLVILPIINQLNSEFNVWYLDDGSLGGTASTVLEDLDCIIRRFREVGLILNYSKCELYFSEELTNDQIVTLSQKFNTITPNIKILNKQNLTLLGAPIFDDAFSPIVNSKLETFNKISDILFDLKPHMAIYILRLCLFAPKFMYLLRCCPFWKFHSVTDILDSNLQNCLSKILNLNFDDRSWMQATLPIRFGGLGVRTTKSLSLPAFLASCHSTLTLITNILNTNLDDVRVAYAAEALEAWGISFPTEDTSTMIKSQQSAWDMPAIKSVFACLLEQCQDSYDRARLLAVTQSESGHWLHVLPSKNIGTVLDPTTLHIAVGLRLGVKLCEPHKCPCGQEVDKFGRHGLSCTRSAGRLYRHGTINDLVRRALATVSIPATLEPSGLSRNDGKRPDGMTLVPWSLGRPLVWDATCVDTLAPSHVSDTGGRAGAAADHAQSLKRRKYSNLSNNYIFAALAMETMGPWSSDMKKFMSEMSTRLVLASGDPKAGGYFAQRLSIAVQRGNAASVLGTMPHTDILEEIFIL

SEQ ID NO: 20588 - protein, 960 aa, Mellicta athalia
MQFINSSNNNESLLRCPICDGDRVFRGPRGLKIHCSRMHVPRVDVSVNQTIFSAADTGTDGDRSNDPIHTRLAYFKKNIKLVKRIPKGARLTVARSLTECIAKVVSENSTNAWYDLLTFAYKILNIGNRSAKISLTNLIKQNSTNKIIPLIQTAPKFNSNFETNSSNKLKIVENKLSEGDTKGAIKLLFSDDSLAVHSPDTLGALREKHPTTAASPTRGTDHKQISLRVTEEATDRAIRSFSNGSAGGLDGISPQHLKDLTDPFLGDVRKDLLRELTSLLNLMLAGRVPSDITPILYGANLVALKKKDGGIRPIAVGCTLRRLASKLCCREYRERLTQRFKPRQLGFGVNGGCEAAVHAARSFLLHQNFDVFVKIDVKNAFNSVDRGALLSEIQKEVPEIFEYMWQCYGTPSKLLFGDNIIESCVGCQQGDPLGPVIFSLAIQPIIDELNSKFNVWYLDDGSLGGTASSVLEDLDIIIRRFDQIGLSLNFNKCEILFSDNLSTEKITSLSQQFNIITPNISIMKKENLLLLGAPIFFEAFSPIINSKLENFNLISGRLFDLKPHMATYILRLCLFAPKFMYLLRCCPFWKFISITNILDSSLKDTLSKILNLKFDDRSWMQATLPINFGGLGVRTSASLALPAFLASCHSTLTLISSILNTPIEDVRVAYLTEATECWRASFPDEDTNNLTKNKQSAWDIPAVKSVYACLLEQCSSSADRARLLAVAESESGHWLRALPSKNIGTVLDPTTLRIVVGLRLGAKICEPHICPCGQQVDRLGRHGLSCTRSAGRLYRHGTLNDLVRRALVTASLPATLEPSGLSRSDGKRPDGMTLVPWHLGRPLVWDVTCVDTLAPSHINNTAERAGSAADQAQILKRRKYCNLSDNYLFAALAVETLGPWSSDMKKFMSELSSRLVLACGDLRAGEYFAQRLSLAIQRGNAASVLGAMPNTDILEEVFYL

SEQ ID NO: 20589 - protein, 960 aa, Mellicta athalia
MQFINSSNNNESLLRCPICDVDRVFRGPRGLKIHCSRMHVPRVDVSVNQTIFSAADTGTDGDRSNDPIHTRLAYFKKNIKLVKRIPKGARLTVARSLTECIAKVVSENSKNAWYDLLTFAYKILNIGNRSAKISLTNLIKQNSTNKIIPLIQTAPKFNSNFETNSSNKLKIVENKLSEGDTKGAIKLLFSDDSLAVHSPDALGALREKHPTTAASPTRGTDHKQISLRVTEEATDRAIRSFSNGSAGGLDGISPQHLKDLTDPFLGDVRKDLLRELTSLLNLMLAGRVPSDITPILYGANLVALKKKDGGIRPIAVGCTLRRLASKLCCREYRERLTQRFKPRQLGFGVNGGCEAAVHAARSFLLHQNFDVFVKIDVKNAFNSVDRGALLSEIQKEVPEIFEYMWQCYGTPSKLLFGDNIIESCVGCQQGDPLGPVIFSLAIQPIIDELNSKFNVWYLDDGSLGGTASSVLEDLDIIIRRFDQIGLSLNFNKCEILFSDNLSTEKITSLSQQFNIITPNISIMKKENLFLLGAPIFFEAFSPIINSKLENFNLISGRLFDLKPHMATYILRLCLFAPKFMYLLRCCPFWKFISITNILDSSLKDTLSKILNLKFDDRSWMQATLPINFGGLGVRTSASLALPAFLASCHSTLTLISSILNTPIEDVRVAYLTEATECWRASFPDEDTNNLTKNKQSAWDIPTVKSVYACLLEQCSSSADRARLLAVAESESGHWLRALPSKNIGTVLDPTTLRIVVGLRLGAKICEPHICPCGQQVDRLGRHGLSCTRSAGRLYRHGTLNDLVRRALVTASLPATLEPSGLSRSDGKRPDGMTLVPWHLGRPLVWDVTCVDTLAPSHINNTAERAGSAADQAQILKRRKYCNLSDNYLFAALAVETLGPWSSDMKKFMSELSSRLVLACGDLRAGEYFAQRLSLAIQRGNAASVLGAMPNTDILEEVFYL

SEQ ID NO: 20590 - protein, 954 aa, Pyrgus malvae
MSLTDTNNVSLLRCPICADSRFFKGQRGLKIHCSRIHIPRIDAVDQSALSSFDVRAGGDRSDETLHQRLAFLKNNVRLVRRVPKGARLTVARGLTECVARVVSENNSSAWEELFLFAYKTLHLEKNSTKKTSLTNLIKFNTTNHQIPTVAIRRKHSYNKLHLIENKLSDGDVKGAAKILFSEDSMAPCSPDTLDALREKHPASTAASYASTQCTDTTHLPLRVSEEVTLNAIRSFPNGSAGGLDGITPQLLKDLTDPFLGDVGKDLLRELTSLLNLMLAGQVPSDITPIIYGANLVALRKKDGGIRPIAVGCTLRRLASKLCCREYRERLTQKLKPRQLGFGVKGGCEAAVHSARSFLMKQNFDVFVKIDVKNAFNSVDRGAILTVIQKEIPEILDYIWQCYGTPSKLMYGDNVIESCVGCQQGDPLGPVIFSLVIQPIINQLNSEFNVWYLDDGSLGGTASTVLEDLETIIRRFEQTGLSLNFDKCELFFSDLLTEDQILSLTNKFNIITPNINITKKENLSLLGAPIFDDAFVPIINSKLDKFNMISDRLFDIKPHMATYILRLCLFAPKFLYLLRCCPFWKFPLITKSLDLSLQNCLSKILNLNFDDRSWMQATLPVKFGGLGIRTTEGLALPAFLASCHSTLTLITEILNTNVDDVWVAYMMEAIGVWGATFPSEDIPSVSQDRQSTWDIPALKASYASLLERCSDSTDRARLLAVAQSESGHWLHALPSKNIGTVLDPVALRIAVGLRLGVRVCEPHVCPCGQKVDSFGRHGLSCIRSAGRLFRHGTLNDLVRRALATASIPATLEPSGLSRSDGKRPDGVTLVPWSLGRPLVWDVTCADTLAPSHISDTAERVGSAADHAQSLKHRKYSNLSNNYLFAALAVETMGPWSSDMKKFMSEMSTRLILACGDLRAGGYFAQRLSLAIQRGNAASVLGTMPHTDFLDEIFYL

SEQ ID NO: 20591 - protein, 958 aa, Pyrgus malvae
MSLVNNSNGSLLQCSICGDNRYFKGQRGLNIHCSRIHIPRIAAVDEIIPPQSNIATDGGRSNELLHQRLAHLKCNIKLVKRIPKGARASVARSLTECVAKVVSENTSEVWQELLLFAYKTFNIEFKNQKLSLVKRIKQNIINNNIPVLSPQQKSTHLNNSQNKVKIVENKLSDGDIKGAVKILFSDDSMATHSPDTLEALREKHPTATAVSLSTLQGTSHRQNSLRVSEEATENAIRSFPNGSAGGLDGITPQHLKDLTDPFSGEISKDLLRELTSLVNLMLTGRVPSDITPIIYGANLVALKKKDGGIRPIAVGSTLRRLTSKLCCREYRNRFMQKFKPRQLGFGVKGGCEAAVHAARSFLMTQNYDVFLKIDVKNAFNSVNRGAILTEIQKEAPEIFDYIWQCYGTPSKLLFGDNVIESCVGCQQGDPLGPVIFSLVIQSIINQLNSKFNIWYLDDGSLGGTASTVLEDLQILIRRFGDIGLSLNFKKCEVFFSDHLTSEQISNLTEKFNNITPNISIVNKVNLTLLGAPIYDDAISPIINSKLESFNAISDRLFNLQPHMAIYILRLCLFAPKFMYLLRCCPLWKFPLVTEILDNSLKNCVTKILNLKFDDRSWMQATLPIRFGGLGVRTTGGLALPAFLASCHNTCTLITDILNTNLDDVWVPYMMEALDSWSASFPSEDISTMCREKQQTWDLPKIKSDFACLLERCSDSTDRARLLAVAQSESGHWLHALPSMNLGTVLDPATFRIAVGLRLGVEMCEPHICPCGQGVDRFGRHGLSCIRSAGRLFRHGTLNDLVRRALATASIPATLEPSGLSRSNGKRPDGITLVPWSLGRPLVWDVTCADTLAPTHVRMSAEKAGSAADHAQCLKRRKYSNLSDNYIFTALAMETMGPWSSDMKKFMSEMSHKLVLACGDLRAGGYFAQRLSLTIQRGNAASVLGTMPHTGFLDEVFYL

SEQ ID NO: 20592 - protein, 953 aa, Pyrgus malvae
MSFTDNSSVSLLRCPICANSRLFKGERGLRIHCSRIHVPRIGAVDQSELSTFDARADGVRNDEPIHERLAFLKNNVRLVKRVPKGARLTVARSLTECVARVVSENTCSAWHELLLFAYKTLHIEKRSQKISLVNLIKDNTTSHQIPLPSVRIQHASNKINLIENKISDGDIKGAAKILFSEDSIATHSPDTLEALREKHPTSPATSYTSSQCTNPGLLPLRVSEEATRYAIHSFPNGSAGGLDGISPQLLKDLTDPFLGNVGKDLLRELTSLINLMLAGQVPSDITSILYGANLVALRKKDGGVRPIAVGCTLRRLASKLCCREYRERITQTLKPRQLGFGVRGGCEAAVHSARSFLMKQNFDIFVKIDVKNAFNSLDRGAILSVIQKEIPEILEYIRQCYGTPSKLMFGNNIIESCVGCQQGDPLGPLIFSLVIQPIINQLNSEFNVWYLDDGSLGGTASTVLEDLETIIRRFNEIGLCINFSKCELFFSDNLTDEQIDTLLQKIKIITPYINISKKNNLSLLGAPIFDDAFVPIINSKLEKFNTISDRLFDLKPHMATYILRLCLFAPKFLYLLRCCPFWKFPLITKTLDSTLQNCVSKILNLSLDDCAWMQATLPIKFGGLGIRTTESLALPAYLASCHSTLTLITEILSTNLDDVWVAYLTEAMGVWSATFPSEDIPGVSKDRQSTWDVPALKAIYARLLERCPNSTDRARLLAVAQSESGHWLHALPSKNIGTVLDPVALRIAVGLRLGVKVCEPHVCPCGQKVDSFGRHGLSCIRSAGRLFRHGTLNDLIRRALATASIPASLEPSGLSRSDGKRPDGVTLVPWSLGRPLVWDVTCADTLAPSHISDTADRAGSAADHAQSLKRRKYSNLSDNYIFAALAVETMGPWSSDMKKFMSEMSNRLVLACGDHRAGGYFAQRLSLVVQRGNAASVLGTMPHTDFLDEVFYL

SEQ ID NO: 20593 - protein, 950 aa, Urbanus esmeraldus
MPNDSLLRCPICVDHKLFKGQRGLRIHCSRIHIPRVEPVRQNPVPGPIDPSGGVRNDESLHERLAYLKRNVKLVKRIPKGARSTVARVLTECVAKVVAENNTNDWEDLLLFTYKNLHIHNSSGNQTLCNLIKSNTVQNSLPNVTISTNSRVHNNIIKLVENKVSDGDIKSAVKLLFSDDTMATHSPDTLRALREKHPTHNTSPQLPSPVSDPLRPSLKVSEDATMSAIRSFPNGSAGGLDGLSPQHLKDLTDPFLGEVGRGLVRELTALINLMLAGRVPSQITPIIYGANLVALKKKDGGIRPIAVGCTLRRLASKLCCRNYYELLSRQLQPRQLGFGVKGGCEAAVHAARTFLNENDYEVFLKIDVKNAFNSVDRGALLMEIQKGMPEIFDYMWQCYGTPSKLLFGDEVIESCVGCQQGDPLGPVIFSLVIQPIITQLNSKFNVWYLDDGSLGGTASTVLEDLEFIIQRFNEVGLNLNFNKCEIFFSDQLSIEQCHNIYGQFNLLSPNLSIVEKENLTLLGAPIFDNAFFPIINSKLQHFELFSERFYDIKPHMAIYILRLCLFAPKFLYLLRCCPFWKFPSLTHILDMTLKNCLSKILNFKFDDRSWMQATLPIRFGGIGVRTTESLALPAFLASCHSTTTLIADILNISVDDVRVAYMSEAVEAWSVIFPSEDTSKMDKTKQFVWDMPAVKSVFACLLERCLDSSDRARLLAVAQSESGHWLHALPSSNIGTVLDPVTLRISIGLRLGAKVCESHFCPCGQEVDSLGRHGLSCTRSAGRRYRHGTLNDLIRRALATVSIPATLEPAGLFRDDGKRPDGITLVPWSLGRPLVWDATCVDTLAPSHVPNTCVSAGAAADHAQNLKRRKYSNLMDNYLFAALAVETMGPWSSDMKKFMSDMSAKLVLASGDQRAGGYFAQRLSLAIQQGNAASVLGTMPNAAILEGLFYL

SEQ ID NO: 20594 - protein, 952 aa, Epargyreus clarus
MPNDSLLRCSICADNKLYKGIRGLRIHCSRIHIPRIDVFVSQDPVSSNTNPSSGHRNDEPLHKRLAHLKHNIRVVKRIPKGARSTVAMSLTKCVAKVVSENNNNAWEELLLFAYKNLHLHNRSPKQTLCNLIKLNTVQDVIPDNTTSINYNPIRNNIVKLIENKISDGDIKGAVKLLFSDDTMATHSPDTLGALRDKHPIPNTSSQLPSPASFLQPENLRVSEEATKTAIRSFPNGSAGGLDGLTPQHLKDLTDPLLGEVGKGLLKELTALINLMLAGRVPSSITPIIYGANLVALKKKDGGIRPIAVGCTLRRLVSKLCCRNYNELLSRQLQPRQLGFGVKGGCEAAVHAARTFLNKNDYDVFLKIDVKNAFNSVDRGPLLAEIQKEMPEIFDYMWQCYGTPSKLLFGDKVIESCVGCQQGDPLGPVIFSLAIQPIITQLNSKLNVWYLDDGSLGGNASIVLEDLKFIIERFNQIGLDLNFNKCEIFFSDKLSVERCHHIYEQFNLLSPNIAIVDKENLTLLGAPIFEDAFLPIINSKLTHFELNSERLYDIKPHMAIYILRLCLFAPKFLYLLRCCPIWKFPSFTQILDLSLQNCVSKILNLQFDDRSWMQATLPIKFGGIGIRRTESLALPAFLASCHSTTTLIADILNISMDDVRVACMSEATGAWCALFPSEDTSITDKSKQCIWDMPAIKSVFACLLERCSDNFDRARLLAVAQSESGYWLHALPSSNIGTVLDPVTLRISVGLRLGAKVCESHLCPCGQVVDELGRHGLSCTRSAGRLYRHGTLNDLIRRALATVSVPATLEPSGLFRDDGKRPDGITLVPWSLGRPLVWDATCVDTLAPSHVGNTSVSAGAAADHAQILKRRKYSNILDNYLFAALAVETMGPWSSDMKKFMSDMSTRLVLASGDQRAGGYFAQRLSLAVQQGNAASVLGTMPHTAILDGLFYL

SEQ ID NO: 20595 - protein, 953 aa, Pyrgus malvae
MSFTDNSSVSLLRCPICANSRLFKGERGLGIHCSRIHVPRIGAVDQSELSTFDARADGVRNEEPIHERLAFLKNNVRLVKRVPKGARLTVARSLTECVARVVSENTCSAWHELLLFAYKTLHIEKRSQKISLVNLIKDNTTSHQIPLPSVRIQHTSNKINLIENKISDGDIKGAAKILFSEDSIATHSPDTLEALREKHPTSPATSYTSSQCTDPGLLPLRVSEEATRYAIHSFPNGSAGDLDGISPQLLKDLTDPFLGDVGKDLLRELTSLINLMLAGQVPSDITSILYGANLVALRKKDGGVRPIAVGCTLRRLASKLCCREYRERITQTLKPRQLGFGVGGGCEAAVHSARSFLMKQNFDIFVKIDVKNAFNSLDRGAILSVIQKEIPEILEYIRQCYGTPSKLMFGNNIIESCVGCQQGDPLGPVIFSLVIQPIINQLNSEFNVWYLDDGSLGGTASTVLEDLETIIRRFNEIGLCINFSKCELFFSDNLTDEQIDTLLQKIKIITPDINISKKNNLSLLGAPIFDDAFVPIINSKLEKFNTISDRLFDLKPHMATYILRLCLFAPKFLYLLRCCPFWKFPLITKTLDSTLQNCVSKILNLNLDDCAWMQATLPIKFGGLGIRTTESLALPAYLASCHSTLTLITEILSTNLDDVWVAYLTEAMGVWSATFPSEDIPGVSKDRQSTWDVPALKAIYARLLERCPNSTDRARLLAVAQSESGHWLHALPSKNIGTVLDPVALRIAVGLRLGVKVCEPHVCPCGQKVDSFGRHGLSCIRSAGRLFRHGTLNDLVRRALATASIPASLEPSGLSRSDGKRPDGVTLVPWSLGRPLVWDVTCADTLAPSHISDTADRAGSAADHAQSLKRRKYSNLSDNYIFAALAVETMGPWSSDMKKFMSEMSNRLVLACGDLRAGGYFAQRLSLVVQRGNAASVLGTMPHTDFLDEVFYL

SEQ ID NO: 20596 - protein, 956 aa, Pyrrhopyge zenodorus
MSLISSNNASLVQCPICADSKRFKGQRGLKIHCSRMHVPRTDTVNQIFTSNNTVTDRYCNNDEVYQRLADFKHNVYLVKRIPKGARITVARYLTECVAKVVDENTHNAWQDLLFFAYKILNIKNRHKNQSLCSLIKQNTIDNTMPFFTKVSKSNKVTINNKIRLIENKLSVGDVNGAAKILFSNDTLATHCPDTLAALREKHPTSSAATHSPSQCTCDQEKFLTVSEEATLTTIRSFSNGSAGGLDGISPQHLKDLTDPFLGEVGKDLVRELTRLINLMLVGKVPCDIIPIIYGANLVALKKKDGGIRPIAVGCTLRRLASKLCCREYREQLTQKFKPRQLGFGVKGGCEAAVHAARTFLTKGNFDVFLKIDVKNAFNSVDRDALLTQIKKEIPEIYNYIRQCYGTPSKLLFGNNVIESCVGCQQGDPLGPVLFSLVLQPIINQLNSEFNVWYLDDGSLGGTALTVLEDLEFIIRRFSNVGLTLNFSKCELFFSDELTTDEIFSLSQKFNDITPNINILDKTKLTLLGAPIFDDAFLPIINSKLNNFNSISNDLFDLKPHMALYILRLCLFAPKFIYLLRCCPFWKFHSMTNALDTNLRNCLSKILNLKFDYRSWMQATLPIKFGGLGVRTTESLALPAFLASCHSTLALITDILNTNLADVRVTYMEEALGAWSQSYPNADITTLQTGKQSAWDLPAVKSVFACVLEQCTDSTDKARLLAVAQSDAGYWLNALPSKNIGTVLDATTLRIAVGLRLGVKICEPHVCPCGQLVDMFGRHGLSCTRSAGRLYRHGALNDLVRRALATVSVPAVLEPPGLLRNDGKRPDGMTLVPWSLGRHLVWDVTCVDTLAPSHVSNTATCAGAAADYAQSRKRRKYSNLIEDYLFTALAVETMGPWSSDTKKFMSEMSTRLVLVSGDQRAGGYLAQRLSLIVQRGNAASVLGTMPHKDILDEVFFL

SEQ ID NO: 20597 - protein, 900 aa, Mellicta athalia
MQFINSSNNNESLLRCPICDGDRVFRGPRGLKIHCSRMHVPRVDVSVNQTIFSAADTGTDGDRSNDPIHTRLAYFKKNIKLVKRIPKGARLTVARSLTECIAKVVSENSTNAWYDLLTFAYKILNIGNRSAKISLTNLIKQNSTNKIIPLIQTAPKFNSNFETNSSNKLKIVENKLSEGDTKGAIKLLFSDDSLAVHSPDTLGALREKHPTTAASPTRGTDHKQISLRVTEEATDRAIRSFSNGSAGGLDGISPQHLKDLTDPFLGDVRKDLLREPTSLLNLMLAGRVPSDITPILYGANLVALKKKDGGIRPIAVGCTLRRLASKLCCREYRERLTQRFKPRQLGFGVNGGCEAAVHAARSFLLHQNFDVFVKIDVKNAFNSVDRGALLSEIQKEVPEIFEYMWQCYGTPSKLLFGDNIIESCVGCQQGDPLGPVIFSLAIQPIIDELNSKFNVWYLDDGSLGGTASSVLEDLDIIIRRFDQIGLSLNFNKCEILFSDNLSTEKITSLSQQFNIITPNISIMKKENLLLLGAPIFFEAFSPIINSKLENFNLISGRLFDLKPHMATYILRLCLFAPKFMYLLRCCPFWKFISITNILDSSLKDTLSKILNLKFDDRSWMQATLPINFGGLGVRTSASLALPAFLASCHSTLTLISSILNTPIEDVRVAYLTEATECWRASFPDEDTNNLIKNKQSAWDIPAVKSVYACLLEQCSSSADRARLLAVAESESGHWLRALPSKNIGTVLDPTTLRIVVGLRLGAKICEPHICPCGQQVDRLGRHGLSCTRSAGRLYRHGTLNDLVRRALVTASLPATLEPSGLSRSDGKRPDGMTLVPWHLGRPLVWDVTCVDTLAPSHINNTAERAGSAADQAQILKRRKYCNLSDNYLFAALAVETLGPW

SEQ ID NO: 20598 - protein, 951 aa, Epargyreus clarus
MSSDSLLRCPICVDNKFYKGQRGLKIHCSRIHVPRIEKINIPSASNYINNTDRDRNDEPLHKRLANLKHNIRVVKRIPKGARHAVAVCLTEHVARVVAENSFNAWKDLLLFTFKKLHLNNRTQNQTLTNLIKQNISQNVLPINTSSVNFNSVRNNILKLIENKLSDGDVKGAAKILFSDDTMATRSSETLGALREKHPTPTTSSQLPSPPRSSQRDFLRVSEEATKIAIRSFPNGSAGGLDGLTPQHLKDLTDPSLGEAGVNLVKELTALINIMLAGVVPPEITPVLYGANLVALKKKDGGIRPIAVGCTIRRLASKLCCRNYSELLAIRLKPRQLGFGVKGGCEAAVHAARTFLNNKDYEVFLKIDVKNAFNSVDRGALLAEIQKEMPEIFGYMWQCYGTPSKLLFGDNVIESCVGCQQGDPLGPVIFSLAIQPIIMELNSKFNVWYLDDGSLGGNASTVLEDLKIIIRRFNNIGLSLNFNKCEIFFSEKLSVEQCHHIYGQFNSISPNISILEKENLTLLGAPIFDDAFLPIVNSKLHNFENISERLFDLKPHMAMYILRLCLFAPKFLYLLRCCPFWKFPSVTHILDTLLQNCLSKILNLKFDDRSWMQATLPVRFGGIGVRTTESLALPAFLASCHSTIALISDILNSNLDDVRVTYMPEAEEAWSGCFPAEDISMSDKTKQSVWDTPALKSVFACLLEQCSDNSDRARLLAVAQSESGHWLHALPSNNIGTVLDPITLRISIGLRLGAKICESHFCPCGQEVDTLGRHGLSCIRSAGRLYRHGTLNSLIRRALATVSIPATLEPPGLFRDDGKRPDGITLVPWSLGRPLIWDATCVDTLAPSHLANTSVKAGAAADHAQTLKRRKYSNLLDNYLFAALALETMGPWSSDMKKFMSDMSTRLVTASGDQKAGGYFAQRLSLAVQQGNAASVLGTMPHTAILDGLFYL

SEQ ID NO: 20599 - protein, 960 aa, Pyrgus malvae
MQFINSSNNNESLLRCPICAGDRVFRGPRGLKIHCSRMHVPRVDVSVNQSIFSVANTGTDGDRSNDPIHTRLAYFKKNIKLVKRIPKGARLTVARSLTECIAKVVSENSTNAWYDLLTFAYKILNIGNRSAKISLTNVIKQNSTNKVIPLIQTAPKFNSNFETNSSNKLKIVENKLSGGDTKGAIKLLFSDDSLAVHSPDTLGALREKHPTTAASPTRGTDHKQISLRVTEEATDRAIRSFSNGSAGGLDGISPQHLKDLTDPFLGDVRKDLLKELTSLLNLMLAGRVPSDITPILYGANLVALKKKDGGIRPIAVGCTLRRLASKLCCREYRERLTQRFKPRQLGFGVNGGCEAAVHAARSFLLHQNFDVFVKIDVKNAFNSVDRGALLSEIQKEVPEIFEYMWQCYGTPSKLLFGDNIIESCVGCQQGDPLGPVIFSLAIQPIIDQLNSKFNVWYLDDGSLGGTASSVLEDLDIIIRRFDQIGLSQNFNKCEILFSDNLSTEKISSLSQQFNIITPNISIMKKENLLLLGAPIFDEAFSPIINSKLENFNLISGHLFDLKPHMATYILRLCLFAPKFMYLLRCCPFWKFISITNILDSSLKDTLSKILNLKFDDRSWMQATLPINFGGLGVRTSASLALPAFLASCHSTLTLISSILNTPIDDVWVAYLTEATECWRASFPDEDTSNLTKNKQSAWDILAVKSVYACLLEQCSSSADRARLLAVAESESGHWLRALPSKNIGTVLDPTTLRIVVGLRLGSKICEPHICPCGQQVDRLGRHGLSCTRSAGRLYRHGTLNYLVRRALVTASLPATLEPSGLSRSDGKRPDGMTLVPWHLGRPLVWNVTCVDTLAPSHINNTAERAGSAADQAQILKRRKYCNLSDNYLFAALAVETLGPWSSDMKKFMSEMSSRLVLACGHLRAGEYFAQRLSLAIQRGNAASVLGAMPNTDILEEVFYL

SEQ ID NO: 20600 - protein, 954 aa, Pyrgus malvae
MSLTDTNNVSLLRCPICADSRFFKGQRGLKIHCSRIHIPRIDAVDQSALASFDVRAGGDRSDETLHQRLAFLKNNVRLVRRVPKGARLTVARCLTKCVARVVSENNSSAWEELFLFAYKTLHLEKNSTKKTSLTNLIKFNTTNHQIPTVAIRLKHSYNKLHLIENKLSDGDVKGAAKILFSEDSMAPCSPDTLDALREKHPTSTTASYASTQSTDTTHLPLRVSEEATLNAIRSFPNGSAGGLDGITPQLLKDLTDPFLGDVGKDLLRELTSLLNLMLAGQVPSDITPIIYGANLVALRKKDGGIRPIAVGCTLRRLASKLCCREYRERLTQKLKPRQLGFGVKGGCEAAVHSARSFLMKQNFDVFVKIDVKNAFNSVDRGAILTVIQKEIPEILDYIWQCYGTPSKLMYGDNVIDSCVGCQQGDPLGPVIFSLVIQPIINQLNSEFNVWYLDDGSLGGTASTVLEDLETILRRFEQIGLSLNFDKCELFFSDHLTEDQILSLTNKFNIITPNINITKKENLSLLGAPIFDDAFVPIINSKLDKFNMISDRLFDIKPHMATYILRLCLFAPKFLYLLRCCPFWKFPLITKSLDLSLQNCLSKILNLNFDDRSWMQATLPVKFGGLGIRTTESLALPAFLASCHSTLALITEMLNTNVDDVWVAYMMEAIGVWGATFPSEDIPSVSKDRQSTWDIPALKASYASLLERCFDSTDRARLLAVAQSESGHWLHALPSKNIGTMLDPVALRIAVGLRLGVRVCEPHVCPCGQKVDSFGRHGLSCIRSAGRLFRHGTLNDLVRRALATASIPATLEPSGLSRSDIKRPDGVTLVPWSLGRPLVWDVTCADTLAPSHISDTADRVGSAADHAQSLKHRKYSNLSNNYLFAALAVETMGPWSSDMKKFMSEMSTRLILACGDLRAGGYFAQRLSLAIQRGNAASVLGTMPHTDFLDEIFYL

SEQ ID NO: 20601 - protein, 948 aa, Agara michaeli
MSIVTSNNVSLLHCPICADNKLFKGQRGLRIHCSRKHIPRIDTVYQLSSSAFTIDGFCNNDDIHKRLAHFKHNINLVKRIPKGARSNVARCLTDCIAKVVTENSSNAWQGLLFFAYKILHIENRPEKQTLCTLIKQNIVDNKFPDKLKIHSNTDSVPNNKKLKLIENKISLGDVKGAAKILFSDDTMAMHSTDTLEALREKHPTSAASHNPSLFTDLQGDSLRVNEEATLNAIRSFSNGSAGGLDGITPQHLKDLTDPLLGQLGQDLLKEITKLINLMLAGKVPSDISPIIYGANLVALKKKDGGIRPIAVGCTLRRLTSKLCCREYRQRLVQKFKPRQLGFGVKGGCEAAVHAARTFLSNNNFDVLLKIDVKNAFNSVDRGALLTEIKKEIPEVYNYLWQCYGAPSKLLFGDNVIDSCVGCQQGDPLGPVLFSLVLQPIINQLNSEFNVWYLDDGSLGGSASTVLEDLDFIIRRFSHVGLHLNFSKCELYFSEDLTNVQMNTIVQKFNNITPCIKILNKKNLSLLGAPIFDDAFLPMINSKLEKFTSISDLLFDLKPHMALYILRLCLFAPKFMFLIRCCPFWKFQSVTNTLDTSLQNCLTKILNLKFDDRSWMQATLPIRFGGLGVRKIESLALPAFLASCHSTLTLITDILYTNLSDVRVVYMAEALETWRVSFPSVDTSTLNLAQQGSWDLPGVKAVFACLLERCSDSTDKARLLAVAKSESGYWLNALPSKNIGTVLDPTTLRLAVGLRLGVKVCEPHLCPCGHLVDRFGRHGLSCIRSAGRLFRHGTLNDLIRRALATVSIPATVEPVGLFRSDGKRPDGMSLVPWSLGRCLVWDVTCVDTLAPSHVSDTATNAGAAADRAQCLKCRKYSNLLHNYIFAALAMETMGTWSSDTKKFVSEMSTNLLWPPVTKGLATFSRRGSASPYSAGTPPVFWEPCHKRTF

SEQ ID NO: 20602 - protein, 960 aa, Mellicta athalia
MQFINSSNNNESLLRCPICDGDRVFRGPRGLKIHCSRMHVPRVDVSVNQTIFSAADTGTDGDRSNDPIHTRLAYFKKNIKLVKRIPKGARLTVARSLTECIAKVVSENSTNAWYDLLTFAYKILNIGNRSAKISLTNLIKQNSTNKIIPLIQTAPKFNSNFETNSSNKLKIVENKLSVGDTKGAIKLLFSDDSLAVHSPDTLGALREKHPTTAASPTRGTDHKQISLRVTEEATDRAIRSFSNGSAGGLDGISPQHLKDLTDPFLGDVRKDLLRELTSLLNLMLAGRVPSDITPILYGANLVALKKKDGGIRPIAVGCTLRRLASKLCCREYRERLTQRFKPRQLGFGVNGGCEAAVHAARSFLLHQNFDVFVKIDVKNAFNSVDRGALLSEIQKEVPEIFEYMWQCYGTPSKLLFGDNIIESCVGCQQGDPLGPVIFSLAIQPIIDELNSKFNVWYLDDGSLGGTASSVLEDLDIIIRRFDQIGLSLNFNKCEILFSDNLSTEKITSLSQQFNIITPNISIMKKENLLLLGAPIFFEAFSPIINSKLENFNLISGRLFDLKPHMATYILRLCLFAPKFMYLVRCCPFWKFISITNILDSSLKDTLSKILNLKFVDRSWMQATLPINFGGLGVRTSASLALPAFLASCHSTLTLISSILNTPIEDVRVAYLTEATECWRASFPDEDINNLTKNKQSAWDIPAVKSVYACLLEQCSSSADRARLLAVAESELGHWLRALPSKNIGTVLDPTTLLIVVGLRLGAKICEPHICPCGQQVDRLGRHGLSCTRSAGRLYRHGTLNDLVRRALVTASLPATLEPSGLSRSDGKRPDGMTLVPWHLGRPLVWDVTCVDTLAPSHINNTAERAGSAADQAQILKRRKYCNLSDNYLFAALAVETLGPWSSDMKKFMSELSSRLVLACGDLRAGEYFAQRLSLAIQRGNAASVLGAMPNTDILEEVFYL

SEQ ID NO: 20603 - protein, 951 aa, Epargyreus clarus
MSSDSLLRCPICVDNKFYKGQRGLKIHCSRIHVPRIEKINIPSTSNYINNTDRDRNDEPLHKRLANLKHNIRVVKRIPKGARHAVAVCLTEHVARVVAENSFNAWKYLLLFTFKKLHLNNRTQNQTLTNLIKQNISQNVLPINTSSVNFNSVRNNILKLIENKLSDGDVKGAAKILFSDDTMATRSPETLGALREKHPTPTTSSQLPSPPRSSQRDFLRVSEEATKIAIRSFPNGSAGGLDGLTPQHLKDLTDPSLGEAGVNLVKELTALINIMLAGVVPPEITPVLYGANLVALKKKDGGIRPIAVGCTIRRLASKLCCRNYSELLAIRLKPRQLGFGVKGGCEAAVHAARTFLNNKDYEVFLKIDVKNAFNSVDRGALLAEIQKEMPEIFGYMWQCYGTPSKLLFGDNVIESCVGCQQGDPLGPVIFSLAIQPIIMELNSKFNVWYLDDGSLGGNASTVLEDLKIIIRRFNNIGLSLNFNKCEIFFSEKLSVEQCHHIYGQFNSISPNISILEKENLTLLGAPIFDDAFLPIVNSKLHNFENISERLFDLKPHMAMYILRLCLFAPKFLYLLRCCPFWKFPSVTHILDTLLQNCLSKILNLKFDDRSWMQATLPVRFGGIGIRTTESLALPAFLASCHSTIVLISDILNSNLDDVRVTYMPEAEEAWSDCFPAEDISMSDKTKQSVWDTPALKSVFACLLEQCSDNSDRARLLAVAQSESGHWLHALPSNNIGTVLDPITLRISIGLRLGAKICESHFCPCGQEVDTLGRHGLSCIRSAGRLYRHGTLNSLIRRALATVSIPATLEPPGLFRDDGKRPDGITLVPWSLGRPLIWDATCVDTLAPSHLANTSVKAGAAADHAQTLKRRKYSNLLDNYLFAALALETMGPWSSDMKKFMSDMSTRLVTASGDQKAGGYFAQRLSLAVQQGNAASVLGTMPHTAILDGLFYL

SEQ ID NO: 20604 - protein, 951 aa, Epargyreus clarus
MSSDSLLRCPICVDNKFYKGQRGLKIHCSRIHVPRIEKINIPSASNYINNTDRDRNDEPLHKRLANLKHNIRVVKRIPKGARHAVAVCLTEYVARVVAENSFNAWKDLLLFTFKKLHLNNRTQNQTLTNLIKQNISQNVLPINTSSVNFNSVRNNILKLIENKLSDGDVKGAAKILFSDDTMATRSSETLGALREKHPTPTTSSQLPSPPHSSQRDFLRVSEEATKIAIRSFTNGSAGGLDGLTPQHLKDLTDPSLGEAGVNLVKELTALINIMLAGVVPPEITPVLYGANLVALKKKDGGIRPIAVGCTIRRLASKLCCRNYSELLAIRLKPRQLGFGVKGGCEAAVHAARTFLNNKDYEVFLKIDVKNAFNSVDRGALLAEIQKEMPEIYGYMWQCYGTPSKLLFGDNVIESCVGCQQGDPLGPVIFSLAIQPIIMELNSKFNVWYLDDGSLGGNASTVLEDLKIIIRRFNNIGLSLNFNKCEIFFSEKLSVEQCHHIYGQFNSISPNISILEKANLTLLGAPIFDDAFLPIVNSKLHNFENISERLFDLKPHMAMYILRLCLFAPKFLYLLRCCPFWKFPSVTHILDTHLQNCLSKILNLKFDDRSWMQATLPVRFGGIGVRTTESLALPAFLASCHSTIALISDILNSNLDDVRVTYMPEAEEAWSGCFPDEDISMSDKTKQSVWDTPALKSVFACLLEQCSDNSDRARLLAVAQSESGHWLHALPSNNIGTVLDPITLRISIGLRLGAKICESHFCPCGQEVDTLGRHGLSCIRSAGRLYRHGTLNSLIRRALATVSIPATLEPPGLFRDDGKRPDGVTLVPWSLGRPLIWDATCVDTLAPSHLANTSVKAGAAADHAQTLKRRKYSNLLDNYLFAALALETMGPWSSDMKKFMSDMSTKLVTASGDQKAGGYFAQRLSLAVQQGNAASVLGTMPHTAILDGLFYL

SEQ ID NO: 20605 - protein, 956 aa, Jonaspyge tzotzili
MSSISLNNVSLLQCPICADNKRFKGQRGLKIHCSRIHVPRIDTVNQTLPSNSTVTDRYCNNDEVHQRLADLKHNIRLVKRIPKGARSNVARCFTECIAKVVDENTPNTWQDLLFFAYKILNIENRQQNQSLCSLIKQNSIANRFPFIKNDSKCNEVTFNNKLRLVENKLSVGNVNGAAKILFSNDTLATYSSDTLEALREKHPTSSAAPHNPSQCTSQQVNILTVSEEATLNAIRSFPNGSAGGLDSITPQHLKDLTDPFLGEVGRDLVRELTRLINLMLVGKVPSDITPILYGANLVALKKKDGGIRPIAVGCTLRRLASKLCCRIYREKLTQKFKPRQLGFGVKGGCEAAVHAARTFITKQNFDVFLKIDVKNAFNSVDRGALLAEIEKEIPEMYNYIRQCYGTPSKLLFGNNVIDSCVGCQQGDPLGPVLFSLVLQPIINQLNSEFNVWYLDDGSLGGSALTVLEDLEFIIRRFSNVGLTLNFCKCELFFSDELTSDQIFKLSQKFNAITPNINILNKKTLTLLGAPIFDDAFLPIINSKLNNFNLFSNDLLELKPHMALYILRLCLFAPKFMYLLRCCPFWKFHSVTNALDTCLQNCLSKILNLKFDHRSWMQATLPISFGGLGVRTTESLALPAFLASCHSTLTLITDILNTNLVDVRVTYMVEALEAWRGSFPSEDITTLATSKQSAWDLPAVKAVFACVLELCTDSTDKARLLGVAQSESGYWLNALPSRNIGTVLDPTALRIAVGLRLGVKLCEPHVCPCGQEVDMFGRHGLSCTRSAGRLYRHGALNDLVRRALATVSVPAVLEPPGLLRNDGKRPDGMTLVPWSFGRHLVWDVTCVDTLAPSHVKNTATYAGAAAEYAQSLKRRKYSNLMGDYIFTALALETMGPWSADTKKFMSEMSTKLVLVSGDQRAGNYFAQRFSLLIQRGNAASVLGTMPQRDILDEVFFL

SEQ ID NO: 20606 - protein, 923 aa, Mellicta athalia
MHVPRVDVSVNQTIFSAADTGTDGDRSNDPIHTRLAYFKKNIKLVKRIPKGARLTVARSLTECIAKVVSENSTNAWYDLLTFAYKILNIGNRSAKISLTNLIKQNSTNKIIPLIQTAPKFNSNFETNSSNKLKIVENKLSEGDTKGAIKLLFSDDSLAVHSPDTLGALREKHPTTAASPTRGTDHKQISLRVTEEATDRAIRSFSNGSAGGLDGISPQHLKDLTDPFLGDVRKDLLRELTSLLNLMLAGRVPSDITPILYGANLVALKKKDGGIRPIAVGCTLRRLASKLCCREYRERLTQRFKPRQLGFGVNGGCEAAVHAARSFLLHQNFDVFVKIDVKNAFNSVDRGALLSEIQKEVPEIFEYMWQCYGTPSKLLFGDNIIESCVGCQQGDPLGPVIFSLAIQPIIDELNSKFNVWYLDDGSLGGTASSVLEDLDIIIRRFDQIGLSLNFNKCEILFSDNLSTEKITSLSQQFNIITPNISIMKKENLLLLGAPIFFEAFSPIIYSKLENFNLISGRLFDLKPHMATYILRLCLFAPKFMYLLRCCPFWKFISITNILDSSLKDTLSKILNLKFDDRSWMQATLPINFGGLGVRTSASLALPAFLASCHSTLTLISSILNTPIEDVRVAYLTEATECWRASFPDEDTNNLIKNKQSAWDIPAVKSVYACLLEQCSSSADRARLLAVAESESGHWLRALPSKNIGTVLDPTTLRIVVGLRLGAKICEPHICPCGQQVDRLGRHGLSCTRSAGRLYRHGTLNDLVRRALVTASLPATLEPSGLSRSDGKRPDGMTLVPWHLGRPLVWDVTCVDTLAPSHINNTAERAGSAADQAQILKRRKYCNLSDNYLFAALAVETLGPWSSDMKKFMSELSSRLVLACGDLRAGEYFAQRLSLAIQRGNAASVLGAMPNTDILEEVFYL

SEQ ID NO: 20607 - protein, 954 aa, Pyrgus malvae
MSLTDTNNVSLLRCPICADSRFFKGQRGLKIHCSRIHIPRIDAVDQSALSSFDVRAGGDRSDETLHQRLAFLKNNVRMVRRVPKGARLTVARGLTECVARVVSENNSSTWEELFLFAYKTLHLEKNSTKKTSLTNLIKFNTTNHQIPTVAIRRKHSYNKLHLIENKLSDGDVKGAAKILFSEDSMAPCSPDTLDALREKHPASTAASYASTQCTDTTHLPLRVSEEVTLNAIRSFPNGSAGGLDGITPQLLKDLTDPFLGDVGKDLLRELTSLLNLMLAGQVPSDITPIIYGANLVALRKKDGGIRPIAVGCTLRRLASKLCCREYRERLTQKLKPRQLGFGVKGGCEAAVHSARSFLMKQNFDVFVKIDVKNAFNSVDRGAILTVIQKEIPEILDYIWQCYGTPSKLMYGDNVIESCVGCQQGDPLGPVIFSLVIQPIINQLNSEFNVWYLDDGSLGGTASTVLEDLETIIRRFEQTGLSLNFDKCELFFSDLLTEDQILSLTNKFNIITPNINITKKENLSLLGAPIFDDAFVPIINSKLDKFNMISDRLFDIKPHMATYILRLCLFAPKFLYLLRCCPFWKFPLITKSLDLSLQNCLSKILNLNFDDRSWMQATLPVKFGGLGIRTTEGLALPAFLASCHSTLTLITEILNTNVDDVRVAYMMEAIGVWGATFPSEDIPSVSQDRQSTWDIPALKASYASLLERCSDSTDRARLLAVAQSESGHWLHALPSKNIGTVLDPVALRIAVGLRLGVRVCEPHVCPCGQKVDSFGRHGLSCIRSAGRLFRHGTLNDLVRRALATASIPATLEPSGLSRSDGKRPDGVTLVPWSLGRPLVWDVTCADTLAPSHISETAERVGSAADHAQSLKHRKYSNLSNNYLFAALAVETMGPWSSDMKKFMSEMSTRLILACGDLRAGGYFAQRLSLAIQRGNAASVLGTMPHTDFLDEIFYL

SEQ ID NO: 20608 - protein, 923 aa, Pyrgus malvae
MHVPRVDDSVNQTLFSVADTGTDGDRSNDPIHKRLAYFKKNIKLVKRIPKGARLTVARSLTDCIAKVVSENTTDAWHDLLLFAYKILNIQNRSTKLSLAKLIKQNSTNNIIPLIQTTSKPNNNLDTNNHNKLKTIENKLSEGNTKGAIKILFSDDTLAVHSPETLDVLREKHPMTSASPTRGTDQEQISLRVTEEATDRAIRSFSNGSAGGLDGISPQHLKDLTDPFLGDVRTDLLRELTSLLNLMLAGRVPSDITPILYGANLVALKKKDGGIRPIAVGSTLRRLASKLCCREYRDRLTQWFKPRQLGFGVNGGCEAAVHAARSFLLHQNYDVFVKIDVKNAFNSVDRGALLSEIKKEVPEIFEYMWQSYGTPSKLLFGDNVIESCVGCQQGDPLGPVIFSLAIQPIINQLNSKFNVWYLDDGSLGGTASSVLEDLDIIIRRFDDIGLSLNFNKCEILFSDKLSSHKISSLLEQFNIITPNISVMKKENLVLLGAPIFDEAVSPIINSKLENFILISGRLYDLKPHMAMYILRLCLFAPKFMYLLRCCPIWKFHSITNILDSMLNDSLSKILNLKFDDRSWMQATLPINFGGLGVRTTGSLALPAFLASCHSTLALISSILYTPIEDVWVAYLTEAMELWRASFPHVDTNSLSKNKQSTWDIPAVKSVYACLLERCPSSVDRARLLAVAASESGHWLRALPSKNIGTVLDPATFRIVVGLRLGAKICEPHLCPCGHQVDRFGRHGLSCTRSAGRLYRHGTLNDLVRRALVTASLPATLEPSGLSRSDGKRPDGVTLVPWHLGRPLVWDVTCVDTLAPSHISNTAERAGSAADQAQLLKRRKYSNLSDNYLFAALAVETLGPWSSDMKKFMSEMSSKLVLACGDLRAGEYFAQRLSLVVQRGNAASVLGTMPNTDILEEVFYL

SEQ ID NO: 20609 - protein, 960 aa, Mellicta athalia
MQFINSSNNNESLLRCPICDGDRVFRGPRGLKIHCSRMHVPRVDVSVNQTIFSAADTGTDGDQSNDPIHTRLAYFKKNIKLVKRIPKGARLTVARSLTECIAKVVSENSTNAWYDLLTFAYKILNIGNRSAKISLTNLIKQNSTNKIIPLIQTAPKFNSNFETNSSNKLKIVENKLSEGDTKGAIKLLFSDDSLAVHSPDTLGALREKHPTTAASPTRGTDHKQISLRVTEEATDRAIRSFSNGSAGGLDGISPQHLKDLTDPFLGDVRKDLLRELTSLLNLMLAGRVPSDITPILYGANLVALKKKDGGIRPIAVGCTLRRLASKLCCREYRERLTQRFKPRQLGFGVNGGCEAAVHAARSFLLHQNFDVFVKIDVKNAFNSVDRGALLSEIQKEVPEIFEYMWQCYGTPSKLLFGDNIIESCVGCQQGDPLGPVIFSLAIQPIIDELNSKFNVWYLDDGSLGGTASSVLEDLDIIIRRFDQIGLSLNFNKCEILFSDNLSTEKITSLSQQFNIITPNISIMKKENLLLLGAPIFFEAFSPIINSKLENFNLISGRLFDLKPHMATYILRLCLFAPKFMYLLRCCPFWKFISISNILDSSLKDTLSKILNLKFDDRSWMQATLPINFGGLGVRTSASLALPAFLASCHSTLTLISSILNTPIEDVRVAYLTEATECWRASFPDEDTNNLTKNKQSAWDIPAVKSVYACLLEQCSSSADRARLLAVAESESGHWLRALPSKNIGTVLDPTTLRIVVGLRLGAKICEPHICPCGQQVDRLGRHGLSCTRSAGRLYRHGTLNDLVRRALVTASLPATLEPSGLSRSDGKRPDGMTLVAWHLGRPLVWDVTCVDTLAPSHINNTAERAGSAADQAQILKRRKYCNLSDNYLFAALAVETLGPWSSDMKKFMSELSSRLVLACGDLRAGEYFAQRLSLAIQRGNAASVLGAMPNTDILEEVFYL

SEQ ID NO: 20610 - protein, 960 aa, Mellicta athalia
MQFINSSNNNESLLRCPICDGDRVFRGPRGLKIHCSRMHVPRVDVSVNQTIFSAADTGTDGDRSNDPIHTRLAYFKKNIKLVKRIPKGARLTVARSLTECIAKVVSENSTNAWYDLLTFAYKILNIGNRSAKISLTNLIKQNSTNKIIPLIQTAPKFNSNFETNSSNKLKIVENKLSEGDTKGAIKLLFSDDSLAVHSPDTLGALREKHPTTAASPTRGTDHKQISLRVTEEATDRAIRSFSNGSAGGLDGISPQHLKDLTDSFLGDVRKDLLRELTSLLNLMLAGRVPSDITPILYGANLVALKKKDGGIRPIAVGCTLRRLASKLCCREYRERLTQRFKPRQLGFGVNGGCEAAVHAARSFLLHQNFDVFVKIDVKNAFNSVDRGALLSEIQKEVPEIFEYMWQCYGTPSKLLFGDNIIESCVGCQQGDPLGPVIFSLAIQPIIDELNSKFNVWYLDDGSLGGTASSVLEDLDIIIRRFDQIGLSLNFNKCEILFSDNLSTEKITSLSQQFNIITPNISIMKKENLLLLGAPIFFEAFSPIINSKLENFNLISGRLFDLKPHMATYILRLCLFAPKFMYLLRCCPFWKFISITNILDSSLKDTLSKILNLKFDDRSWMQATLPINFGGLGVRTSASLALPAFLASCHSTLTLISSILNTPIEDVRVAYLTEATECWRASFPDEDTNNLIKNKQSAWDIPAVKSVYACLLEQCSSSADRARLLAVAESESGHWLRALPSKNIGTVLDPTTLRIVVGLRLGAKICEPHICPCGQQVDRLGRHGLSCTRSAGRLYRHGTLNDLVRRALVTASLPATLEPSGLSRSDGKRPDGMTLVPWHLGRPLVWDVTCVDTLAPSHINNTAERAGSAADQAQILKRRKYCNLSDNYLFAALAVETLGPWSSDMKKFMSELSSRLVLACGDLRAGEYFAQRLSLAIQRGNAASVLGAMPNTDILEEVFYL

SEQ ID NO: 20611 - protein, 957 aa, Zopyrion sandace
MNNNNDNRSLLRCPICADGRLFKGKRGLRIHCSRMHVPRVDDSVNPTISSSSYIHTDGERNDTPIHQRLAYFKTNIRLVKRIPKGARLTVARSLTECIARVVSENTANAWHDLLLFAYRILNLENRSENTSLVKLIKQNSINNKIPTILPKSFNTVNANIQNKLKLIENKVSDGDIKGAAKLLFSDDYLAMHSPDTLEALREKHPSTAASLNPAPCAVLEHNFLSVSEEATESAIRSFSNGSAGGLDGISPQHLKDLTDPFLGEVGKDLLRELSKLLNLMLAGRVPSDITSILYGANLVALRKKDGGIRPIAVGCTLRRLASKLCCREYRERLTRKFKPRQLGFGVNGGCEAAVHAARSFLLQQNFDVFVKIDVKNAFNSVDRGALLSEIQKEIPEIFGYMWQCYGSPSKLLFGENVIESCVGCQQGDPLGPVIFSLAIQPIINQLNSKFNVWYLDDGSLGGSASSVLEDLDIIIRRFDEIGLSLNFSKCEILFSDRLTTDQIFCLSQKFNIVTPNITIMQKNNFSLLGAPIFDEAFSPIINSKLDHFNLISDRLFDLKPHMALYILRLCLFAPKFMYLLRCCPFWKFPLVTQILDSTLQNCLSKILNLNFDDHSWTQATLPINFGGLGVRTTESVALPAFLASCHSTLTLITDILNMNLNDVWVAYMTEADETWRASFPGEDTNKIFKNKQSAWDLPGIKAVFACLLERCSNSIDRARLLAVAQRESGHWLQALPSKNIGTVLDPVTLRIAVGLRLGVKICEPHLCPCGKLVDRFGRHGLSCTRSAGRWYRHGTLNDLVRRALATASLPATLEPAGLSRSDGKRPDGITLVPWSLGRPLVWDVTCVDTLAPSHVSDTAERAGSAADQAQGLKRRKYSNLSDSYIFAALALETLGPWSSDMKKFMSEMSTRLVLACGDLRAGCYFSQRLSLAIQRGNAASVLGTMPHSDLLDEIFYL

SEQ ID NO: 20612 - protein, 951 aa, Telegonus azul
MPNDSLLRCPICADHKYYKGQRGLTIHCSRKHIPRIESVNTASFSNYVNITDGVRNDEPLYQRLAGLKHNVRVVKRIPKGARTTVALSLTKCVAKVVAENSCNAWEELLFFPYKNLHLNNRSHKQSLCNLIKNNTIQNVLPTHKIFADSNVIRNNLIKLIENKISDGDIKGAAKILFSNDTMATHSPETLDALRDKHPTVTTHSQLPNHSFNQQHEFLTVSEEATKVAIRSFSNGSAGGLDGLTPQHLKDLTDPFLGEAGVNLSKELTALINLMLAGRVPSQITPVLYGANLVALKKKDGGIRPIAVGCTLRRLASKLCCRNYSERLAGRFMPRQLGFGVKGGCEAAVHSARTFLTSSDYEVFLKIDVKNAFNSVDRGTFLTEIQKEMPEIFDYMWQCYGTPSKLLFGNNVIDSCVGCQQGDPLGPAIFSLAIQPIITQLNSEFNVWYLDDGSLGGHASTVLEDLKFIVQRFDQIGLSLNFNKCELFFSEKLSVEQCHNIYGQFDLISPNLSILDKQNLTLLGAPIFDDAFFPIINSKLHHFEMISDRFYELKPHMALYILRLCLFAPKFMYLLRCCPFFKFPSVTHILDTSLQNCLSKILNLKFDDRSWMQATLPIRLGGIGVRTTESLALPAFLSSCHSTITLITDILNSNLDDVRVTYMSEAEGAWSALFPSEDISILEKTKQSVWDTPALKSVYACLLERCVDNFDRARLLAVAQSESGHWLHALPSINIGTVLDPITLRISIGLRLGAKICESHVCPCGHGVDILGRHGLSCTRSAGRLYRHGTLNNLIRRALATVSIPAGLEPAGLFRDDGKRPDGITLVPWSLGRPLVWDATCVDTLAPSHINNTCVSAGAAADHAQALKRRKYNNLLDNYLFAALAIETMGPWSSDMKKFMSDMSTKLVHASGDPRAGGYFAQKLSLAVQQGNAASVLGTMPHADILDGLFYL

SEQ ID NO: 20613 - protein, 962 aa, Mellicta athalia
MQFINSSNNNESLLRCPICDGDRVFRGPRGLKIHCSRMHVPRVDVSVNQTIFSAADTGTDGDRSNDPIHTRLAYFKKNIKLVKRIPKGARLTVARSLTECIAKVVSENSTNAWYDLLTFAYKILNIGNRSAKISLTNLIKQNSTNKIIPLIQTAPKFNSNFETNSSNKLKIVENKLSEGDTKGAIKLLFSDDSLAVHSPDTLGALREKHPTTAASPTRGTDHKQISLRVTEEATDRAIRSFSNGSAGGLDGISPQHLKDLTDPFLGDVRKDLLRELTSLLNLMLAGRVPSDITPILYGANLVALKKKDGGIRPIAVGCTLRRLASKLCCREYRERLTQPQRFKPRQLGFGVNGGCEAAVHAARSFLLHQNFDVFVKIDVKNAFNSVDRGALLSEIQKEVPEIFEYMWQCYGTPSKLLFGDNIIESCVGCQQGDPLGPVIFSLAIQPIIDELNSKFNVWYLDDGSLGGTASSVLEDLDIIIRHFDQIGLSLNFNKCEILFSDNLSTEKITSLSQQFNIITPNISIMKKENLLLLGAPIFFEAFSPIINSKLENFNLISGRLFDLKPHMATYILRLCLFAPKFMYLLRCCPFWKFISITNILDSSLKDTLSKILNFKFDDRSWMQATLPINFGGLGVRTSASLALPAFLASCHSTLTLISSILNTPIEDVRVAYLTEATECWRASFPDEDTNNLTKNKQSAWDIPAVKSVYACLLEQCSSSADRARLLAVAESESGHWLRALPSKNIGTVLDPTTLRIVVGLRLGAKICEPHICPCGQQVDSLGRHGLSCTRSAGRLYRHGTLNDLVRRALVTASLPATLEPSGLSRSDGKRPDGMTLVPWHLGRPLVWDVTCVDTLAPSHINNTAERAGSAADQAQILKRRKYCNLSDNYLFAALAVETLGPWSSDMKKFMSELSSRLVLACGDLRAGEYFAQRLSLAIQRGNAASVLGAMPNTDILEEVFYL

SEQ ID NO: 20614 - protein, 953 aa, Epargyreus clarus
MPHDSLLRCSICADNKYYKGERGLRIHCSRIHIPRIHPINTTCVANVVSNSDGARNNEPLYLRLANIKHNVRVVKRIPKGARSTVAVSLTERVAKVVAENSFNAWEDLLLFPYKNLHLSNRQQKQSLCNLIKYNTNQNVLPILNIPTNNQNCIPFRNNILKLIENKISDGDMKGAAKILFSNDTMATRSPETLGALRDKHPTQASSQLPYPSYNPQHEFLRVSEEATKFAIRSFSSGSAGGLDGLTPQHLKDLTDPFLGEAGVSLVKELTALINLMLAGRVPPEITPVLYGANLVALKKKDGGIRPIAVGCTLRRLASKLCCRNYNEPLASRFRPRQLGFGVKGGCEAAVHAARTFLNRKKYEVFLKIDVKNAFNSVDRGALLTEIQKEMPEIFGYMWQSYGTPSKLLFGDNVIESCVGCQQGDPLGPIIFSLAIQPIITQLNSEFNVWYLDDGSLGGTASTVLEDLKIIIQRFNHIGLSLNFNKCEIFFSEKLSVEQCHNIYDQFNSICPNISILEKENLTLLGAPIFDDAFAPIINSKLHHFENISERLFDLKPHMAIYILRLCLFAPKFMYLLRCCPFWKFPSVTHILDTLLQNCLSKILNLKFDDRSWMQATLPVRFGGIGVRTTESLALPAFLASCHSTLALITEILNTNLNDVRVAYMSEAVEVWSDRFPSEDTSMSEKTKQSVWDTPGLKSVFACLLERCPDNTDRARLLAVAQSDSGHWLHALPSNNIGTVLDPITLRISIGLRLGARICEPHFCPCGQEVDTLGRHGLSCTRSAGRLYRHGTLNSLIRRALATVSIPATLEPPGLFRDDGKRPDGITLVPWSLGRPLVWDATCVDTLAPSHVSNTSVCAGAAADHAQTLKRRKYNNLLDNYLFAALAIETMGPWSSDMKKFMSDMSTKLVTASGDQKAGGYFAQRLSLAVQQGNAASVLGTMPHTAILDGLFYL

SEQ ID NO: 20615 - protein, 923 aa, Mellicta athalia
MHVPRVDVSVNQTIFSAADTGTDGDRSNDPIHTRLAYFKKNIKLVKRIPKGARLTVARSLTECIAKVVSENSTNAWYDLLTFAYKILNIGNRSAKISLTNLIKQNSTNKIIPLIQTAPKFNSNFETNSSNNLKIVENKLSEGDTKGAIKLLFSDDSLAVHSPDTLGALREKHPTTAASPTRGTDHKQISLRVTEEATDRAIRSFSNGSAGGLDGISPQHLKDLTDPFLGDVRKDLLRELTSLLNLMLAGRVPSDITPILYGANLVALKKKDGGIRPIAVGCTLRRLASKLCCREYRERLTQRFKPRQLGFGVNGGCEAAVHAARSFLLHRNFDVFVKIDVKNAFNSVDRGALLSEIQKEVPEIFEYMWQCYGTPSKLLFGDNIIESCVGCQQGDPLGPVIFSLAIQPIIDELNSKFNVWYLDDGSLGGTASSVLEDLDIIIRRFDQIGLSLNFNKCEILFSDNLSTEKITSLSQQFNIITPNISIMKKENLLLLGAPIFFEAFSPIINSKLENFNLISGRLFDLKPHMATYILRLCLFAPKFMYLLRCCPFWKFISITNILDSSLKDTLSKILNLKFDDRSWMQATLPINFGGLGVRTSASLALPAFLASCHSTLTLISSILNTPIEDVRVAYLTEATECWRASFPDEDTNNLTKNKQSAWDIPAVKSVYACLLEQCSSSADRARLLAVAESESGHWLRALPSKNIGTVLDPTTLRIVVGLRLGAKICEPHICPCGQQVDRLGRHGLSCTRSAGRLYRHGTLNDLVRRALVTASLPATLEPSGLSRSDGKRPDGMTLVPWHLGRPLVWDVTCVDTLAPSHINNTAERAGSAADQAQILKRRKYCNLSDNYLFAALAVETLGPWSSDMKKFMSELSSRLVLACGDLRAGEYFAQRLSLAIQRGNAASVLGAMPNTDILEEVFYL

SEQ ID NO: 20616 - protein, 960 aa, Mellicta athalia
MQFINSSNNNESLLRCPICDGDRVFRGPRGLKIHCSRMNVPRVDVSVNQTIFSAADTGTDGDRSNDPIHTRLAYFKKNIKLVKRIPKGARLTVARSLIECIAKVVSENSTNAWYDLLTFAYKILNIGNRSAKISLTNLIKQNSTNKIIPLIQTAPKFNSNFETNSSNKLKIVENKLSEGDTKGAIKLLFSDDSLAVHSPDTLGALREKHPTTAASPTRGTDHKQISLRVTEEATDRAIRSFSNGSAGGLDGISPQHLKDLTDPFLGDVRKDLLRELTSLLNLMLAGRVPSDITPILYGANLVALKKKDGGIRPIAVGCTLRRLASKLCCREYRERLTQRFKPRQLGFGVNGGCEAAVHAARSFLLHQNFDVFVKIDVKNAFNSVDRGALLSEIQKEVPEIFEYMWQCYGTPSKLLFGDNIIESCVGCQQGDPLGPVIFSLAIQPIIDELNSKFNVWYLDDGSLGGTASSVLEDLDIIIHRFDQIGLSLNFNKCEILFSDNLSTEKITSLSQQFNIITPNISIMKKENLLLLGAPIFFEAFSPIINSKLENFNLISGRLFDLKPHMATYILRLCLFAPKFMYLLRCCPFWKFISITNILDSSLKDTLSKILNLKFDDRSWMQATLPINFGGLGVRTSASLALPAFLASCHSTLTLISSILNTPIEDVRVAYLTEATECWRASFPDEDTNNLIKNKQSAWDIPAVKSVYACLLEQCSSSADRARLLAVAESESGHWLRALPSKNIGTVLDPTTLRIVVGLRLGAKICEPHICPCGQQVDRLGRHGLSCTRSAGRLYRHGTLNDLVRRALVTASLPATLEPSGLSRSDGKRPDGMTLVPWHLGRPLVWDVTCVDTLAPSHINNTAERAGSAADQAQILKRRKYCNLSDNYLFAALAVETLGPWSSDMKKFMSELSSRLVLACGDLRAGEYFAQRLSLAIQRGNAASVLGAMPNTDILEEVFYL

SEQ ID NO: 20617 - protein, 960 aa, Mellicta athalia
MQFINSSNNNESLLRCPICDGDRVFRGPRGLKIHCSRMHVPRVDVSVNQTIFSAADTGTDGDRSNDPIHTRLAYFKKNIKLVKRIPKGARLTVARSLTECIAKVVSENSTNAWYDLLTFAYKILNIGNRSAKISLTNLIKQNSTNKIIPLIQTAPKFNSNFETNSSNKLKIVENKLSEGDTKGAIKLLFSDDSLAVHSPDTLGALREKHPTTAASPTRGTDHKQISLRVTEEATDRANRSFSNGSAGGLDGISPQHLKDLTDPFLGDVRKDLLRELTSLLNLMLAGRVPSDITPILYGANLVALKKKDGGIRPIAVGCTLRRLASKLCCREYRERLTQRFKPRQLGFGVNGGCEAAVHAARSFLLHQNFDVFVKIDVKNAFNSVDRGALLSEIQKEVPEIFEYMWQCYGTPSKLLFGDNIIESCVGCQQGDPLGPVIFSLAIQPIIDELNSKFNVWYLDDGSLGGTASSVLEDLDIIIRRFDQIGLSLNFNKCEILFSDNLSTEKITSLSQQFNIITPNISIMKKENLLLLGAPIFFEAFSPIINSKLENFNLISGRLFDLKPHMATYILRLCLFAPKFIYLLRCCPFWKFISITNILDSSLKDTLSKILNLKFDDRSWMQATLPINFGGLGVRTSASLALPAFLASCHSTLTLISSILNTPIEDVRVAYLTEATECWRASFPDEDTNNLTKNKQSAWDIPAVKSVYACLLEQCSSSADRARLLAVAESESGHWLRALPSKNIGTVLDPTTLRIVVGLRLGAKICEPHICPCGQQVDRLGRHGLSCTRSAGRLYRHGTLNDLVRRALVTASLPATLEPSGLSRSDGKRPDGMTLVPWHLGRPLVWDVTCVDTLAPSHINNTAERAGSAADQAQILKRRKYCNLSDNYLFAALAVETLGPWSSDMKKFMSELSSRLVLACGDLRAGEYFAQRLSLAIQRGNAASVLGAMPNTDILEEVFYL

SEQ ID NO: 20618 - protein, 960 aa, Mellicta athalia
MQFINSSNNNESLLRCPICDGDRVFRGPRGLKIHCSRMHVPRVDVSVNQTIFSAADTGTDGDRSNDPIHTRLAYFKKNIKLVKRIPKGARLTVARSLTECIAKVVSENSTNAWYDLLTFAYKILNIGNRSAKISLTNVIKQNSTNKIIPLIQTAPKFNSNFETNSSNKLKIVENKLSEGDTKGAIKLLFSDDSLAVHSPDTLGALREKHPTTAASPTRGTDHKQISLRVTEEATDRAIRSFSNGSAGGLDGISPQHLKDLTDPFLGDVRKDLLRELTSLLNLMLAGRVPSDITPILYGANLVALKKKDGGIRPIAVGCTLRRLASKLCCREYRERLTQRFKPRQLGFGVNGGCEAAVHAARSFLLHQNFDVFVKIDVKNAFNSVDRGALLSEIQKEVPEIFEYMWQCYGTPSKLLFGDNIIESCVGCQQGDPLGPVIFSLAIQPIIDELNSKFNVWYLDDGSLGGTASSVLEDLDIIIRRFDQIGLSLNFNKCEILFSDNLSTEKITSLSQQFNIITPNISIMKKENLLLLGAPIFFEAFSPIINSKLENFNLISGRLFDLKPHMATYILRLCLFAPKFMYLLRCCPFWKFISITNILDSSLKDTLSKILNLKFDDRSWMQATLPINFGGLGVRTSASLALPAFLASCHSTLTLISSILNTPIEDVRVAYLTEATECWRASFPDEDTNNLTKNKQSAWDIPAVKSVYACLLEQCSSSADRARLLAVAESESGHWLRALPSKNIGTVLDPTTLRIVVGLRLGAKICEPHICPCGQQVDRLGRHGLSCTRSAGRLYRHGTLNDLVRRALVTASLPATLEPSGLSRSDGKRPDGMTLVPWHLGRPLVWDVTCVDTLAPSHINNTAERAGSAADQAQILKRRKYCNLSDNYLFAALAVETLGPWSSDMKKFMSELSSRLVLACGDLRAGEYFAQRLSLAIQRGNAASVLGAMPNTDILEEVFYL

SEQ ID NO: 20619 - protein, 920 aa, Pyrgus malvae
MHFVSRIHNNESLLRCPICAGDRVFKGPRGLKIHCSRMHVPRVDVSVNQTLISAANTGADGDRSNDPIHKRLAYFKKNIKLVKRIPKGARLTVARSLTECIAKVVSENTTNAWHDLLTFAYKILNIENRSTKISLAKLIKQNSTKNIIPSIQTTPKPYNNLESNSHIKLKIVENKLSEGNTKGAIKILFSDDSLAAHSPETLDALCEKHPTTSASPTRGTDQEHISLRVTEEATDRAIRSFSNGSAGGLDGISPQHLKDLTDPFLGDVRKDLLRELTSLLNLMLAGRVPSDITPILYGANLVALKKKDGGIRPIAVGSTLRRLASKLCCREYRERLTQRFKPRQLGFGVNGGCEAAVHAARSFLQQQNFEVFVKIDVKNAFNSVDRGAILSEIQKEVPEIFEYMWQCYGTPSKLLFGDNVIESCVGCQQGDPLGPVIFSLAIQPIINQLNSKFNAWYLDDGSLGGTASSVLEDLDIIIRRFDDIGLSLNFNKCEILFSDKLSTDKISSLLEQFNIITPNISVMKKENLILLGAPIFDEAVSPIINSKLENFNLISRRLFDLKPHMAMYILRLCLFAPKFMYLLRCCPFWKFHSITNILDSTLKDTLSKILNLKFDDRSWMQATLPINFGGLGVRTSESLALPAFLASCHSVLALISSILNSPIEDVWVAYLTEATEVWRASFPDVDTNNMSRNKQSAWDIPAVKSVYACLLERCSRGVDRARLLAVAESESGHWLRALPSKNIGTVLDPSTFRIVVGLRLGAKICEPHLCPCGQQVDRFGRHGLSCTRSAGRLYHHGTLNDLVRRALVTASLPATLEPSGLSRSDGKRPDGITLVPWHLGRPLVWDVTCVDTLAPSHICDTAERAGSAADQAQLLKRRKYSNLSDNYLFSALAVETLGPWSSDMKKFVQTCSSLWRPKSW

SEQ ID NO: 20620 - protein, 956 aa, Pyrgus malvae
MSVMNNSNGSLLQCSICGDNRYFKGQRGLNIHCSRIHIPRIASVDHIVSPIDATDGVHSDEPLHQRLAHLKHNIKLVKRIPKGARASVARSLTECVAKVASENTSEVWQELLLFAYKTFHIEFRKQKVSLVKRIKQNIINNSIPISSSQQKSTNLNSSHNKLKNIEKKLSDGDIKGAVKILFSDDSMATHSPDTLDALREKHPTATKVSLNTLQCTGHRNNSLRVSEEATENAIRSFPNGSAGGLDGITPQHLKDLTDPFLGQISKDLLRELTSLVNLMLTGRVPSDITPIVYGANLVALKKKDGGIRPIAVGSTLRRLTSKVCCREYRDRFVQKFKPRQLGFGVKGGCEAAVHAARSFLMTQHYDLFLKIDVKNAFNSVNRGAILTEIQKEAPEIFDYIWQCYGTPSKLLFGDNVIESCVGCQQGDPLGPVIFSLVIQSIINQLNSKFNIWYLDDGSLGGTASTVLEDLQILIRRFSDIGLSLNFKKCEVFFSDHLTSEQISNLTEKLNNITPNIIIVKKDNLTLLGAPIFDDAISPIINSKLENFNSISDRFFNLQPHMAIYILRLCLFAPKFLYLLRCCPLWKFPLVTEILDNCLKNCVTKILNLKFDDRSWMQATLPIRFGGLGVRTTEGLALPAFLASCHSTCTLITEILNTNLDDVWVPYMMEALDSWNASFPSEDMSNICKEKQYSWDLPKIKSVFACLLERCTDSTDRARLLAVAQSESGHWLHALPSMNIGTVLDPATFRIAVGLRLGVEMCEPHICPCGQGVDRFGRHGLSCTRSAGRLFRHGTLNDLVRRALATASIPATLEPSGLSRSDGKRPDGTTLVPWSLGRPLIWDVTCADTLAPTHVKMSAEKAGSAADHAQCLKRRKYSNLSDNYIFTALAMETMGPWSSDMKKFMSEMSHKLVLACGDLRAGGYFAQRLSLTIQRGNAASVLGTMPHTGFLDEVFYL

SEQ ID NO: 20621 - protein, 924 aa, Cecropterus takuta
MNNVSLLRCPICADNKYYKGERGLKIHCSRIHIPRIEPFTTFNSIPIYTNSSDGVSNNEPLYQRLASLKRNIRLVKRIPKGARSTVALSLTECVAKVVTENSFNSWEELLLFSYKNLHLSNTSRKQSLSTLIKLNTAQNVLPHQTQTKSIPFNNNNTLQLIENKLSDGDVKGAAKILFSDDTMATHSSETLEALRDKHPTPTTDSQLPNPSFNLQHEFLTVSEDATKSAIRSFSNGSAGGLDGLSPQHLKDLTDPFLGEAGVNLVKELTALINLMLAGRVPSQITPILYGANLVALKKKDGGIRPIAVGCTLRRLASKLCCRNYSELLAGRFKPRQLGFGVKGGCEAAVHAARTFLNRNDYDVFLKIDVKNAFNSVDRGTLLTEIQKEMPHIFGYMWQCYGTPSKLLFGDNVIDSCVGCQQGDPLGPVIFSLALQPIIKQLNSEFNVWYLDDGSLAGSASTVLEDLKFIIHRFHQIGLVLNFNKCEIYFSEKLSVEQCHNIYGQFNSISPNISIVEKENLTLLGAPIFDDAFLPIINSKLQHFDNISDRLFKLKPHMALYILRLCLFAPKFLYLLRCCPFWKFPLVTHNLDTVLQNCLSKILNLKFDDLSWMQATLPIRFGGIGIRTTESLALPAFLASCHSTITLISEILNSNLDDVRVSYMSEAEGAWSAFFPNVDLLTIEKTKQSAWDTPALKSVFSCLLERYSDNSDRARLLAVAQSESGHWLHALPSNNIGTVLDPITLRISIGLRLGAKICESHFCPCGQEVDSLGRHGLSCIRSAGRLYRHGTLNNLIRRALATVSIPATLEPVGLFRDDGKRPDGITLVPWSLGRPLIWDATCVDTLAPSHISSTSVSAGAAADHAQNLKRRKYNNLLDNYLFAALAIETMGPWSSDMKKFMSDMSAKLVQASGDQKAGGYFAQRL

SEQ ID NO: 20622 - protein, 958 aa, Zopyrion sandace
MPLINNSDVSLLRCSICADNRYFKGQRGLKIHCSRMHVPRIDAVNQSVPLSSDICTGGDRSDEPLHQRLAHLKSNVKLIKRIPKSARASVARSLTECIAKVVSENTYDVWQNLLLFSYKILNIDIKRKKNSLVKHLKQNITDNCVPFTSSNKNIVYANNTPNKLKFIESKLSDGDVKGAAKILFSDDSLATHSADTLEALRDKHPTATAVSFSDFQRTGSRQISLTVSEEATENAIRSFPNGSAGGLDGITPQHLKDLSDPFLGQIAKDLLRELTALVNLMLTGRVPSDITPIIYGANLVALKKKDGGIRPIAVGSTLRRLTSKLCCREYRDRFMNKLKPRQLGFGVRGGCEAAVHAARSFLMTQSYDVFLKIDVKNAFNSVNRGTLLTEIQKEAPEIFDYIWQCYGTPSKLLFGDNVIESCVGCQQGDPLGPVIFSLAIQPIINQLNSEFNVWYLDDGSLGGAASTVLKDLDIIIRHFKEIGLSLNFSKCEIFFSDHLSLQEISTLSQNFNSVTPNIKIVKKEHLTLLGAPIFDDAIAPIINSKLQNFNSISDHIFNLKPHMAIYILRLCLFAPKFLYLLRCCPLWKFSLLTDTLDTTLKNCVSKILNLKFDDRSWTQATLPIKFGGLGIRTTGGLALPAFLASCHSTCTLITEILNKNLDDVWVPYLTEAMGAWSASFPSEDISKIHKEQQFAWDLPAIKSIFACLLERCPSSTDRARLIAVAQSESGHWLHALPSINIGTVLDPTTLRIAVGLRLGVEMCEPHICPCGHEVDRFGRHGLSCARSAGRLFRHGTLNDLIRRALATASIPASLEPSGLSRSDGKRPDGITLVPWHLGRPLVWDVTCADTLAQSHISESAKKAGSAADHAQYLKRRKYSNLSDNYIFAALAVETMGPWSSDMKKFMSEMSTRLVLACGDLRAGGYFAQRLSLAIQRGNAASVLGTMPHTGFLDEVFYL

SEQ ID NO: 20623 - protein, 956 aa, Pyrrhopyge sergius
MSLISSYNASLLQCPICADTQRFKGQRGLKIHCSRMHVPRTDTVNQIFTSNNTVTDRYCNNDEVYQRLADLKHNVYLVKRIPKGARITVARYLTECVAKVVDENTQNAWQNLLFFAYRILNIKNRHQKQTLCSLIKKNITDNQIPFFSKDYKSNKITTNNKIRLIENKLSVGDVNGAAKILFSNDTLATHCPDTLAALREKHPTSSAATHSPSQCTSDQEKFLRVSEEATLNTIRSFSNGSAGGLDGISPQHLKDLTDPFLGEVGKDLVRELTRLINLMLVGKVPCDIIPVIYGANLVALKKKDGGIRPIAVGCTLRRLASKLCCREYREQLTQKFKPRQLGFGVKGGCEAAVHAARTFLTKQNFDVFLKIDVKNAFNSVDRDALLTQIKKEIPEIYNYIRQCYGTPSKLLFGNNVIESCVGCQQGDPLGPVLFSLVLQPIINQLNSEFNVWYLDDGSLGGTALTVLEDLEFIIRRFSNVGLTLNFNKCELFFSDELTTDEIFSLSRKFNNITPNINILDKTKLTLLGAPIFDDAFLPIINSKLDNFNSISNNLFDLKPHMALYILRLCLFAPKFIYLLRCCPFWKFHSMTNALDTSLQNCLSKILNLKFDYRSWMQATLPIKFGGLGVRTTESLALPAFLASCHSTLTLITDILNTNLADVRVTYMEEALGAWSQSYPNADITTLQTGKQSAWDLPAVKSVFACVLELCTDSTDKARLLAVAQSDAGYWLNALPSKNIGTVLDPTTLRIAVGLRLGVKICEPHVCPCGQVVDMFGRHGLSCTRSAGRLYRHGALNDLVRRALATVSVPAVLEPPGLLRNDGKRPDGMTLVPWSLGRHLVWDVTCVDTLAPSHVSNTATCAGAAADYAQSRKRRKYSNLIEDYLFTALAVETMGPWSSDTKKFMSEMSTRLVLVSGDQRAGSYLAQRLSLIVQRGNAASVLGTMPHKDILDEVFFL

SEQ ID NO: 20624 - protein, 953 aa, Epargyreus clarus
MPHDSLLRCSICADNKYYKGERGLRIHCSRIHIPRIHPINTTSVANVVSNSDGARNNKPLYLRLANLKHNLRVVKRIPKGARSTVAVSLTERVAKVVAENSFNAWEDLLLFPYKNLHLSNRQQKQSLCNLIKYNTNQNVLPILNIPTNNQNCIPFRNNILKLIENKISDGDMKGPAKILFSNDTMATRSPETLGALRDKHPTQASSQLPYPSYNPQHEFLRVSEEATKFAIRSFSSGSAGGLDGLTPQHLKDLTDPFLGEAGVSLVKELTALINLMLAGRVPPEITPVLYGANLVALKKKDGGIRPIAVGCTLRRLASKLCCRNYNEPLASRFRPRQLGFGVKGGCEAAVHAARTFLNRKKYEVFLKIDVKNAFNSVDRGALLTEIQKEMPEIFGYMWQSYGTPSKLLFGDNVIESCVGCQQGDPLGPIIFSLAIQPIITQLNSEFNVWYLDDGSLGGTASTVLEDLKIIIQRFNHIGLSLNFNKCEIFFSEKLSVEQCHNIYDQFNSICPNISILEKENLTLLGAPIFDDAFAPIINSKLHHFENISERLFDLKPHMAIYILRLCLFAPKFMYLLRCCPFWKFPSVTHILDTLLQNCLSKILNLKFDDRSWMQATLPVRFGGIGVRTTESLALPAFLASCHSTLALITEILNTNLNDVRVAYMSEAVEVWSDRFPSEDTSMSENTKQSVWDTPGLKSVFACLLERCPDNTDRARLLAVAQSDSGHWLHALPSNNIGTVLDPITLRISIGLRLGARICEPHFCPCGQEVDTLGRHGLSCTRSAGRLYRHGTLNSLIRRALATVSIPATLEPPGLFRDDGKRPDGITLVPWSLGRPLVWDTTCVDTLAPSHVSNTSVCAGAAADHAQTLKRRKYNNLLDNYLFAALAIETMGPWSSDMKKFMSDMSTKLVTASGDQKAGGYFAQRLSLAVQQGNAASVLGTMPHTAILDGLFYL

SEQ ID NO: 20625 - protein, 958 aa, Pyrgus malvae
MSLVNNSNGSLLQCSICGDNRYFKGQRGLNIHCSRIHIPRIAAGDEIIPPQSNIATDGGRSNELLHQRLAHLKCNIKLVKRIPKGARASVARSLTECVAKVVSENTSEVWQELLLFAYKTFNIEFKNQKLSLVKRIKQNIINNSIPVSSPQQKSTHLNNSQNKVKIIENKLSDGDIKGAVKILFSDDSMATHSPDTLEALREKHPTATAVSLSTLQGTSHRQNSLRVSEEATENAIRSFPNGSAGGLDGITPQHLKDLTDPFLGEISKDLLRELTSLVNLMLTGRVPSDITPIIYGANLVALKKKDGGIRPIAVGSTLRRLTSKLCCREYRDRFMQKFKPRQLGFGVKGGCEAAVHAARSFLMTQNYDVFLKIDVKNAFNSVNRGAILTEIQKEAPEIFDYIWQCYGTPSKLLFGDNVIESCVGCQQGDPLGPVIFSLVIQSIINQLNSKFNIWYLDDGSLGGTASTVLEDLQILIRRFGDIGLSLNFKKCEVFFSDHLTSEQISNLTEKFNNITPNISIVNKVNLTLLGAPIYDDAISPIINSKLESFNAISDRLFNLQPHMAIYILRLCLFAPKFMYLLRCCPLWKFPLVTEILDNSLKNCVTKILNLKFDDRSWMQGTLPIRFGGLGVRTTGGLALPAFLASCHSTCTLITDILNTNLDDVWVPYMMEALDSWSASFPSEDISTMCREKQQTWDLPKIKSDFACLLERCSDSTDRARLLAVAQSESGHWLHALPSMNLGTVLDPATFRIAVGLRLGVEMCEPHICPCGQGVDRFGRHGLSCIRSAGRLFRHGTLNDLVRRALATASIPATLEPSGLSRSDGKRPDGITLVPWSLGRPLVWDVTCADTLAPTHVRMSAEKAGSAADHAQCLKRRKYSNLSDNYIFTALAMETMGPWSSDMKKFMSEMSHKLVLACGDLRAGGYFAQRLSLTIQRGNAASVLGTMPHTGFLDEVFYL

SEQ ID NO: 20626 - protein, 956 aa, Pyrgus malvae
MQFIVNNNESLLRCPICAGDRVFKGPRGLKIHCSRMHVPRVDVSVNQTLFSAANTGTDGDRNNDPIHKRLAYFKRNIKLVKRIPKGARLTVARSLTECIAKVVSENTTYAWHELLTFAYKILNIENKSTKFSLAKLIKHNSTNNIIPNIHRTCKPYIDTNSQNKIRIVENKLSEGNTKGAIKVLFSDDSLAVHSPDTLDALREKHPTTAALPTRGTDHELISLRVTEEATDRAIRSFSNGSAGGLDGISPQHLKDLTDPFLGDVRKDLLRELTSLLNLMLAGRVPSDITPILYGANLVALKKKDGGIRPIAVGCTLRRLASKLCCREYRERLTQRFKPRQLGFGVNGGCEAAVHAARSFLTQQNFDVFVKIDVKNAFNSVDRGALLSEIQKEIPEIFEYMWQCYGTPSKLLFGDDVIESCVGCQQGDPLGPVIFSLAIQPIINELNSKFNVWYLDDGSLRGTASSVLEDLDIIIRRFDQIGLNLNFNKCEILFSDKLSSDKISSLSQQFNIITPNISVMKKENLLLLGAPIFDEAFSPIINSKLYDFNLISGRLYDLKPHMAIYILRLCLFAPKFMYWLRCCPFWKFISITNILDSSLKDTLSKILNLKFDDRSWMQATLPINFGGLGVRTTGSLALPAFLASCHSTLALISSILNTPIEDVWVAYLTEATECWRASFPDEDTNNILKNKQSAWDIPAVKSVYACLLERCSSIADRARLLAVAESESGHWLRALPSHNIGTVLDPTSLRIVVGLRLGAKICEPHSCPCGQQVDRLGRHGLSCTRSAGRLYRHGTLNDLVRRALVTASLPATLEPSGLSRSDGKRPDGMTLVPWHLGRPLVWDVTCVDTLAPSHINNTAERAGSAADQAQVLKRRKYCNLSDNYLFAALAVETLGPWSSDMKKFMSEMSSRLVLACGDLRAGEYFAQRLSLAIQRGNAASVLGAMPNTDILEEVFYL

SEQ ID NO: 20627 - protein, 954 aa, Zopyrion sandace
MSFTGTNNDSLLRCPICADDNRLFKGQRGLRIHCSRIHVPRIDAVNQTVLSHVDSRADGNRNDEPIHQRLAYLKNNVKLVKRVPKGARVIVARCLTECVAKVVAENSSHSWHDLFLFAYKILHIENRQKKKSLVNFIKQNTNTNQIPFILNNQKKSFNTLKLIENKISEGDVKGASKILFSADSMAAHSLDTLEALREKHPTSTAVTFTPPRCTDPGHLPLRVSEEATQNAIRSFPNGSAGGLDGLSPQHLKDLTDPFIGDVGKNLLRELTGLLNLMLAGQVPSDITPIIYGANLVALRKKDGGIRPIAVGCTLRRLASKLCCHEYRERLSQKLKPRQLGFGVKGGCEAAVHAARSFLMKQNFDVFVKIDVKNAFNSVDRGALLSIIQKEIPEILDYIWQCYGTPSKLLFGDNVIESCVGCQQGDPLGPVIFSLVIQPIINQLNSEFNVWYLDDGSLGGTASTVLEDLEIVIRRFKDIGLSINFNKCELFFSDNLNQNQILALSQKFNILTPNISISNKETLSLLGAPIFDDAFTPIINSKLEKFNFISDRLFDLKPHMSIYILRLCLFAPKFLYLLRCCPFWKFPSVTNVLDTTLKNCITKILNLNFDDRSWTQATLPIKFGGLGIRTTASLALPAFQASCYSTLTLITEILNTNLDDVWVAYMTEALGAWRASFPSADISSDLKHLQSTWDAPALRATYACLLEQSSDSTDRARLLAVAQSESGHWLHALPSKNIGTVLDPVALRIAVGLRLGVRVCEPHVCPCGQKVDFFGRHGLSCTRSAGRLFRHGTLNDLVRRALATASFPASLEPSGLSRSDGKRPDGITLVPWSLGRPLVWDVTCVDTLAPSHVSDSAERAGSAADHAQSLKRRKYSNLTGSYIFAALAVETLGPWSSDMKKFMSEMSTRLVLACGDLRAGGYFAQRISLTIQRGNAASVLGTMPHTDFLDELFYL

SEQ ID NO: 20628 - protein, 962 aa, Nerula fibrena
MSFVNSNNDSDSLLRCPICANDRLFKGHRGLKIHCSRMHIPRVDDLKNQSLPSSNTRTDGDRSNDPIHKRLAYFKKNIKLVKRIPKGARPSVARSLSDCIAKVVSENTANAWQDLLFFAYKILNIHSKSETKSLTKLIKNNISAYQLPSSSTIDNIDNISYKNSSHKLKFIENKLSDGDVKGAAKILFSDDSLALHSPETLEALREKHPTSTSVSSSPYQCTDHEVNSLRINEEATERAIRSFANGSAGGLDGISPQHLKDLTDPFLGEVGKDLLRELTNLINIMLAGRVPSDITPILYGANLVALKKKDGGIRPIAVGCTLRRLASKLCCREYRERLTAKFKPRQLGFGVRGGCEAAVHAARSFLLAQNFEVFVKIDVQNAFNSVDRGALLSEIQKEVPEIFEYMWQCYGTPSKLLFDDNVIESCVGCQQGDPLGPVIFSLAIQPIINQLNSEFNVWYLDDGSLGGTASSVLEDLDIIIRRFDQIGLSLNFNKCEILFSDRLTTDKILSLSQQFNIITPNINIMKKENLSLLGAPIFDESFPSIINSKLENFNLFAHRLFDLKPHMAIYILRLCLFAPKFMYLLRCCPFWRFPLVTNILDSTLQNCLSKILNLNFDDRSWVQATLPINFGGLGVRRTESVALPAFLASCHSTLTLISDILNTNLDDVRVAYMTEAIMAWRASFPDEDTSNISKNLQSAWDKPAVKSAFACLLERCSGSADRARLLAVAQSESGHWLRVLPSKNIGTVLDPSSLRIAVGLRLGVKICEPHLCPCGQQVDRFGRHGLSCTRGAGRLYRHGTLNDLVRRALATASFPATLEPAGLSRSDGKRPDGMTLVPWSLGRPLVWDVTCVDTVAPSHVRDTAERAGSAADQAQYLKRRKYSNLSENYIFAALAMETMGPWSSDMKKFMSEMSTKLILACGDPRAGGYFAQRISLAIQRGNAASVLGTMPHTGILDDIFYL

SEQ ID NO: 20629 - protein, 928 aa, Odontoptilum angulatum
MPYFTVNNTNGSFLRCSICGDNKLFKGERGLKIHCSRVHVPRIELVSYLIPPTSNRRDTDDDCNNEPLHQRLAHLKQNIKLVRRIPKGARSTVAQCLTDCVAKVVTENTSSAWEELLLFSYKSLNLLHNPKKQSLCNVIKFNSTQSILPTLDNIKIKNYSTSSKTKLVERKISDGNVKAAAKLLFSNDTLATFTPDTLEALRDKHPTQSVSSQLPCQTPDTRHDPIQINEEATQNAIRSFPNGSAGGLDGITPQHLKDLTDPFLGDVGRNLVRELTALINIMLAGRVPLDITPVIYGANLVALRKKDGGIRPIAVGSTLRRLASKLCCHTFRIRLTEKLQPRQLGFGVKGGCEAAVHAARTFLNKNAFDVFLKLDVKNAFNALNRDVILSEILKEIPEIFDYMWQCYGSHSKLLFGDNIIESCVGCQQGDPLGPVIFSLAIQPIINQLNSEFNVWYLDDGSLGGTASTVLEDLEIIIRRFNQIGLSLNFKKCEIFFSDHLSNDQIDNLLKRFNTIAPNISISDKENLTLLGAPIFDDAFLPFINSKLEHFNSISDRLLDLKPHMAIYILRLCLFAPKFLYFLRCCPFWKYHSFLNTLDQSMKNCLTKILNLSFDDRSWMQATLPVKFGGIGIRTSVSLALPAFLASCHSTLTLITDILNSDTDNVRVTYMAEALETWRAKFPSEDTTNLVGNQQSAWDIPAVKAVYASLLEQCSDSTDRARLLAVAESESGHWLNTLPSINIGTVLDPIALRIAIGLRLGAKVCEPHHCPCGQEVDELGRHGLSCIRSAGRLYRHGTINNLIRRALATVSVPAILEPCGLYRSDGKRPDGMTLVPWSLGRPLIWDATCVDTLAPSHVNNTVVSAGAAADHAQNLKRRKYNNLTDNYIFAALAMETMGPWSSDMKKFMSEMSTRLVLSSGDLRAGGYFS

SEQ ID NO: 20630 - protein, 954 aa, Erynnis tages
MSFVNVSQNVTLLPCSICADNRLYKGQRGLNIHCSRIHVPRTDAVNYTASSLSSYVCTDGDGDKVLYKMLAHFKKNVRIVRRIPKGARPTVARCLTECVAKVVKENNFNSWQDLLLFAYKTFKINNRQHHQSLCNLIKNNTCESSLPEISNHRRFGHENKKINIIEKKISDGDVKGAAKVLFSNDTMAPHSLDTLEALREKHPTSSAVSQLPNQSTYPRHDPLRVNEEATRGAIQSFQNGSAGGLDGITPQHLKDLTDPLLGEVGQNLLRELTALINLILEGRVPSEITPIIYGANLVALRKKDGGIRPIAVGCTLRRLVSKLCCREYRERLTQKFKPRQLGFGVKGGCEAAVHAARTFLIKQNYEVFVKIDVKNAFNSVDRGALLNEIQKEVPEIFDYLWQCYGSPSKLLFGDDVIESCVGCQQGDPLGPVIFSLVIQPIIQQLNSEFNVWYLDDGSLGGTASTVLEDLEFINRRFSEIGLAINFNKCEIFFSDQLVPEKYNSLLQHFYNITPNIKIVNKKNLTLLGAPLFDDAFVPIINSKLNNFNLISDRLFGLKPHMAVYILRLCLFAPKFIYLLRCCPFWKFHSVTNILDSTLKNCLSQILNLSFDDRSWMQATLPIKFGGLGIRRTESLALPAFIASCHSTVTLIADILNSKDVRVAYLSEAVETWRAIFPSEDLTGINPKIQAAWDMPFVKSTYACLLDRCTDSTDRARLLAVAQSESGHWLHALPSDNIGTVLDPVTLRIAVGLRLGVKVCEPHRCPCGQGVDIFGRHGLSCTRSAGRLYRHGTMNDLIRRALATASIPAILEPPGLSRSDGKRPDGSTLVPWCLGQSLVWDATCVDTLAPSHISVTAVSAGAAADQAQCLKRRKYSNLSENYIFVALAVETMGPWSSDMKKFMSEMSTRLVLASGDPRAGGYFAQRLSLCVQRGNVASVLGTMPHMGTLDEIFLL

SEQ ID NO: 20631 - protein, 954 aa, Erynnis tages
MSFVNVSQNVTLLPCSICADNRLYKGQRGLNIHCSRIHVPRTDAVNYTASSFSSYVCTDGDGDKVLYKMLAHFKKNVRIVRRIPKGARPTVARCLTECVAKVVKENNFNSWQDLLLFAYKTFKINNRQHHQSLCNLIKNNTCESSLPEISNHRRFGHENKKINIIEKKISDGDVKGAAKVLFSNDTMAPHSLDTLEALREKHPTSSAVSQLPNQSTYPRHDPLRVNEEATRGAIQSFQNGSAGGLDGITPQHLKDLTDPLLGEVGQNLLRELTALINLILEGRVPSEITPIIYGANLVALRKKDGGIRPIAVGCTLRRLVSKLCCREYRERLTQKFKPRQLGFGVKGGCEAAVHAARTFLIKQNYEVFVKIDVKNAFNSVDRGALLNEIQKEVPEIFDYLWQCYGSPSKLLFGDDVIESCVGCQQGDPLGPVIFSLVIQPIIQQLNSEFNVWYLDDGSLGGTASTVLEDLEFINRRFSEIGLAINFNKCEIFFSDQLVPEKYNSLLQHFYNITPNIKIVNKKNLTLLGAPLFDDAFVPIINSKLNNFNLISDRLFGLKPHMAVYILRLCLFAPKFIYLLRCCPFWKFHSVTNILDSTLKNCLSQILNLSFDDRSWMQATLPIKFGGLGIRRTESLALPAFIASCHSTVTLIADILNSKDVRVAYLSEAVETWRAIFPSEDLTGINPKIQAAWDMPFVKSTYACLLDRCTDSTDRARLLAVAQSESGHWLHALPSDNIGTVLDPVTLRIAVGLRLGVKVCEPHRCPCGQGVDIFGRHGLSCTRSAGRLYRHGTMNDLIRRALATASIPAILEPPGLSRSDGKRPDGSTLVPWCLGQSLVWDATCVDTLAPSHISVTAVSAGAAADQAQCLKRRKYSNLSENYIFVALAVETMGPWSSDMKKFMSEMSTRLVLASGDPRAGGYFAQRLSLCVQRGNAASVLGTMPHMGTLDEIFLL

SEQ ID NO: 20632 - protein, 954 aa, Erynnis tages
MSFVNVSQNVTLLPCSICADNRLYKGQRGLNIHCSRIHVPRTDAVNYTASSLSSYVCTDGDGDKVLYKMLAHFKKNVRIVRRIPKGARPTVARCLTECVAKVVKENNFNSWQDLLLFAYKTFKINNRQHHQSLCNLIKNNTCESSLPEISNHRRFGHENKKNNIIEKKISDGDVKGAAKVLFSNDTMAPHSLDTLEALREKHPTSSAVSQLPNQSTYPRHDPLRVNEEATRGAIQSFQNGSAGGLDGITPQHLKDLTDPLLGEVGQNLLRELTALINLILEGRVPSEITPIIYGANLVALRKKDGGIRPIAVGCTLRRLVSKLCCREYRERLTQKFKPRQLGFGVKGGCEAAVHAARTFLIKQNYEVFVKIDVKNAFNSVDRGALLNEIQKEVPEIFDYLWQCYGSPSKLLFGDDVIESCVGCQQGDPLGPVIFSLVIQPIIQQLNSEFNVWYLDDGSLGGTASTVLEDLEFINRRFSEIGLAINFNKCEIFFSDQLVPEKYNSLLQHFYNITPNIKIVNKKNLTLLGAPLFDDAFVPIINSKLNNFNLISDRLFGLKPHMAVYILRLCLFAPKFIYLLRCCPFWKFHSVTNILDSTLKNCLSQILNLSFDERSWMQATLPIKFGGLGIRRTESLALPAFIASCHSTVTLIADILNSKDVRVAYLSEAVETWRAIFPSEDLTGINPKIQAAWDMPFVKSTYACLLDRCTDSTDRARLLAVAQSESGHWLHALPSDNIGTVLDPVTLRIAVGLRLGVKVCEPHRCPCGQGVDIFGRHGLSCTRSAGRLYRHGTMNDLIRRALATASIPAILEPPGLSRSDGKRPDGSTLVPWCLGQSLVWDATCVDTLAPSHISVTAVSAGAAADQAQCLKRRKYSNLSENYIFVALAVETMGPWSSDMKKFMSEMSTRLVLASGDPRAGGYFAQRLSLCVQRGNVASVLGTMPHMGTLDEIFLL

SEQ ID NO: 20633 - protein, 954 aa, Erynnis tages
MSFINVSGSQNVSLLPCLICADNRFYKGQRGLNIHCSRIHVPRVDAVNIIESPDVRADVGGDDEPLHLKLAHFKKNIGIVKRIPKGARPAVARRFTECLATVVKENNSKAWQELLLFGYKVLQINRRQQNQSLCNLIKNNTTDYMLPNLTTHRNFGTNNNKNKIIEKKISDGDLKGATKILFSDDTVAMHSPDTLEALREKHPTSSAAPQLPSQGTYPRHDPLRVSEEATKNAIRSFPNGSAGGLDGITPQHLKDMTDPLLGETSRNLLRELTSLINLMLEGRVPSDITDILYGANLVALRKKDGGIRPIAVGCTLRRLVSKLCCREYRERLTQKFKPRQLGFGVKGGCEAAVHAARTFLIKQNYDVFVKIDVKNAFNSVDRGALLNEIQKEVPEIFDYLWQCYGSPSKLLFGDDVIESCVGCQQGDPLGPVIFSLVIQPIIQQLNSEFNVWYLDDGSLGGTASTVLEDLEFINRRFSEIGLAINFNKCEIFFSDQLVPEKYNSLLQKFYNITPNIKIVNKKNFTLLGAPIFDDAFVPIINSKLNNFNLISDRLFGLKPHMAVYILRLCLFAPKFIYLLRCCPFWKFHTVTNILDSTLKNCLSQILNLSFDDRSWMQATLPIKFGGLGIRRTESLALPAFIASCHSTVTLIADILNSEDVRVAYLSEAVETWRAIFPSEDLTGINPKSQAAWDMPSVKSTYACLLDRCADSTDRARLLAVAQSESGHWLHALPSDNIGTVLDPVTLRIAVGLRLGVKVCEPHRCPCGQGVDIFGRHGLSCTRSAGRLYRHGTMNDLIRRALATASIPAILEPPGLSRSDGKRPDGSTLVPWCLGQSLVWDATCVDTLAPSHISVTAVSAGAAADQAQCLKRRKYSNLSENYIFVALAVETMGPWSSDMKKFMSEMSTRLVLASGDPRAGGYFAQRLSLCVQRGNAASVLGTMPHMGTLDEIFLL

SEQ ID NO: 20634 - protein, 921 aa, Cycloglypha thrasibulus
MSFVNVSLIPCLICADNRLYKGQRGLNIHCGRIHIPRVDAVICKEPQLSIACTDRSDDDDKPLYQKLAYLKNNIRLVKRIPKGARTAVARCLSECIAKVVKHNTSNAWQDLLFFAYKVLQINHKQYNQSLCNAIKNNTSHLSLPSCANNRNFGHTTNKINLIEKKISDGDLKGAAKFLFSDDTMATHSSDTLEELREKHPTSETAPQLPDPNVYPRQDPLRVSEEAIKGAIRSFPNGSAGGLDGITPQHLKDLLDPFLGEVGVNLLRELTSLSNLILQGQVPSDITEVLYGANLVALRKKDGGIRPIAVGCTLRRLVSKLCCREYRDRLSQKLMPRQLGFGVKGGCEAAVHAARSFLLDKNLDCFVKIDVKNAFNSVDRGTLLREIQKEIPEIFDYIWQCYGSPSKLLFGDNVIESCVGCQQGDPLGPLIFSLVIQPIIQQLNSELNVWYLDDGSLGGTASTILEDLELLIRRFSEIGLHLNYNKCEIWLSEQLSSEHSTILLQKFESIIPNIKIVHKDNLTLLGAPIFDDAFVPIINSKLNHFNLISDRLFDLKPHMAIYILRLCLFAPKFMYLLRCCPFWKFHSVTNLLDKTLQNCLSEILNLKFDDRSWMQATLPIKFGGLGIRTTESLALPAFLASCHSTLTLIENILNTDDVRVAYLSEALEVWRASFPHENISAPNIQAAWDQPANKSTYSCLLERCTDSVDKARLLAVAQSESGHWLHALPSNNIGTVLDPTALRIVVGLRLGVKVCEPHRCPCGQEVDILGRHGLSCTRSAGRLYRHGTLNDLIRRALATASIPAVLEPTGLSRSDGKRPDGSTLVPWSMGRPLVWDATCVDTMAPTHVSVTAVSAGAAADRAQSLKRHKYHNLLENYIFVALSMETMGPWSSDMKKFMSKMSSRLARASGDPKAGGYFAQRA

SEQ ID NO: 20635 - protein, 950 aa, Mellicta athalia
MQFINSSNNNESLLRCPICDGDRVFRGPRGLKIHCSRMHVPRVDVSVNQTIFSAADTGTDGDRSNDPIHTRLAYFKKNIKLVKRIPKGARLTVARSLTECIAKVVSENSTNAWYDLLTFAYKILNIGNRSAKISLTNLIKQNSTNKIIPLIQTAPKFNSNFETNSSNKLKIVENKLSEGDTKGAIKLLFSDDSLAVHSPDTLGALREKHPTTAASPTRGTDHKQISLRVTEEATDRAIRSFSNGSAGGLDGISPQHLKDLTDPFLGDVRKDLLRELTSLLNLMLAGRVPSDITPILYGANLVALKKKDGGIRPIAVGCTLRRLASKLCCREYRERLTQRFKPRQLGFGVNGGCEAAVHAARSFLLHQNFDVFVKIDVKNAFNSVDRGALLSQIQKEVPEIFEYMWQCYGTPSKLLFGDNIIESCVGCQQGDPLGPVIFSLAIQPIINELNSKFNVWYLDDGSLGGTASSVLEDLDIIIRRFDQIGLSLNFNKCEILFSDNLSTEKITSLSQQFNIITPNISTKTIFFEAFSPIINSKLENFNLISGRLFYLKPHMATYILRLCLFAPKFMYLLRCCPFWKFISITNILDSSLKDTLSKILNLKFVDRSWMQATLPINFGGLGVRTSASLALPAFLASCHSTLTLISSILNTPIEDVRVAYLTEATECWRASFPDEDINNLTKNKQSAWDIPAVKSVYACLLEQCSSSADRARLLAVAESESGHWLRALPSKNIGTVLDPTTLRIVVGLRLGAKICEPHICPCGQQVDRLGRHGLSCTRSAGRLYRHGTLNDLVRRALVTASLPATLEPSGLSRSDGKRPDGMSLVPWHLGRPLVWDVTCVDTLAPSHINNTAERAGSAADQAQILKRRKYCNLSDNYLFAALAVETLGPWSSDMKKFMSELSSRLVLACGDLRAGEYFAQRLSLAIQRGNAASVLGAMPNTDILEEVFYL

SEQ ID NO: 20636 - protein, 902 aa, Epargyreus clarus
MPNDSLLRCSICADNKLYKGIRGLRIHCSRIHIPRIDVVSQDPILATTYPSGGHRNDDPLYKRLAHLKHNIKVVKRIPKGARSTVAMSLTKCVAKVVSENNNNAWKELLLFAYKNLHLHNRSTKQTLCNLIKLNTVQNVIPDNTISINYDPIRNNIAKLIENKISDGDIKGAVKLLFSDDTMATHSPDTLGALRDKHPIPNTSSQLPSPASIPQRETLRVSEEVTKIAIRSFPNGSAGGLDGLTPQHFKDLTDPLLGEVGKGLLKELTALINLMLEGRVPSSITPIIYGANLVALKKKDGGIRPIVVGCTLRRLVSKLCCRNYNELLSRQLQPRQLGFGVKGGCEAAVHAARTFLNKNDYDVFLKIDVKNAFNSVDRGPLLAEIQKEMPEIFDYMWQCYGTPSKLLFGDKVIESCVGCQQGDPLGPVMFSLAIQPIITQLNSKFNVWYLDDGSLGGNASTVLEDLQFIIDRFNQIGLNLNFNKCEIFFSDELSVESCHHIYEQFNLLSPNITIVDKENLTLLGAPIFEDAFLPIINSKLTHFELNSERLYDIKPHMAIYILRLCLFAPKFLYLLRCCSIWKFPTFTHILDLSLKNCVSKILNLQFDDRSWMQATLPIKFGGIGIRRTESLALPAFLASCHSTTTLIADILNISMDDVRVAYMSEATEAWSALFPSEDTSIIDKSKQYIWDMPAIKSVFACLLERCSDNFDRARLLAVAQSESGYWLHASSNIGTVLDPVTLRISVGLRLGAKVCESHFCPCGQAVDTLGRHGLSCTRSAGRLYRHGTLNDLIRRALATVSVPATLEPSGPFRDDGKRPDGITLVPWSLGRPLVWDATCVDTLAPSHVGNTSVSAGAAADHAQILKRRKYSNILDNYLFAALAVETMGPWSSDMKKFMCCESK

SEQ ID NO: 20637 - protein, 951 aa, Camptopleura auxo
MSFNVISNNVSLVPCHICADNRLYKGQRGLNIHCGRVHVPRIATVNHAGPPSSVACTDLDGINLPLHKKLAHCKKNIRIVKRIPKGARSTVARCLTDCVAKVVKENNSKAWQDLLFFAYKVFHVNNRDHKQSLCNVIKNNTSDYHLPNFADHHIFDNTNKTLKIIEKKISDGDIKGAAKVLFSDDTMATHSSDTLEALREKHPTSATAPQLPSRDVPSQPNPLRVSEEATSGAIRSFTNGSAGGLDGITPQHLKDLIDPILGEVGLNLLKELTSLVNLMLEGRVPLDISEILYGANLVALRKKDGGIRPIAVGCTLRRLASKLCCREYRERLTLKLKPRQLGFGVKGGCEAAVHAARSFLQERHFDTFVKIDVKNAFNSVNRGALLIEIQKEIPEIFDYMWQCYGSPSKLLFGDNVIESCVGCQQGDPLGPLIFSLVIQPIIHQLNSEFNVWYLDDGSLGGTASTVLEDLELLIRRFNSIGLNLNYNKCEIMFSDQLSSAQSQILLEKFNTLIPNIKIVKKNSLTLLGAPIFDDAFVPIINSKLDQFNLISDRLFNLKPHMAIYILRLCLFAPKFMYLLRCCPFWKFNSVSILLDSTLRNCLTKILNLKFDERSWMQATLPIKFGGLGIRSTESLALPAFLASCHSALPLIADILNTDDVRVAYLSEATETWRTIFPHEEITSPTVQAAWDIPGLKATYSYLLEQCSDSTDRARLLAVAESESGHWLHALPSDNIGTVLDPTSLRIAVGLRLGAKVCEPHRCPCGQEVDILGRHGLSCIRSAGRLYRHGTLNDLIRRALATASIPAVLEPSGLSRSDGKRPDGSTLVPWSLGKPLVWDATCVDTMAPTHVSVTAIHAGAAADRAQSLKRHKYNNLSENYIFVALAIETMGPWSSDMKKFMSEMSTRLVLASGDRKAGGYFAQRLSITVQRGNAASVLGTMPHMGLLDELFL

SEQ ID NO: 20638 - protein, 951 aa, Cycloglypha thrasibulus
MSFNVVNNSVSLVPCHICGDNRLYKGQRGLNIHCGRIHVPRIYTGSHDGAQLSDACTDLDGIRMPLHKKLAHCKKSFRIVKRIPKGARPTVARCLTDCVAKVVKENNSKAWEDLLLFAFKVFHISNRQHKQSLCNLIKNNISVYHLPNFADHHIFNNSNNTIKIIEKKISDGDIKGAAKVLFSDDTMATHSSDTLEALREKHPTSATTPQLPSLGVYSRPIPLRVSEEATRGAIRSFPNGSAGGLDGITPQHLKDLIDPKLGEVGQNCLKELTSLVNLMLEGRVPSDISEILYGANLVALRKKDGGIRPIAVGFTLRRLVSKLCCREYRERLTQKLKPRQLGFGVKGGCEAAVHAARSFLLERNFDTFVKIDVKNAFNSVNREALLNEIQKEIPEIFDYMWQCYGSPSKLLFGDNVIESCVGCQQGDPLGPLIFSLAIQPIIHQLNSEFNVWYLDDGSLGGTASTVLEDLELLVRRFNSIGLSLNYNKCEILFSDQFSSAQSQTLLEKFYTIVPNIKIVNKDSLTLLGAPIFDDAFAPIINSKLDQFNLISDRLFSLKPHMAIYILRLCLFAPKFMYLLRCCPFWKFYSVSNLLDSTLQNCLTKILNLKFDDRSWIQATLPIKFGGLGIRTTESLALPAFLASCHSTLTLIADILNTDDVRVAYLTEATESWRTIFPHEDITSPTIQAAWDIPNLKATYTRLLERSSDSTDRARLLAVAQSESGHWLHALPSDNIGTVLDPTTLRIAVGLRLGVKVCESHRCPCGQEVDILGRHGLSCTRSAGRLYRHGTLNDLIRRALATASIPAILEPSGLSRSDGKRPDGSTLVPWSLGKPLVWDATCVDTMAPTHVSVTAVNAGAAADRAQSLKRHKYNDLSENYIFVALAMETMGPWSSDMKKFMSEMSTRLVLASGDQKAGGYFAQRLSLTVQRGNAASVLGTMPHVGCVDDLFL

SEQ ID NO: 20639 - protein, 1001 aa, Furcula furcula
MLLLVFIFIVILIVFYVYMPANNNVYQSAVGHAAEENQVQCPECSQVRYFKGLRGLKIHKAKIHNAPLSLSCPVSASSSCISSSLPVFDNTSTRIPTFDPSTSHIPIWQILTQLKSSKFVIKRIPRGARVTIAEALTSTINAAIKDNSERAWEHLLTFPFRVLHVPYDPTNTDSLTLRLKQNCNTQSPLHIHTNNVTGTRKNNKIQPESSFFRSVENRISDGDLRGAARLMYSSDGIAPDSPVTLAALRSKHPSASHHHLPDPPSSTFPTNLHITAEDVASAIVSFPSGSASGLDGLSPQHLKDLTTFGTGEAGRNLLNAITALVRFVITQRVEPKITDTLFGGNLCAFTKKDGGVRPIAVGTTLRRLSSKVCCKKVFNSLKEYFQPHQIGFGSRGGCEAAVHALRTFTLNKGGEVLLKVDIKNAFNSVDRCALLTQTKLKAPEIYNFLWQSYSTSSNLMYRGNRIVSAVGCQQGDPLGPAIFSLAIHPIITRLESKFNVWYLDDGTLGGDADTVLRDLRLLICELKSIGLELNFSKCELFISEISATTNSIVNEFNILAPGIKIITKSSLQLLGTPIFDDAFDNFVEDKIESFKTVLERLHKINSHMAYHIIKYCLFVPKFTYTLRCCPLWKRNDILQRLDNVIRDSITSIFNIPLDDRAWTQATLPIRFGGLGVRKISSVALPAFLSSVHGTHGLVKKILSTSFSDFEVPFRTEALDAWSIACPNAVYPSDMTSQSQWDRPACITTLKSLEDSALNSTDRARLLAVSRWESGLWLQALPSTHIGTLLDPTAFRIAICLRLGTPCIAPHSCRCGHNVCRLGHHGLSCCRSAGRAARHASLNQLIYRALATVNMAAVLEPCGLHRDDGKRPDGMTLVPWKMGRPLVWDATCVDTLAPSHLPVTSTEAGAAAHSAEYLKRRKYECLGVGYIFEAFGVETLGPWGPGAHQVFQKISELLVGTSGDRNAGFYFGQQISIAIQRGNAASVLGTLPPKSEDDLYVL

SEQ ID NO: 20640 - protein, 991 aa, Furcula furcula
MLLLVFIFIVILIVFYVYMPANNNVYQSAVGHAAEENQVQCPECSQVRYFKGLRGLKIHKAKIHNAPLSLSCPVSASSDNTSTRIPTFDPSTSHIPIWQILTQLKSSKFVIKRIPRGARVTIAEALTSTINAAIKDNSERAWEHLLTFPFRVLHVPYDPTNTDSLTLRLKQNCNTQSPLHIHTNNVTGTRKNNKIQPESSFFRSVENRISDGDLRGAARLMFSSDGIAPDSPDTLAALRSKHPSASHHHLPDPPSSTFPTNLHITAEDVASAIVSFPSGSASGLDGLSPQHLKDLTTFGTGEAGRNLLNAITALVRFVITQRVEPKITDTLFGGNLCAFTKKDGGVRPIAVGTTLRRLSSKVCCKKVFNSLKEYFQPHQIGFGSRGGCEAAVHALRTFTLNKGGEVLLKVDIKNAFNSVDRCALLTQTKLKAPEIYNFLWQSYSTSSNLMYRGNRIVSAVGCQQGDPLGPAIFSLAIHPIITRLESKFNVWYLDDGTLGGDADTVLRDLRLLICELKSIGLELNFSKCELFISEISATTNSIVNEFNILAPGIKIITKSSLQLLGTPIFDDAFDNFVEDKIESFKTVLERLHKINSHMAYHIIKYCLFVPKFTYTLRCCPLWKRNDILQRLDNVIRDSITSIFNIPLDDRAWTQATLPIRFGGLGVRKISSVALPAFLSSVHGTHGLVKKILSTSFSDFEVPFRTEALDAWSIACPNAVYPSDMISQSQWDRPACITTLKSLEDSALNSTDRARLLAVSRWESGLWLQALPSTHIGTLLDPTAFRIAICLRLGTPCIAPHSCRCGHNVCRLGHHGLSCCRSAGRAARHASLNQLIYRTLATVNMAAVLEPCGLHRDDGKRPDGMTLVPWKMGRPLVWDATCVDTLAPSHLPVTSTEAGAAAHSAEYLKRRKYECLGVGYIFEAFGVETLGPWGPGAHQVFQKISELLVGTSGDRNAGFYFGQQISIAIQRGNAASVLGTLPPKSEDDLYIL

SEQ ID NO: 20641 - protein, 1009 aa, Furcula furcula
MPNIFGTRKMFFMLLLVFIFIVILIVFYVYMPANNNVYQSAVGHAAEENQVQCPECSQVRYFKGQRGLKIHKAKIHNAPLSLSCPVSASSSCISSSLPVFDNTSTRIPTFDPSTSHIPIWQILTQLKSSKFVIKRIRVTIAEALTSTINAAIKDNSERAWEHLLTFPFRVLHVPYDPTNTDSLTLRLKQNCNTQSPLHIHTNNFTGTRKNNKIQPESSFFRSVENRISDGDLRGAARLMFSSDGIAPDSPDTLAALRSKHPSASHHHLPDPPSSTFPTNLHITAEDVASAIVSFPSGSASGLDGLSPQHLKDLTTFGTGEAGRNLLNAITTPVRFVITQRVEPKITDTLFGGNLCAFTKKDGGVRPIAVGTTLRRLSSKVCCKKVFNSLKEYFQPHQIGFGSRGGCEAAVHALRTFTLNKGGEVLLKVDIKNAFNSVDRCALLTQTKLKAPEIYNFLWQSYSTSSNLMYRGNRIVSAVGCQQGDPLGPAIFSLAIHPIITRLESKFNVWYLDDGTLGGDADTVLRDLRLLICELKSIGLELNFSKCELFISEISATTNSIVNEFNILAPGIKIISKSSLQLLGTPIFDDAFDNFVEDKIESFKTVLDRLHKINSHMAYHIIKYCLFVPKFTYTLRCCPLWKRNDILQRLDNVIRDSITTIFNIPLDDRAWTQATLPIRFGGLGVRKISSVALPAFLSSVHGTHGLVKKILSTSFSDFEVPFRTEALDAWSIACPNAVYPSDMTSQSQWDRPACIITLKSLEDSALNSTDRARLLAVSRWESGLWLQALPLTHIGTLLDPTAFRIAICLRLGTPCIAPHSCRCGHNVCRLGHHGLSCCRSAGRAARHASLNQLIYRALATVNMAAVLEPCGLHRDDGKRPDGMTLVPWKMGRPLVWDATCVDTLAPSHLPVTSTEAGAAAHSAEYLKRRKYECLGVGYIFEAFGVETLGPWGPGAHQVFQKISELLVGTSGDRNAGFYFGQQISIAIQRGNAASVLGTLPPKSEDDLYIL

SEQ ID NO: 20642 - protein, 974 aa, Phalera bucephala
MSIHVPSTRNAVGANPCQLSLDNLVQCPECSEPRYFKGPKGLKIHSKKVHHTSSNLPSSVPVTIAFNNNPPTAYGDNSNQISLTPFWQILGHLKSTKLIVKRIPRGARTSIAESLASTISIVLKDNSQRAWEHLLTFPFRILHVPLDPRNTDSLTSRLKQNCDNHAPLHCNNQSHTPKRQSESAFYRMVESRFSDGDVRGAARMIFSNDSIAPDTPETLTALLAKHPPATHHRLPDPPTFSHPMQISTEDVANAISSFPSGSASGLDGLSPQHLKDLTSFACGDAGQRLLKELTALVNLMINKNVDSSITDILFGGNLCAFSKKDGGIRPIAVGTTLRRLSAKVCCRKVVNPLKDYFQPLQIGFGSGGGCEAAVHALRTFILNDGGKVLLKVDIRNAVNAVDRFALLTQISHKIPNCFNFLRQCYSNPSKLVYKGNLIDSAVGCQQGDPLGPAIFSLAIHPIIMRLESKFNVWYLDDGTLGGDVDTVLRDLKFLIEELKSIGLELNYKKCELYLFDTVSDKDVIKKKFNDLAPNIKLINSSNLRLLGSPILDDSFQDFIDEKIQNFESVSNRLHKINSHMAFNIIKYCLFVPKFTYALRCCHLWTHNDILQRLDNIVRDTVSSISNCCLDDRAWSQASLPVRKGGLGIRKISSLSLPAFLSSVHSTLGLVKRILLPSLTNFRIPYLDEGKDAWLLACPNTTPPTDPTSQKQWDRPICELTRKNLIETSLSSADRARILAASEWESGLWLQAHPSVHLGTLLDPTAFRVALCLRLGVPCLVPHHCQCGSRVSQLGHHGLSCRRSAGRIARHASLNGVIRRALANVNMAAILEPAGLHRDDGKRPDGMTLVPWKMGRPLVWDATCVDTLAPSHLPASSVRAGNAALSAESLKRRKYDSLGSGYIFEAFGVETLGPWGPGAHRMFREISKRLVECTGDRNAGMYFGQHISIAIQRGNAASVLGTLPTDSGVEPFGPM

SEQ ID NO: 20643 - protein, 977 aa, Phalera bucephala
MSIHVPSTRNAVGANPCQLSLDNLVQCPECSEPRYFKGPKGLKIHSKKVHHTSSNLPSSVPVTIAFNNNPPTAYGDNSNQISLTPFWQILGHLKSTKLIVKRMEPVPRGARTSIAESLASTISIVLKDNSQRAWEHLLTFPFRILHVPLDPRNTDSLTSRLKQNCDNHAPLHCNNQSHTPKRQSESAFYRMVESRFSDGDVRGAARMIFSNDSIAPDTPETLTALLAKHPPATHHRLPDPPTFSHPIQISTEDVANAISSFPSGSASGLDGLSPQHLKDLTSFACGDAGQRLLKEVTALVNLMINKNVDSSITDILFGGNLCAFSKKDGGIRPIAVGTTLRRLSAKVCCRKVVNPLKDYFQPLQIGFGSGGGCEAAVHALRTFILNDGGKVLLKVDIRNAFNAVDRFALLTQISHKIPNCFNFLRQCYSNPSKLVYKGNLIDSAVGCQQGDPLGPAIFSLAIHPIIMRLESKFNVWYLDDGTLGGDVDTVLRDLKFLIEELKSIGLELNYKKCELYLFDTVSDKDVIKKKFNDLAPNIKLINSSNLRLLGSPILDDSFQDFIDEKIQNFESVSDRLHKINSHMAFNIIKYCLFVPKFTYALRCCHLWTHNDILQRLDNIVRDTVSSISNCCLDDRAWSQASLPVRKGGLGIRKISSLSLPAFLSSVHSTLGLVKRILLPSLTNFRIPYLDEGKDAWLLACPNTTPPTDPTSQKQWDRPICELTRKNLIETSVSSADRARILAASEWESGLWLQAHPSVHLGTLLDPTAFRVALCLRLGVPCLVPHHCQCGSRVNQLGHHGLSCRRSAGRIARHASLNGVIRRALANVNMAAILEPAGLHRDDGKRPDGMTLVPWKMGRPLVWDATCVDTLAPSHLPASSVLAGNAALSAESLKRRKYDSLGSGYIFEAFGVETLGPWGPGAHRMFREISKRLVECTGDRNAGMYFGQHISIAIQRGNAASVLGTLPTDSGVEPFGPM

SEQ ID NO: 20644 - protein, 949 aa, Phalera bucephala
MPRVLRASVFFEGPKGLKIHSKKVHHTSSNLPSSVPVTIAFNNNPPTAYGDNSNQISLTPFWQILGHLKSTKLIVKRIPRGARTSIAESLASTISIVLKDNSQRAWEHLLTFPFRILHVPLDPRNTDSLTSRLKQNCDNHAPLHCNNQSHTPKRQSESAFYRMVESRFSDGDVRGAARMIFSNDSIAPDTPETLTALLAKHPPATHHRLPDPPTFSHPIQISTEDVANAISSFPSGSASGLDGLSPQHLKDLTSFACNDAGQRLLKELTALVNLMINKNVDSSITDILFGGNLCAFSKKDGGIRPIAVGTTLRRLSAKVCCRKVVNPLKDYFQPLQIGFGSGGGCEAAVHALRTFILNDGGKVLLKVDIRNAFNAVDRFALLTQISHKIPNCFNFLRQCYSNPSKLVYKGNLIDSAVGCQQGDPLGPAIFSLAIHPIIMRLESKFNVWYLDDGTLGGDVDTVLRDLKFLIEELKSIGLELNYKKCELYLFDTVSDKDVIKKKFNDLAPNIKLINSSNLRLLGSPILDDSFQDFIDEKIQNFESVSNRLHKINSHMAFNIIKYCLFVPKFTYALRCCHLWTHNDILQRLDNIVRDTVSSISNCCLDDRAWSQASLPVRKGGLGIRKISSLSLPAFLSSVHSTLGLVKRILLPSLTNFRIPYLDEGKDAWLLARPNTTPPTDPTSQKQWDRPICELTRKNLIETSLSSADRARILAASEWESGLWLQAHPSVHLGTLLDPTAFRVALCLRLGVPCLVPHHCQCGSRVNQLGHHGLSCRRSAGRIARHASLNGVIRRALANVNMGAILEPAGLHRDDGKRPDGMTLVPWRMGRPLVWDATCVDTLAPSHLPASSVRAGNAALSAESLKRRKYDSLGSGYIFEAFGVETLGPWGPGAHRMFREISKRLVECTGDRNAGMYFGQHISIAIQRGNAASVLGTLPTDSGVEPFGPM

SEQ ID NO: 20645 - protein, 992 aa, Phalera bucephala
MFLFFCFIIILVLYFVYYMSIHVLSTRNAVGANPCQLSLDNLVQCPECSEPRYFKGPKGLKIHSKKVHHTSSNLPSSVPVTIAFNNNPPTAYGDNSNQISLTPFWQILGHLKSTKLIVKRIPRGARTSIAESLASIISIVLKDNSQRAWEHLLTFPFRILHVPLDPRNTDSLTSRLKQNCDNHAPLHCNNQSHTPKRQSESAFYRMVESRFSDGDVRGAARMIFSNDSIAPDTPETLTALLAKHPPATHHRLPDPPTFSHPIQISTEDVANAISSFPSGSASGLDGLSPQHLKDLTSFACGDAGQRLLKELTALVNLMINKNVDSSITDILFGGNLCAFSKKDGGIRPIAVGTTLRRLSAKVCCRKVVNPLKDYFQPLQIGFGSGGGCEAAVHALRTFILNDGGKVLLKVDIRNAFNAVDRFALLTQISHKIPNCFNFLRQCYSNPSKLVYKGNLIDSAVGCQQGDPLGPAIFSLAIHPIIMRLESKFNVWYLDDGTLGGDVDTVLRDLKFLIEELKSIGLELNYKKCELYLFDTVSDKDVIKKKFNDLAPNIKLINSSNLRLLGSPILDDSFQDFIDEKIQNFESVSDRLHKINSHMAFNIIKYCLFVPKFTYALRCCHLWTNNDILQRLDNIVRDTVSSISICCLDDRAWSQASLPVRKGGLGIRKISSLSLPAFLSSVHSTLGLVKRILLPSLTNFRIPYLDEGKDAWLLACPNTTPPTDPTSQKQWDRPICELTRKNLIETSLSSADRARILAASEWESGLWLQAHPSVHLGTILDPTAFRVALCLRLGVPCLVPHHCQCGSRVNQLGHHGLSCRRSAGRIARHASLNGVIRRALANVNMAAILEPAGLHRDDGKRPDGMTLVPWKMGRPLVWDATCVDTLAPSHLPASSVRAGNAALSAESLKRRKYDSLGSGYIFEAFGVETLGPWGPGAHRMFREISKRLVECTGDRNAGMYFGQHISIAIQRGNAASVLGTLPTDSGVEPFGPM

SEQ ID NO: 20646 - protein, 992 aa, Phalera bucephala
MFLFFCFIIILVLYFVYYMSIHVPSTRNAVGANPCQLSLDNLVQCPECSEPRYFKGPKGLKIHSKKVHHTSSNLPSSVPVTIAFNNNPPTAYGDNSNQISLTPFWQILGHLKSTKLIVKRIPRGARTSIAESLASTISIVLKDNSQRAWEHLLTFPFRILHVPLDPRNTDSLTSRLKQNCDNHAPLHCNNQSHTPKRQSESAFYRMVESRFSDGDVRGAARMIFSNDSIAPDTPETLTALLAKHPPATHHRLPDPPTFSHPIQISTEDVANAISSFPSGSASGLDGLSPQHLKDLTSFACGDAGQRLLKELTALVNLMINKNVDSSITDILFGGNLCAFSKKDGGIRPIAVGTTLRHLSAKVCCRKVVNPLKDYFQPLQIGFGSGGGCEAAVHALRTFILNDGGKVLLKVDIRNAFNAVDRFALLTQISHKIPNCFNFLRQCYSNPSKLVYKGNLIDSAVGCQQGDPLGPAIFSLAIHPIIMRLESKFNVWYLDDGTLGGDVDTVLRDLKFLIEELKSIGLELNYKKCELYLFDTVSDKDVIKKKFNDLAPNIKLINSSNLRLLGSPILDDSFQDFIDEKIQNFESVSDRLHKINSHMAFNIIKYCLFVPKFTYALRCCHLWTHNDILQRLDNIVRDTVSSISNCCLDDRAWSQASLPVRKGGLGIRKISSLSLPAFLSSVHSTLGLVKRILLPSLTNFKFPYLDEGKDAWLLACPNTTPPTDPTSQKQWDRPICELTRKNLIETSLSSADRARILAASEWESGLWLQAHPSVHLGTLLDPTAFRVALCLRLGVPCLVPHHCQCGSRVNQLGHHGLSCRRSAGRIARHASLNGVIRRALANVNMAAILEPAGLHRDDGKRPDGMTLVPWRMGRPLVWDATCVDTLAPSHLPTSSVRAGNAALSAESLKRRKYDSLGSGYIFEAFGVETLGPWGPGAHRMFREISKRLVECTGDRNAGMYFGQHISIAIQRGNAASVLGTLPTDSGVEPFGPM

SEQ ID NO: 20647 - protein, 992 aa, Phalera bucephala
MFLFFCFIIILVLYFVYYMSIHVPSTRNAVGANPCQLSLDNLVQCPECSEPRYFKGPKGLKIHSKKVHHTSSNLPSSVPVTIAFNNNPPTAYGDNSNQISLTPFWQILGHLKSTKLIVKRIPRGARTSIAESLASTISIVLKDNSQRAWEHLLTFPFRILHVPLDPRNTDSLTSRLKQNCDNHAPLHCNNQSHTPKRQSESAFYRMVESRFSDGDVRGAARMIFSNDSIAPDTPETLTALLAKHPPATHHRLPDPPTFSHPIQISTEDVANAISSFPSGSASGLDGLSPQHLKDLTSFACGDAGQRLLKELTALVNLMINKNVDSSITDILFGGNLCAFSKKDGGIRPIAVGTTLRRLSAKVCCRKVVNPLKDYFQPLQIGFGSGGGCEAAVHALRTFILNDGGKVLLKVDIRNAFNAVDRFALLTQISHKIPNSFNFLRQCYSNPSKLVYKGNLIDSAVGCQQGDPLGPAIFSLAIHPIIMRLESKFNVWYLDDGTLGGDVDTVLRDLKFLIEELKSIGLELNYKKCELYLFDTVSDKDVIKKKFNDLAPNIKLINSSNLRLLGSPILDDSFQDFIDEKIQNFESVSDRLHKINSHMAFNIIKYCLFVPKFTYALRCCHLWTHNDILQRLDNIVRDTVSSISNCCLDDRAWSQASLPVRKGGLGIRKISSLSLPAFLSSVHSTLGLVKRILLPSLTNFRIPYLDEGKDAWLLACPNTTPPTDPTSQKQWDCPICELTRKNLIETSLSSADRARILAASEWESGLWLQAHPSVHLGTLLDPTAFRVALCLRLGVPCLVPHHCQCGSRVNQLGHHGLSCRRSAGRIARHASLNGVIRRALANVNMAAILEPAGLHRDDGKRPDGMTLVPWRMGRPLVWDATCVDTLAPSHLPASSVRAGNAALSAESLKRRKYDFLGSGYIFEAFGVETLGPWGPGAHRMFREISKRLVECTGDRNAGMYFGQHISIAIQRGNAASVLGTLPTDSGVEPFGPM

SEQ ID NO: 20648 - protein, 992 aa, Phalera bucephala
MFLFFCFIIILVLYFVYYMSIHVPSTRNAVGANPCQLSLDNLVQCPECSEPRYFKGPKGLKIHSKKVHHTSSNLPSSVPVTIAFNNNPPTAYGDNSNQISLTPFWQILGHLKSTKLIVKRIPRGARTSIAESLASTISIVLKDNSQRAWEHLLTFPFRILHVPLDPRNTDSLTSRLKQNCDNHAPLHCNNQSHTPKRQSESAFYRMVESRFSDGDVRGAARMIFSNDSIAPDTPETLTALLAKHPPATHHRLPDPPTFAHPIQISTEDVANAISSFPSGSASGLDGLSPQHLKDLTSFACGDAGQRLLKELTALVNLMINKNVDSSITDILFGGNLCAFSKKDGGIRPIAVGTTLRRLSAKVCCRKVVNPLKDYFQPLQIGFGSGGGCEAAVHALRTFILNDGGKVLLKVDIRNAFNAVDRFALLTQISHKIPNCFNFLRQCYSNPSKLVYKGNLIDSAVGCQQGDPLGPAIFSLAIHPIIMRLESKFNVWYLDDGTLGGDVDTVLRDLKFLIEELKSIGLELNYKKCELYLFDTVSDKDVIKKKFNDLAPNIKLINSSNLRLLGSPILDDSFQDFIDEKIQNFESVSDRLHKINSHMAFNIIKYCLFVPKFTYALRCCHLWTHNDILQRLDNIVRDTVSSISNCCLDDRAWSQASLPVRKGGLGIRKISSLSLPAFLSSVHSTLDLVKRILLPSLTNFRIPYLDEGKDAWLLACPNTTPPTDPTSQKQWDRPICELTRKNLIETSLSSADRARILTASEWESGLWLQAHPSVHLGTLLDPTAFRVALCLRLGVPCLVPHHCQCGSRFNQLGHHGLSCRRSAGRIARHASLDGVIRRALANVNMAAILEPAGLHRDDGKRPDGMTLVPWKMGRPLVWDATCVDTLAPSHLPASSVRAGNAALSAESLKRRKYDSLGSGYIFEAFGVETLGPWGPGAHRMFREISKRLVECTGDRNAGMYFGQHISIAIQRGNAASVLGTLPTDSGVEPFGPM

SEQ ID NO: 20649 - protein, 992 aa, Phalera bucephala
MFLFFCFIIILVLYFVYYMSIHVPSTRNAVGANPCQLSLDNLVQCPECSEPRYFKGSKGLKIHSKKVHHTSSNLPSSVPVTIAFNNNPPTAYGDNSNQISLTPFWQILGHLKSTKLIVKRIPRGARTSIAESLASTISIVLKDNSQRAWEHLLTFPFRILHVPLDPRNTDSLTSRLKQNCDNHAPLHCNNQSHTPKRQSESAFYRMVESRFSDGDVRGAARMIFSNDSIAPDTPETLTALLAKHPPATHHRLPDPPTFSHPIQISTEDVANAISSFPSGSASGLDGLSPQHLKDLTSFACGDAGQRLLKELTALVNLMINKNVDSSITDILFGGNLCAFSKKDGGIRPIAVGTTLRRLSAKVCCRKVVNPLKDYFQPLQIGFGSGGGCEAAVHALRTFILNDGGKVLLKVDIRNAFNAVDRFALLTQISHKIPNCFNFLRQCYSNPSKLVYKGNLIDSAVGCQQGDPLGPAIFSLAIHPIIMRLESKFNVWYLDDGTLGGDVDTVLRDLKFLIEELKSIGLELNYKKCELYLFDTVSDKDVIKKKFNDLAPNIKLINSSNLRLLGSPILDDSFQDFIDEKIQNFESVSDRLHKINSHMAFNIIKYCLFVPKFTYALRCCHLWTHNDILQRLDNIVRDTVSSISNCCLDDRAWSQASLPVRKGGLGIRKISSLSLPAFLSSVHSTLGLVKRILLPSLTNFRIPYLDEGKDAWLLACPNTTSPTDPTSQKQWDRPICELTRKNLIETSLSSADRARILAASEWESGLWLQAHPSVHLGTLLDPTAFRVALCLRLGVPCLVPHHCQCGSRVNQLGHHGLSCRRSAGRIARHASLNGVIRRALANVNMAAILEPAGLHRDDGKRPDGMTLVPWKMGRPLVWDATCVDTLAPSHLPASSVRAGNAALSAESLKRRKYDSLGSGYIFEAFGVETLGPWGPGAHRMFREISKRLVECTGDRNAGMYFGQHISIAIQRGNAASVLGTLPTDSGVEPFGPM

SEQ ID NO: 20650 - protein, 974 aa, Phalera bucephala
MSIHVPSTRNAVGANPCQLSLDNLVQCPECSEPRYFKGPKGLKIHSKKVHHTSSNLPSSVPVTIAFNNNPPTAYGDNSNQISLTPFWQILGHLKSTKLIVKRIPRGARTSIAESLASTISIVLKDNSQRAWEHLLTFPFRILHVPLDPRNTDSLTSRLKQNCDNHAPLHCNNQSHTPKRQSESAFYRMVESRFSDGDVRGAARMIFSNDSIAPDTPETLTALLAKHPPATHHRLPDPPTFSHPIQISTEDVANAISSFPSGSASGLDGLSPQHLKDLTSFACGDAGQRLLKELTALVNLMINKNVDSSITDILFGGNLCAFFKKDGGIRPIAVGTTLRRLSAKVCCRKVVNPLKDYFQPLQIGFGSGGGCEAAVHALRTFILNDGGKVLLKVDIRNAFNAVDRFALLTQISHKIPNCFNFLRQCYSNPSKLVYKGNLIDSAVGCQQGDPLGPAIFSLAIHPIIMRLESKFNVWYLDDGTLGGDVDTVLRDLKFLIEELKSIGLELNYKKCELYLFDTVSDKDVIKKKFNDLAPNIKLINSSNLRLLGSPILDDSFQDFIDEKIQNFESVSDRLHKINSHMAFNIIKYCLFVPKFTYALRCCHLWTHNDILQRLDNIVRDTVSSISNCCLDDRAWSQASLPVRKGGLGIRKISSLSLPAFLSSVHSTLGLVKRILLPSLTNFRIPYLDEGKDAWLLACPNTTPPTDPASQKQWDRPICELTRKNLIETSLSSADHARILAASEWESGLWLQAHPSVHLGTLLDPTAFRVALCLRLGVPCLVPHHCQCGSRVSQLGHHGLSCRRSAGRIARHASLNGVIRRALANVNMAAILEPAGLHRDDGKRPDGMTLVPWKMGRPLVWDATCVDTLAPSHLPASSVRAGNAALSAESLKRRKYDSLGSGYIFEAFGVETLGPWGPGAHRMFREISKRLVECTGDRNAGMYFGQHISIAIQRGNAASVLGTLPTDSGVEPFGPM

SEQ ID NO: 20651 - protein, 992 aa, Phalera bucephala
MFLFFCFIIILVLYFVYYMSIHVPSTRNAVGANPCQLSLDNLVQCPECSEPRYFKGPKGLKIHSKKVHHTSSNLPSSVPVTIAFNNNPPTAYGDNSNQISLTPFWQILGHLKSTKLIVKRIPRGARTSIAESLASTISIVLKDNSQRAWEHLLTFPFRILHVPLDPRNTDSLTSRLKQNCDNHAPLHCNNQSHTPKRQSESAFYRMVESRFSDGDVRGAARMIFSNDSIAPDTPETLTALLAKHPPATHHRLPDPPTFSHPIQISTEDVANAISSFPSGSASGLDGLSPQHLKDLTSFACGDAGQRLLKELTALVNLMINKNFDSSITDILFGGNLCAFSKKDGGIRPIAVGTTLRRLSAKVCCRKVVNPLKDYFQPLQIGFGSGGGCEAAVHALRTFILNDGGKVLLKVDIRNAFNAVDRFALLTQISHKIPNCFNFLRQCYSNPSKLVYKGNLIDSAVGCQQGDPLGPAIFSLAIHPIIMRLESKFNVWYLDDGTLGGDVDTVLRDLKFLIEELKSIGLELNYKKCELYLFDTVSDKDVIKKKFNDLAPNIKLINSSNLRLLGSPILDDSFQDFIDEKIQNFESVSDRLHKINSHMAFNIIKYCLFVPKFTYALRCCHLWTHNDILQRLDNIVRDTVSSISNCCLDDRAWSQASLPVRKGGLGIRKISSLSLPAFLSSVHSTLGLVKRILLPSLTNFKIPYLDEGKDAWLLACPNTTPPTDPTSQKQWDRPICELTRKNLIETSLSSADRARILAASEWESGLWLQAHPSVHLGTLLDPTAFRVALCLRLGVPCLVPHHCQCGSRVNQLGHHGLSCRRSAGRIARHASLNGVIRRALANVNMAAILEPAGLHRDDGKRPDGMTLVPWRMGRPLVWDATCVDTLAPSHLPASSVRAGNAALSAESLKRRKYDSLGSGYIFEAFGVETLGPWGPGAHRMFREISKRLVECTGDRNAGMYFGQHISIAIQRGNAASVLGTLPTDSGVEPFGPM

SEQ ID NO: 20652 - protein, 992 aa, Phalera bucephala
MFLFFCFIIILVLYFVYYMSIHVPSTRNAVGANPCQLSLDNLVQCPECSEPRYFKGPKGLKIHSKKVHHTSSNLPSSVPVTIAFNNNPPTAYGDNSNQISLTPFWQILGHLKSTKLIVKRIPRGARTSIAESLASTISIVLKDNSQRAWEHLLTFPFRILHVPLDPRNTDSLTSRLKQNCDNHAPLHCNNQSHTPKRQSESAFYRMVESRFSDGDVRGTARMIFSNDSIAPDTPETLTALLAKHPPATHHRLPDPPTFSHPIQISTEDVANAISSFPSGSASGLDGLSPQHLKDLTSFACGDAGQRLLKELTALVNLMINKNVDSSITDILFGGNLCAFSKKDGGIRPIAVGTTLRRLSAKVCCRKVVNPLKDYFQPLQIGFGSGGGCEAAVHALRTFILNDGGKVLLKVDIRNAFNAVDRFALLTQISHKIPNCFNFLRQCYSNPSKLVYKGNLIDSAVGCQQGDPLGPAIFSLAIHPIIMRLESKFNVWYLDDGTLGGDVDTVLRDLKFLIEELKSIGLELNYKKCELYLFDTVSDKDVIKKKFNDLAPNIKLINSSNLRLLGSPILDDSFQDFIDEKIQNFESVSDRLHKINSHMAFNIIKYCIFVPKFTYALRCCHLWTHNDILQRLDNIVRDTVSSISNCCLDDRAWSQASLPVRKGGLGIRKISSLSLPAFLSSVHSTLGLVKRILLPSLTNFRIPYLDEGKDAWLLACPNTTPPTDPTSQKQWDRPICELTRKNLIETSLSSADRARILAASEWESGLWLQAHPSVHLGTLLDPTAFRVALCLRLGVPCLVPHHCQCGSRVSQLGHHGLSCRRSAGRIARHASLNGVIRRALANVNMAAILEPAGLHRDDGKRPDGMTLVPWKMGRPLVWDATCVDTLAPSHLPASSVRAGNAALSAESLKRRKYDSLGSGYIFEAFGVETLGPWGPGAHRMFREISKRLVECTGDRNAGMYFGQHISIAIQRGNAASVLGTLPTDSGVEPFGPM

SEQ ID NO: 20653 - protein, 992 aa, Phalera bucephala
MFLFFCFVIILVLYFVYYMSIHVPSTRNAVGANPCQLSLDNLVQCPECSEPRYFKGPKGLKIHSKKVHHTSSNLPSSVPVTIAFNNNPPTAYGDNSNQISLTPFWQILGHLKSTKLIVKRIPRGARTSIAESLASTISIVLKDNSQRAWEHLLTFPFRILHVPLDPRNTDSLTSRLKQNCDNHAPLHCNNQSHTPKRQSESAFYRMVESRFSDGDVRGAARMIFSNDSIAPDTPETLTALLAKHPPATHHRLPDPPTFSHPIQISTEDVANAISSFPSGSASGLDGLSPQHLKDLTSFACGDAGQRLLKELTALVNLMINKNVDSSITDILFGGNLCAFSKKDGGIRPIAVGTTLRRLSAKVCCRKVVNPLKDYFQPLQIGFGSGGGCEAAVHALRTFILNDGGKVLLKVDIRNAFNAVDRFALLTQISHKIPNCFNFLRQCYSNPSKLVYKGNLIDSAVGCQQGDPLGPAIFSLAIHPIIMRLESKFNVWYLDYGTLGGDVDTVLRDLKFLIEELKSIGLELNYKKCELYLFDTVSDKDVIKKKFNDLAPNIKLINSSNLRLLGSPILDDSFQDFIDEKIQNFESVSDRLHKINSHMAFNIIKYCLFVPKFTYALRCCHLWTHNDILQRLDNIVRDTVSSISNCCLDDRAWSQASLPVRKGGLGIRKISSLSLPAFLSSVHSTLGLVKRILLPSLTNFKIPYLDEGKDAWLLACPNTTPPTDPTSQKQWDRPICELTRKNLIETSLSSADRARILAASEWESGLWLQAHPSVHLGTLLDPTAFRVALCLRLGVPCLVPHHCQCGSRVNQLGHHGLSCRRSAGRIARHASLNGVIRRALANVNMAAILEPAGLHRDDGKRPDGMTLVPWKMGRPLVWDATCVDTLAPSHLPASSVRAGNAALSAESLKRRKYDSLGSGYIFEAFGVETLGPWGPGAHRMFREISKRLVECTGDRNAGMYFGQHISIAIQRGNAASVLGTLPTDSGVEPFGPM

SEQ ID NO: 20654 - protein, 992 aa, Phalera bucephala
MFLFFCFIIILVLYFVYYMSIHVPSTRNAVGANPCQLSLDNLVQCPECSEPRYFKGPKGLKIHSKKVHHTSSNLPSSVPVTIAFNNNPPTAYGDNSNQISLTPFWQILGHLKSTKLIVKRIPRGARTSIAESLASTISIVLKDNSQRAWEHLLTFPFRILHVPLDPRNTDSLTSRLKQNCDNHAPLHCNNQSHTPKRQSESAFYRMVESRFSDGDVRGAARMIFSNDSIAPDTPETLTALLAKHPPATHHRLPDPPTFSHPIQISTEDVANAISSFPSGSASGLDGLSPQHLKDLTSFACGDAGQRLLKELTALVNLMINKNVDSSITDILFGGNLCAFSKKDGGIRPIAVGTTLRRLSAKVCCRKVVNPLKDYFQPLQIGFGSGGGCEAAVHALRTFILNDGGKVLLKVDIRNAFNAVDRFALLTQISHKIPNCFNFLRQCYSNPSKLVYKGNLIDSAVGCQQGDPLGPAIFSLAIHPIIMRLESKFNVWYLDYGTLGGDVDTVLRDLKFLIEELKSIGLELNYKKCELYLFDTVSDKDVIKKKFNDLAPNIKLINSSNLRLLGSPILDDSFQDFIDEKIQNFESVSNRLHKINSHMAFNIIKYCLFVPKFTYALRCCHLWTHNDILQRLDNIVRDTVSSISNCCLDDRAWSQASLPVRKGGLGIRKISSLSLPAFLSSVHSTLGLVKRILLPSLTNFRIPYLDEGKDAWLLACPNTTPPTDPTSQKQWDRPICELTRKNLIETSLSSADRARILAASEWESGLWLQAHPSVHLGTLLDPTAFRVALCLRLGVPCLVPHHCQCGSRVNQLGHHGLSCRRSAGRIARHASLNGVIRRALANVNMAAILEPAGLHRDDGKRPDGMTLVPWKMGRPLVWDVTCVDTLAPSHLPASSVRAGNAALSAESLKRRKYDSLGSGYIFEAFGVETLGPWGPGAHRMFREISKRLVECTGDRNAGMYFGQHISIAIQRGNAASVLGTLPTDSGVEPFGPM

SEQ ID NO: 20655 - protein, 992 aa, Phalera bucephala
MFLFFCFIIILVLYFVYYMSIHVPSTRNAVGANPCQLSLDNLVQCPECSEPRYFKGSKGLKIHSKKVHHTSSNLPSSVPVTIAFNNNPPTAYGDNSNQISLTPFWQILGHLKSTKLIVKRIPRGARTSIAESLASTISIVLKDNSQRAWEHLLTFPFRILHVPLDPRNTDSLTSRLKQNCDNHAPLHCNNQSHTPKRQSESAFYRMVESRFSDGDVRGAARMIFSNDSIAPDTPETLTALLAKHPPATHHRLPDPPTFSHPIQISTEDVANAISSFPSGSASGLDGLSPQHLKDLTSFACGDAGQRLLKELTALVNLMINKNVDSSITDILFGGNLCAFSKKDGGIRPIAVGTTLRRLSAKVCCRKVVNPLKDYFQPLQIGFGSGGGCEAAVHALRTFILNDGGKVLLKVDIRNAFNAVDRFALLTQISHKIPNCFNFLRQCYSNPSKLVYKGNLIDSAVGCQQGDPLGPAIFSLAIHPIIMRLESKFNVWYLDDGTLGGDVDTVLRDLKFLIEELKSIGLELNYKKCELYLFDTVSDKDVIKKKFNDLAPNIKLINSSNLRLLGSPILDDSFQDFIDEKIQNFESVSDRLHKINSHMAFNIIKYCLFVPKFTYALRCCHLWTHNDILQRLDNIVRDTVSSISNCCLDDRAWSQASLPVRKGGLGIRKISSLSLPAFLSSVHSTLGLVKRILLPSLTNFRIPYLDEGKDAWLLACPNTTPPTDPTSQKQWDRPICELTRKNLIETSLSSADRARILAASEWESGLWLQAHPSVHLGTLLDPTAFRVALCLRLGVPCLVPHHCQCGSRVNQLGHHGLSCRRSAGRIARHASLNGVIRRALANVNMAAILEPAGLHRDDGKRPDGMTLVPWKMGRPLVWDATCVDTLAPSHLPASSVRAGNAALSAESLKRRKYDSLGSGYIFEAFGVETLGPWGPGAHRMFREISKRLVECTGDRNAGMYFGQHISIAIQRGNAASVLGTLPTDSGVEPFGPM

SEQ ID NO: 20656 - protein, 787 aa, Phalera bucephala
MVESRFSDGDVRGAARMIFSNDSIAPDTPETLTALLAKHPPATHHRLPDPPTFSHPIQISTEDVANAISSFPSGSASGLDGLSPQHLKDLTSFACGDAGQRLLKELTALVNLMINKNVDSSITDILFGGNLCAFSKKDGGIRPIAVGTTLRRLSAKVCCRKVVNPLKDYFQPLQIGFGSGGGCEAAVHALRTFILSDGGKVLLKVDIRNAFNAVDRFALLTQISHKIPNCFNFLRQCYSNPSKLVYKGNLIDSAVGCQQGDPLGPAIFSLAIHPIIMRLESKFNVWYLDDGTLGGDVDTVLRDLKFLIEELKSIGLELNYKKCELYLFDTVSDKDVIKKKFNDLAPNIKLINSSNLRLLGSPILDDSFQDFIDEKIQNFESVSDRLHKINSHMAFNIIKYCLFVPKFTYALRCCHLWTHNDILQRLDNIVRDTVSSISNCCLDDRAWSQASLPVRKGGLGIRKISSLSLPAFLSSVHSTLGLVKRILLPSLTNFRIPYLDEGKDAWLLACPNTTPPTDPTSQKQWDRPICELTRKNLIETSLSSADRARILAASEWESGLWLQAHPSVHLGTQLDPTAFRVALCLRLGVPCLVPHHCQCGSRVSQLGHHGLSCRRSAGRIARHASLNGVIRRALANVNMAAILEPAGLHRDDGKRPDGMTLVPWRMGRPLVWDATCVDTLAPSHLPASSVRAGNAALSAESLKRRKYDSLGSGYIFEAFGVETLGPWGPGAHRMFREISKRLVECTGDRNAGMYFGQHISIAIQRGNAASVLGTLPTDSGVEPFGPM

SEQ ID NO: 20657 - protein, 1222 aa, Pterostichus madidus
MQTRSKSKRGGPDKPDRNRPHPGRILNDDDHSNEKGQSNIAGSTTTKNMAEHQQRTDDYCEEVPHCSSSAPTAVPECPSERRNKKCNWTEQEYKEVMWCFYYAKKVTPKNLTKGTYDIWRLKNPSTRLNINANMLATQRRFIEQSNKVSLADLNKIRKEVQIYIDSPKNEEEPIEPDNDIGQSNDLQEQHTENLVQVDNMQDQQEEWNNEDICRISTKIQERLQEIESTTSRNPLPKIKEVGKHKHILVNTNKAISQIISSKTLNITDINNMLYASASVVIEECGIKLKPQHRQQTMKEPPWKTRIHNKIQQHRKDLAQITELVKGTLKNNKTQSAITSKYKISSEEDAKIKIEELKQKITAKAQRIQRYTKRTNGYKQNIMFQNNTAQFYRQLGKKETQIEKLPKEGETCNYWKEIWEKRDEHIKDNISIQRVKETNEHLKMRWTDITPAEVKAVIKNTANWKTPGPDGLQNFWIKKLTALHDNITESVKNILSGDEDIPEWLTSGTTFLIPKSKETDNPKNFRPITCLPVIYKLITAIVANRIHEHLKINNIVPLEQKGCMKNSYGTKDHLLVSKAISEDSRRKRKDLTMVWIDYKKAFDSVPHSWILEVMNIYGIHDNIKCFLRQVMPKWNTNLKLRSLNSDKEYGNIKIKKGIFQGDSMSPLLFCMALYPLSNLLNETNQGYQLRKNGKKISHLIYVDDLKLFAKSDEEMDALVRIVKDFSKTIKMEFGWEKCAKATIIKGKLITMNNVEDDEQTIKDLDTPINAYKYLGIEEANKILHVVMKEKVAKEYYRRLRLILATELTAKNKATAIKSLAVPILTYSFGVLDWTQIEMKKIDRKTRKLLTIYKILHPKADIDRLYIPRRMGGRGFPHLESILKTNIIALDMYLKQQNDNYLSEIYNLERGKKTDNSIPRRAKKYIEQENMNAIVADTDGDVSIEITKAVKKVKQRVVEHLQANTRSRWKEKKLHGQYLKDLEGTKTNTEHTFSWLTRTDIKGETEALITAAQDQALSTNLIKRDIYKLPTDGKCRMCKSEDESVYHIMSACSVLARDEYIKRHNKVAKHVHWNICRHFQVQGTSEKWYLHSPNKVIEKGPITILWDMGIQTDREIKSNRPDIVIKDYTNKTCILIDISVPADKNIIEKEAEKILKYQDLRIEVSRMWNLKTQVIPIVVGTTGNISKNLTTYLQKIPGNTRNTVSVIQKTAILGTAQILRKVIN

SEQ ID NO: 20658 - protein, 1097 aa, Pterostichus madidus
MNKFLYRTYLFVTNMETDMRNYTGRLHTAVTEKYPELANKTLMNILSQKREILNKNKLTQEDIISIREEVRRELRGDNEEKGQEAQNDISVQETLQNYQHSQIDDHIVSTYNTQKALYYGIHPTCKPRLRKLRTNKMTKKYITQVNNILSKEMEVCTSIEELHSHIYTGAITVLALHDEKLVAKENVSSTKKKDNIPAWQKRIQMKISQLRRDIGRLTQAKIQPNNQRLIRQSNDIITSYKSEENNTAEEVLDLLKQKLSIQAARMKRYKQSADRKKQIFLFNNNQRLFYRTLNNNNKQNANNKTPKPLETQKFWTQIWEAPQTHNKSAKWIKLEKKRMEKVRVMTPIQISTEDLSKALSRTQNWKTPGPEHIHNFWIKRFTATHQTIVELLNEAVKNPAIIPEFLTQARTYLLPKTEPTSEDPSKYRPITCLPTLYKILTSIIANKINAHVEENNIITEEQKGCRKRSRGCKEQLTIDSVIMENTKKHKCDLYSAYIDYRKAFDSVPHTWLIDVLHLYKVNPTIISFLQKLMETWRVKLNINNEDRGEVKIERGIFQGDSLSPLWFCLALQPLSTILNDSGKGLTILNTNITHLLYMDDLKLFAPSQAHLNRLLKLTETFTFSHDIRMEFGIDKCKINAIQKGKCVETESYKLAYNTEDEITTLIEDEKYKYLGCEQKRGIERKQIKEQLKNRFQSRMNGIMNTMLTGKNIATAVNSYAAPTITYSFGIVRWTATELEELNRTIRTTCTKYRMKHPKSSIERFHLDRKKGGCGFIDFRNAYHQEVHNLRKFFFEKASLSKLHKEIIKLDEKHTPLDLANKDFTPEVFIITDEQKIQSWKEKELHGRHIAKLQENHIDEKASNSWLQHSALYPETEGFVMAIQDQVIATRNYKKYIIKDQTQTHARCRMCNGENETIEHIITACTPLAPTEYLKRHNNVAKIIHSKLCNQILGVPEIPYYKYQPNSVIETPLHKLYWDRTIQTDRTVQHNRPDIVYQDKIRKLTYLIDVAVPSVDNLKKKHAEKITNYLPLSIDMKQTWNQETLKIIPVIIGSTGEIPYTLHSAIKELNLGPHTYQQIQKAVLLDTCHTVRKFLNIK

SEQ ID NO: 20659 - protein, 1095 aa, Pterostichus madidus
MNKFLYRTYLFVTNMETDMRNYTGRLHTAVTEKYPELANKTLMNILSQKREILNKNKLTQEDIISIREEVRRELRGDNEEKGQEAQNDISVQETLQNYQHSQIDDHIVSTYNTQKALYYGIHPTCKPRLRKLRTNKMTKKYITQVNNILSKEMEVCTSIEELHSHIYTGAITVLALHDEKLVAKENVSSTKKKDNIPAWQKRIQMKISQLRRDIGRLTQAKIQPNNQRLIRQSNDIITSYKSEENNTAEEVLDLLKQKLSIQAARMKRYKQSADRKKQIFLFNNNQRLFYRTLNNNNKQNANNKTPKPLETQKFWTQIWEAPQTHNKSAKWIKLEKKRMEKVRVMTPIQISTEDLSKALSRTQNWKTPGPEHIHNFWIKRFTATHQTIVELLNEAVKNPAIIPEFLTQARTYLLPKTEPTSEDPSKYRPITCLPTLYKILTSIIANKINAHVEENNIITEEQKGCRKRSRGCKEQLTIDSVIMENTKKHKCDLYSAYIDYRKAFDSVPHTWLIDVLHLYKVNPTIISFLQKLMETWRVKLNINNEDRGEVKIERGIFQGDSLSPLWFCLALQPLSTILNDSEKGLTILNTNITHLLYMDDLKLFAPSQAHLNRLLKLTETFSHDIRMEFGIDKCKINAIQKGKCVETESYKLAYNTEDEITTLIEDEKYKYLGCEQKRGIERKQIKEQLKNRFQSRMNGIMNTMLTGKNIATAVNSYAAPTITYSFGIVRWTATELEELNRTIRTTCTKYRMKHPKSSIERFHLDRKKGGCGFIDFRNAYHQEVHNLRKFFFEKASLSKLHKEIIKLDEKHTPLDLANKDFTPEVFIITDEQKIQSWKEKELHGRHIAKLQENHIDEKASNSWLQHSGLYPETEGFVMAIQDQVIATRNYKKYIIKDQTQTHARCRMCNGENETIEHIITACTPLAPTEYLKRHNNVAKIIHSKLCNQILGVPEIPYYKYQPNSVIETPLHKLYWDRTIQTDRTVQHNRPDIVYQDKIRKLTYLIDVAVPSVDNLKKKHAEKITNYLPLSIDMKQTWNQETLKIIPVIIGSTGEIPYTLHSAIKELNLGPHTYQQIQKAVLLDTCHTVRKFLNIK

SEQ ID NO: 20660 - protein, 1095 aa, Pterostichus madidus
MNKFLYRTYLFVTNMETDMRNYTGRLHTAVTEKYPELANKTLMNILSQKREILNKNKLTQEDIISIREEVSRELRGDNEEEGQEAQNDISVQETLQNYQHSQIDDHIVSTYNTQKALYYGIHPTCKPRLRKLRTNKMTKKYITQVNNILSKEMEVCTSIEELHSHIYTGAITVLALHDEKLVAKENVSSTKKKDNIPAWQKRIQMKISQLRRDIGRLTQAKIQPNNQRLIRQSNDIITSYKSEENNTVEEVLDLLKQKLSIQAARMKRYKQSADRKKQIFLFNNNQRLFYRTLNNNNIQNANNKTPKPLETQKFWTQIWEAPQTHNKSAKWIKLEKKRMEKVRVMNPIQISTEDLSKALSRTQNWKTPGPEHIHNFWIKRFTATHQTTVELLNEAVKNPAIIPESLTQARTYLLPKTEPTSEDPSKYRPITCLPTLYKILTSIIANKINAHVEENNIITEEQKGCRKRSRGCKEQLTIDSVIMENTKKHKCDLYSAYIDYRKAFDSVPHTWLIDVLHLYKVNPTIISFLQKLMETWRVKLNINNEDRGEVKIERGIFQGDSLSPLWFCLALQPLSTILNDSGKGLTILNTSITHLLYMDDLKLFAPSQAHLNRLLKLTETFSHDIRMEFGIDKCKINAIQKGKCVETESYKLAYNTEDEITTLIEDEKYKYLGCEQKRGIERKHIKEQLKNRFQSRMNGIMKTMLTGKNIATAVNSYAAPTITYSFGIVRWTATELEELNRTIRTTCTKYRMKHPKSSIERFHLDRKKGGCGFIDFRNAYHQEVHNLRKFFFEKASLSKLHKEIIKLDEKHTPLDLANKDFTPEVFIITDEQKIQSWKEKELHGRHIAKLQENHIDEKASNSWLQHSGLYPETEGFVMAIQDQVIATRNYKKYIIKDQTQTHARCRMCNGENETIEHIITACTPLAPTEYLKRHNNVAKIIHSKLCNQILGVPEIPYYKYQPNSVIETPLHKLYWDRTIQTDRTVQHNRPDIVYQDKIRKLTYLIDVAVPSVDNLKKKHAEKITNYLPLSIDMKQTWNQETLKIIPVIIGATGEIPYTLHSAIKELNLGPHTYQQIQKAVLLDTCHTVRKFLNIK

SEQ ID NO: 20661 - protein, 1095 aa, Pterostichus madidus
MNKFLYRTYLFVTNMETDMRNYTGRLHTAVTEKYPELANKTLMNILSQKREILNKNKLTQEDIISIREEVRRELRGDNEEKGQEAQNDISVQETLQNYQHSQIDDHIVSTYNTQKALYYGIHPTCKPRLRKLRTNKMTKKYITQVNNILSKEMEVCTSIEELHSHIYTGAITVLALHDEKLVAKENVSSTKKKDNIPAWQKRIQMKISQLRRDIGRLTQAKIQPNNQRLIRQSNDIITSYKSEENNTAEEVLDLLKQKLSIQAARMKRYKQSADRKKQIFLFNNNQRLFYRTLNNNNKQNANNKTPKPLETQKFWTQIWEAPQTHNKSAKWIKLEKKRMEKVRVMTPIQISTEDLSKALSRTQNWKTPGPEHIHNFWIKRFTATHQTIVELLNEAVKNPAIIPEFLTQARTYLLPKTEPTSEDPSKYRPITCLPTLYKILTSIIANKINAHVEENNIITEEQKGCRKRSRGCKEQLTIDSVIMENTKKHKCDLYSAYIDYRKAFDSVPHTWLIDVLHLYKVNPTIISFLQKLMETWRVKLNINNEDRGEVKIERGIFQGDSLSPLWFCLALQPLSTILNDSGKGLTILNTNITHLLYMDDLKLFAPSQAHLNRLLKLTETFSHDIRMEFGIDKCKINAIQKGKCVETESYKLAYNTEDEITTLIEDEKYKYLGCEQKRGIERKQIKEQLKNRFQSRMNGIMNTMLTGKNIATAVNSYAAPTITYSFGIVRWTATELEELNRTIRTTCTKYRMKHPKSSIERFHLDRKKGGCGFIDFRNAYHQEVHNLRKFFFEKASLSKLHKEIIKLDEKHTPLDLANKDFTPEVFIITDEQKIQSWKEKELHGRHIAKLQENHIDEKASNSWLQHSGLYPETEGFVMAIQDQVIATRNYKKYIIKDQTQTHARCRMCNGENETIEHIITACTPLAPTEYLKRHNNVAKIIHSKLCNQILGVPEIPYYKYQPNSVIETPLHKLYWDRTIQTDRTVQHNRPDIVYQDKIRKLTYLIDVAVPSVDNLKKKHAEKITNYLPLSIDMKQTWNQETLKIIPVIIGSTGEIPYTLHSAIKELNLGPHTYQQIQKAVLLDTCHTVRKFLNIK

SEQ ID NO: 20662 - protein, 1095 aa, Pterostichus madidus
MNKFLYRTYLFVTNMETDMRNYTGRLHTAVTEKYPELANKTLMNILSQKREILNKNKLTQEDIISIREEVRRELRGDNEEKGQEAQNDISVQETLQNYQHSQIDDHIVSTYNTQKALYYGIHPTCKPRLRKLRTNKMTKKYITQVNNILSKEMEVCTSIEELHSHIYTGAITVLALHDEKLVAKENVSSTKKKDNIPAWQKRIQMKISQLRRDIGRLTQAKIQPNNQRLIRQSNDIITSYKSEENNTAEEVLDLLKQKLSIQAARMKRYKQSADRKKQIFLFNNNQRLFYRTLNNNNKQNANNKTPKPLETQKFWTQIWEAPQTHNKSAKWIKLEKKRMEKVRVMTPIQISTEDLSKALSRTQNWKTPGPEHIHNFWIKRFTATHQTIVELLNEAVKNPAIIPEFLTQARTYLLPKTEPTSEDPSKYRPITCLPTLYKILTSIIANKINAHVEENNIITEEQKGCRKRSRGCKEQVTIDSVIMENTKKHKCDLYSAYIDYRKAFDSVPHTWLIDVLHLYKVNPTIISFLQKLMETWRVKLNINNEDRGEVKIERGIFQGDSLSPLWFCLALQPLSTILNDSGKGLTILNTNITHLLYMDDLKLFAPSQAHLNRLLKLTETFSHDIRMEFGIDKCKINAIQKGKCVETESYKLAYNTEDEITTLIEDEKYKYLGCEQKRGIERKQIKEQLKNRFQSRMNGIMNTMLTGKNIATAVNSYAAPTITYSFGIVRWTATELEELNRTIRTTCTKYRMKHPKSSIERFHLDRKKGGCGFIDFRNAYHQEVHNLRKFFFEKASLSKLHKEIIKLDEKHTPLDLANKDFTPEVFIITDEQKIQSWKEKELHGRHIAKLQENHIDEKASNSWLQHSGLYPETEGFVMAIQDQVIATRNYKKYIIKDQTQTHARCRMCNGENETIEHIITACTPLAPTEYLKRHNNVAKIIHSKLCNQILGVPEIPYYKYQPNSVIETPLHKLYWDRTIQTDRTVQHNRPDIVYQDKIRKLTYLIDVAVPSVDNLKKKHAEKITNYLPLSIDMKQTWNQETLKIIPVIIGSTGEIPYTLHSAIKELNLGPHTYQQIQKAVLLDTCHTVRKFLNIK

SEQ ID NO: 20663 - protein, 1203 aa, Benthosema glaciale
MESLTTPSPMIRRRGSRTSFWNRIGDSPSPATVANRITRRRAGALVRRRLRLQDTRDVEEDVVPLPTGLPLSQVVERRRRRPRGGRRVARIRTVAPGGIAPRPLPLPPLRIPLYKKITCPMCMASLASRDKIQKHFEQYHKDSAILFTCPKCRKSDRRVHPIACHIPKCKTTNTTPTRGRGLDCPYCHGRFRSRAGLTLHNKSAHRNIYLHERKIKDRAMKDIENRKNLWTREELAVLKRSLQDGPRARTTKDIWIELDRSKSKAQIISRLRKLREGRVSAPRLSEAQRQEFMEDLLRNRDLPAKVKRVRNALQDQITCWGVEGINFLGSMASATLTLGECCKERVDSASEAVPEELAVPAVARRPRAAKRDGGARRRDLSRRESRDEKRKLIEKLVKKGWKDLAAFVIDDKTEIGCMLPHKDILSLYEGLWGTAKPFQGLGGFGQEEQAVNYYLQGLITVGEVKENLLKIKDDSGKGLDGISKGAIKGWDPNFDKTAKLFNSWLVSGYVPKSFKKNRTALIPKVGDAEKLKDVNNWRPITIGSMFLRLFAKIIHKRLEQACGITPRQRGFIQASGCAENLTILNNLMAQRKKECKPLGVVFIDFAKAFDSVAHAHLWEVFRRRGVDKHIIKLLKSMYTDGTTVFKSMNKMTKEVDMKVGVKQGCPLSPLLFNLAINPLIQKLEDTGQGVDVGGIQLATLAFADDLVLLSDSVEGMEFNLKILESFSDLTGLKLQPKKCCGFFLAHEAGSYSLNQEISWKLNDVPLRLMGAGEPTKYLGLQIDPWMGAVPVDCMKEVEKLFKAINDKPLRPREKLEILNKYALPRIYYQADLTLGAAKGLIKADELIRREVKKWFSLTSCTSNGLLYSKSRDGGMGVQCLGKLIPSMRIRRLHRLSTSSDLVTKKLLKKSCGRKTFKRLWLAAGGSEEEMPTWGQKAQATGPDGELRDVGIQKPVDWRADELQRWAEQESQGVGVACFKGDKIGNDWLMNSWLKGFSDNSYSAALRMRANVVPVRQALARGREDLTKSCRRCGFISESLLHVIGVCKKVSKSRCKRHNKICKILVQVAEKEGWTARVEPSYELPSGRSLRPDILLTRGRKALVIDVTIRFEKHLDTLQKAYREKVVKYEPLKDLIKRENPGVGAVEFHGFPIGARGLWLQKNSALLKEIGVRDVDRKSKLLARRTVMYTLDHIKNFFRSAYNE

SEQ ID NO: 20664 - protein, 1002 aa, Torymus geranii
MDTLRSTGPNPTSTEIAERQHICVDCQRAFTTPNGLGLHRVRAHPVQTNEAVTSNTATAPWTTEDLRRMAVYELALPPRAKVNVCIQRGLMPHKTNNSITYARKKPLYRSILAELREERRRREEESSSLPALDNEERRCERPPWDYMEPRATLENWLAENLSGKLGEAVHHLDDRHATLALLRAWFNDVKLLAHGGEGGASRARGKERRPPREPTNRSGRKKVAYKRIQKLWKVNMRKAAKIVLDGDKDDDAHPSLAAQTAFWQPILEEEVPCASSTDLVEDDDERNAYACVWKPVEPGEVLKMRPPNGTAPGPDGITTKVWKRVPVMEKAAFFNLVLWCEELPGDMCDSRTVLIPKSEGSLDPATYRPLSIASIPMRHLHRILADRVNALDLLDLRQRAFIAADGAAENVYTLEVLLRDAWEKKRPLFIAVLDVRKAFDTVRHSAIHEVLRKKGIPAEMRRYVKRVYEEARTKLEVDGKQSEWLKPTQGVRQGDPLSPWIFNAVMDEGLRVIEPAIGYDIDGKRVNALAFADDLVLVGSTVSGLKSSLERISEALGRQGLSLMPAKCATLSLVPDGKSKKTKVASGKPFRVAGVKLRELGIDDTWQYLGITFNAKGTTNLSLNIEEQLKSITSAPLKPQQRMRILKTFLLTRYTHVAVLSSITHDELRRVDICVRRAVRHWLRLPHDVPTAFFHARVSQGGLGIQAMEAKIPELTEKRLNNIRNSRSVCAGPIMASKWATNKLAWCARRSAETAEWPLQLHTSTDGYELRECGRARASTSWMYDDYVAIPGGDWIKYIHTRINALPSRERTSRGRRDTLPLLCRYGCHAVETTAHTIQNCPIAHGGRVLRHDCVVDTLVNAIIDKGGTAEREWLYQTRDGSRKPDIVAKIDGQIFVIDVQVVSGAPPLDETNSEKQNYYQNNLDLVSAIRRRWRLYDSPLIFRPITISWRGVWCAASESLLRRLGFTWTLLQGVTTRVLLGSYLNFNQAQRGRVGRVRRTD

SEQ ID NO: 20665 - protein, 1041 aa, Triatoma infestans
MESDPLPWACPHCGRSFGTASGLGLHRRRAHIEEFNAGISLERVRCRWADEEIEIAADFEMEQRVQGISANIISGLMRLFPGRSRDAIKGLRKKTCFKDKVCARIGGGLPGDGPNRGVGALMADGRPGQLGGLTDARAGVSATVPDEVGGLADAGAAGVGPLEPGSRVREGGEGPGELGRGALLASLRADLSKLRGAARTQRAVYLGRAVRGVLEGLDPAGDLEEWWRALARGGDARGPEGTNVDRETRDAWGVGTRVVHNARSRRRIAYAEVQSLWARDRRAAVQRILGGGRDRGDQTMSDMVGYWGEVFGQASCEWTGSAAGANLRWDEAELREPVTDLELRETRLGVGAAAGPDAVGVDEWNGVPLWEKRLVYNVFLAWGRIPAGLKVARTVLLPKTDAPESPAGYRPISMTSVIIRQYHKILARRLEGWITHVPEQGGFIRGRDGVGSNVLKLNGILKRTWSSRRPLFAVSVDLAKAFDSVSHCAVWEILRRAGSPRWFSGYIRDLFEHSAQVLNWRGTSSQPIVVGRGVRQGDPLSPLLFNLVMDHILRGLPERVGFWSGLGGPRIRALAYADDVLLLSSSVVGMRLLLGAFERRCRECGLEVNRAKSWSLSLNPSGTRKMIKVDGDLQFEVAGGGLRAIGISDTFTYLGVEFGPRGVVVPTLDMGSKLELIDRAPIKPQQRLEIVREFLLPSLYHRLVLGKLEAALLRRTDVLTRRWVRKWLRLPPDVPRAYIHAARRAGGLAVPQLEILVPVWRAARRRRVMELWGDDEGEILGEPVTVSNGPASVEEVKKMTEEDLYGRVDGVDLGESGRVSASTSWLTGRELSGREFIQFVRLHSGCLPGRMRTSRGRRGLGGPVWCRAGCARAETIAHIVQCCPVTRGGRILRHHAVVKLLATAFELRRFRVYRETSIVLGDTTARPDLIVVKGEGVWVLDAQIVSPRERLAAINRRKGLKYDTMEVRGAVEALTGGRFQGVVGVTVTWKGIWCWQSARDLRRMGIGRKVMEWITERVIRGSHVSWTRWNQMRGSRTGAIL

SEQ ID NO: 20666 - protein, 983 aa, Triatoma infestans
MAAVVVMSEEVDVLMHDDLSDSHCVFVEVVLIKKKKTCFKDKVCARIGGGLPGDGPNRGVGALMAGGRPGQLGGLTDARAGVSATVPDEVGGLADAGAAGVGPLEPGSRVREGGEGPGELGRGALLASLRADLSKLRGAARTQRAVYLGRAVRGVLEGLDPAGDLEEWWRALARGGDARGPEGTNVDRETRDAWGVGTRVVHNARSRRRIAYAEVQSLWARDRRAAVQRILGGGRDRGDQTMSDMVGYWGEVFGQASCEWTGSAAGANLRWDEAELREPVTDLELRETRLGVGAAAGPDAVGVDVWNGVPLWERRLVYNVFLAWGRIPGGLKVARTVLLPKMDAPESPAGYRPISMTSVIIRQYHKILARRLEGWITHVPEQGGFIRGRDGVGSNVLKLNGILKRTWSSRRPLFAVSVDLAKAFDSVSHCAVWEILRRAGSPRWFSGYIRDLFEHSAQVLNWRGTSSQPIAVGRGVRQGDPLSPLLFNLVMDHILRGLPERVGFWSGLGGPRIRALAYADDVLLLSSSVVGMRLLLGAFERRCRECGLEVNRAKSWSLSLNPSGTRKMIKVDGDLQFEVAGGGLRAIGISDTFTYLGVEFGPRGVVVPTLDMGSKLELIDRAPIKPQQRLEIVREFLLPSLYHRLVLGKLEAALLRRTDVLTRRWVRKWLRLPPDVPRAYIHAARRAGGLAVPQLEILVPVWRAARRRRVMELWGDDEGEILGEPVTVSSGPASVEEVKKMTEEELYGRVDGVDLGESGRVSASTSWLTGREISGREFIQFVRLHSGCLPGRMRTSRGRRGLGGPVWCRAGCARAETIAHIVQCCPVTRGGRILRHHAVVRLLATAFELRRFRVYRETSIVLGDTTARPDLIVVKGEGVWVLDAQIVSPRERLAAINRRKGLKYDTMEVRGAVEALTGGRFQGVVGVTVTWKGIWCWQSARDLRRMGIGRRVMEWITERVIRGSHVSWTRWNQMRGSRTGDIL

SEQ ID NO: 20667 - protein, 1041 aa, Triatoma infestans
MESDPLPWACPHCGRSFGTASGLGLHRRRAHIEEFNAGISLERVRCRWADEEIEIAADFEAEQRVQGISANIISGLMRLFPGRSRDAIKGLRKKTCFKDKVCARIGGGLPGDGPNRGVGALMADGRPGQLGGLTDARAGVSATVPDEVGGLADAGAAGVGPLEPGSRVREGGEGPGELGRGALLASLRADLSKLRGAARTQRAVYLGRAVRGVLEGLDPAGDLEEWWRALARGGDARGPEGTNVDRETRDAWGVGTRVVHNARSRRRIAYAEVQSLWARDRRAAVQRILGGGRDRGDQTMSDMVGYWGEVFGQASCEWTGSAAGANLRWDEAELREPVTDLELRETRLGVGAAAGPDAVGVDEWNGVPLWEKRLVYNVFLAWGRIPAGLKVARTVLLPKTDAPESPAGYRPISMTSVIIRQYHKILARRLEGWITHVPEQGGFIRGRDGVGSNVLKLNGILKRTWSSRRPLFAVSVDLAKAFDSVSHCAVWEILRRAGSPRWFSGYIRDLFEHSAQVLNWRGTSSQPIVVGRGVRQGDPLSPLLFNLVMDHILRGLPERVGFWSGLGGPRIRALAYADDVLLLSSSVVGMRLLLGAFERRCRECGLEVNRAKSWSLSLNPSGTRKMIKVDGDLQFEVAGGGLRAIGISDTFTYLGVEFGPRGVVVPTLDMGSKLELIDRAPIKPQQRLEIVREFLLPSLYHRLVLGKLEAALLRRTDVLTRRWVRKWLRLPPDVPRAYIHAARRAGGLAVPQLEILVPVWRAARRRRVMELWGDDEGEILGEPVTVSNGPASVEEVKKMTEEDLYGRVDGVDLGESGRVSASTSWLTGRELSGREFIQFVRLHSGCLPGRMRTSRGRRGLGGPVWCRAGCARAETIAHIVQCCPVTRGGRILRHHAVVKLLATAFELRRFRVYRETSIVLGDTTARPDLIVVKGEGVWVLDAQIVSPRERLAAINRRKGLKYDTMEVRGAVEALTGGRFQGVVGVTVTWKGIWCWQSARDLRRMGIGRRVMEWITERVIRGSHVSWTRWNQMRGSRTGAIL

SEQ ID NO: 20668 - protein, 1376 aa, Beroe forskalii
MAGKQTYDPHNLLVCSPAQQLLLTPKRLHKCGNCRRGFETKGGLSQHLKKCGKVEKWHPCDFPTCPFKAKSPGGKKNHMKKCSHGKSNNSDYQSMGGDSGADSPTKLLTSAHLQREIQVPTYTETRDTGSLPPEPSTSQKSSTPLTKGIPDFTFDSEVSFTPPTFRKFSRTAPSNISHDVLDSSYELGPSSTSVMYKNIPRSDNHSIQSPCPFISKPPLSHFSGTAARSPPFIPPGDSYGPEGTQHPIIKLRNSVHQTNDSAVMYGRRKSETQLPTGAGQDDISLMPPPLHETALDEAISGARRTVEQAAGREINDLKVPNITDKLNIGTSETKVERILQWESAQENYDDLKDSTPLDFDIKVRAKSIRDKEAWSKVDGIFEEHFSKEIQQVDIDDVDAYLDTFKECTYKALIDVAGTVKNTVHKHIDKRYVDQQKKKVRKEKNVAKKKFKALMRDDQTSDEMLRDHNIHWKRLIRLHSKLKKQELAVNERMERESNTKAFCRNPYEFVKDNVTCKNINGWKTPDCTKEEANLFFKQRYQDINRSQRIPFPHFLPEPGTPRTECYTEPPSDDEIWEYVKSRRNKSAPGPDGIPFKVYKSCPKIRGVLCRIVRLSFSKQIICAADRIAVKTLIPKGNSMELKNFRDLTLFNTSLKTIMGVWARRVRNFMLKNKFFNTDVQKGFLPKISGCLEHNQTVIDIMKNRIDSGKDAFIVWMDLENAFGSVKHNLMSAALRFYGVPEKMSTMLMSLYRDCAVKVVTPQWTTAPFRVEEGSLQGGPEAGLLFNIAWNLGLVFIMLVAESIGCKQEEKPVAGFADDVTLTAESRTQVRGLVSAAESYCSWAGLRFKDSKCKAMGIVDGSLVNPLIAVNGKVIPAMHKTPFKFLGRLVYPKFNHKDDAQVVDKFVNLMNKTDNIKVDDRKKAWIYENGVLPAMTWDFMVYHCTDQGVSTMEACATRLLKKWLRLAKCADPSVLYRREKGLGIKNVRTICMKTQVNREVLLSCSKDSTVRATSSARREEEGRKNRKWKPGEVLDEAVQRVTYKHAFKGQSDRRGLGHGVYCKKSPGRKEISQEVCNITEEEKIPHILSLAQQSKWLEWDNLINLDMKWQEMMYALSPSMLSFVLNSVQDTLPHPRNLRRWKLDVEAACSLCGWKNVGLVHILCGCKVALEQGRISYRHDSILKEIAEALTKKIQAIEEVVPLPSGVQKVDFVESGQRTKKKKKKKLATGLLDVAKDWVTVMDTRRNQAHFPPHIMTTSDRPDLVLYSNNTRNVVMIELTSPAEENIEKWRSIKQSKYEKLAENIREAGTWKPTVLTVEVGARGYVAKRTNYVWRKLGLSYQDGNKLSERLSRVALRCSHFIWICRNTKIWTSPTESK

SEQ ID NO: 20669 - protein, 1198 aa, Sycophila sp.
MLCTKLDKEPNAIKGSPSLGLSRPRDEYSGAKQIMSTRRSTSLGCCPPADSPGEAEAGGSNTNPATGSRNTRLRTSSEKIWRSVEITVKTVAQDMISCPVCTDAGKNLICQGGKELEKHIKAEHKSITKITWECRVCSKSYGTAHGLRIHATHCKGPTVEKPPLPFKCDECEATFATQIGLGQHERLKHPQLRNERRRQQAAGTGRKGRLPSLMNTDEFNQLIALNRRFKNETRVNEKIREFFPHLTNRQISDLRRRIPPSESDSTSASSSSSSVVTVATATPAEAASSSSEDDDVFEDAVEAATTPTETIVDESWRQNLKDSHESILDSELDERWTRLKDVLVSIARENGPGSRLDEALQLLLTVIRDEVESSAGKEPRPRKKRGRPPTRAEKKRYFYRRCQTLFDECPKKLADLVMENDFSLLQRSEPPESKAIEELYSSLWGVVGPEVTADRPFEEAVPLAVAYHPFTSKEVLARIKRIQSSTAPGPDGVKKSHLAKKGTSAILALFFNLLLAYDHYPQEWRMNRTTLIPKVGRDRKLVKNWRPITISSLISRIFSGLLDQKLRGYIKQSPRQKGFTSENGCYINVATLESALRSAKRNGGVVVVMDIEKAFDTVPHSLIKTALERKGVPSSYAEYITRMYGDCWTIIKGSNGTVRIQLKRGVKQGDPLAPLIFNLVIEPLLDKLQSDTDGIKIDDSEEVAAVLGFADDTVLLARSKTEAVKQFQMTCQYLSSLGMKVAIAKCNAFEVRPFEKSYVICDPQIKFDGQSISYGGPDETFKYLGAKVTPWRGKVSDFNLDSFREIFSRVRRLALKPLQKMELLTTYLIPRFIYGLICKPPSVVNLRKIDAFIREQAKGMLHLSPSTCNELFYTPKKHGGLGLPEIEKLVLLAAIRNGLKARESNDPVSKAAASSERVEKELHGFAKVLRLNWPMTLDELDQHKSRIKSSYVKEWAKKSQGVGIKEFENDPIANKWLQSSCLLKPAQVTDALKLRTDTMGTRMALRRIPERARLIPPECRKCKEKVENLPHILGQCINTKIDRMERHDFVKNLIRDRVSRKYRVLDEPRIYDNNTLYKPDLVIDMNEAGALVVDITVRYEKQDYLSAARQEKREKYERISRAVKRMLNKTKVEIAPIVVGSRGAMPAATIEWLRKLEIPKTEWLTISLGVLRRAISIVRKFFDYEHEEDEETGAAAPV

SEQ ID NO: 20670 - protein, 1198 aa, Sycophila sp.
MLCTKLDKEPNAIKGSPSLGLSRPRDEYSGAKQIMSTRRSTSLGCCPPADSPGEAEAGGSNTNPATGSRNTRLRTSSEKIWRSVEITVKTVAQDMISCPVCTDAGKNLICQGGKELEKHIKAEHKSITKITWECRVCSKSYGTAHGLRIHATHCKGPTVEKPPLPFKCDECEATFATQIGLGQHERLKHPQLRNERRRQQAAGTGRKGRLPSLMNTDEFNQLIALNRRFKNETRVNEKIREFFPHLTNRQISDLRRRIPPSESDSTSASPSSSSVVTVATATPAEAASSSSEDDDVFEDAVEAATTPTETIVDESWRQNLKDSHESILDSELDERWTRLKDVLVSIARENGPGSRLDEALQLLLTVIRDEVESSAGKEPRPRKKRGRPPTRAEKKRYFYRRCQTLFDECPKKLADLVMENDFSLLQRSEPPESKAIEELYSSLWGVVGPEVTADRPFEEAVPLAVAYHPFTSKEVLARIKRIQSSTAPGPDGVKKSHLAKKGTSAILALFFNLLLAYDHYPQEWRMNRTTLIPKVGRDRKLVKNWRPITISSLISRIFSGLLDQKLRGYIKQSPRQKGFTSENGCYINVATLESALRSAKRNGGVVVVMDIEKAFDTVPHSLIKTALERKGVPSSYAEYITRMYGDCWTIIKGSNGTVRIQLKRGVKQGDPLAPLIFNLVIEPLLDKLQSDTDGIKIDDSEEVAAVLGFADDTVLLARSKTEAVKQFQMTCQYLSSLGMKVAIAKCNAFEVRPFEKSYVICDPQIKFDGQSISYGGPDETFKYLGAKVTPWRGKVSDFNLDSFREIFSRVRRLALKPLQKMELLTTYLIPRFIYGLICKPPSVVNLRKIDAFIREQAKGMLHLSPSTCNELFYTPKKHGGLGLPEIEKLVLLAAIRNGLKARESNDPVSKAAASSERVEKELHGFAKVLRLNWPMTLDELDQHKSRIKSSYVKEWAKKSQGVGIKEFENDPIANKWLQSSCLLKPAQVTDALKLRTDTMGTRMALRRIPERARLIPPECRKCKEKVENLPHILGQCINTKIDRMERHDFVKNLIRDRVSRKYRVLDEPRIYDNNTLYKPDLVIDMNEAGALVVDITVRYEKQDYLSAARQEKREKYERISRAVKRMLNKTKVEIAPIVVGSRGAMPAATIEWLRKLEIPKTEWLTISLGVLRRAISIVRKFFDYEHEEDEETGAAAPV

SEQ ID NO: 20671 - protein, 989 aa, Lytechinus variegatus
MSLNLFYLLVHILAVLVCSRENYALRFDVPSLPSHVWTNYNDELSDILEPLHFELGSESVSPKVAGEQFSHLLTTFLSSKSEFTREERESRFQSHVPKTLSEAKKKKNELRKKAFGRHGTEEDRKAFQEAVKTVSFLNKIKRRNDERKLTSHQEKMFRSNFFDFAKKCSEGKLLSSQQKPQFSKEEADKYFLSKYSEQSPLDFSQLNWFPWLPDRFDTSFDMNAIKPKDIKNILRAKKSKSAPGDDGIMYGILRNLPTTHRFMATLFTKILTEGDPPECWKNSRITLLHKGGDTKDPSNFRMIALTSCVGKLYHQILASRTISYLQANNLIDTTTQKAFLPDVSGCIEHSRCLTEIIADARHRKRTVHVTFFDLADAFGSVNHDLIAHTLERNGIPPSIIRYVKTLYNGLNGYVQGPGWKSSRFPFKKGTFQGDPFSPVLFIMVFDPIISFLKTFEDSHGYELNGYKIITLPYADDFILVTNHKTKHQKLMNEISRIARSMNFSLKLPKCKSLSISSGSMKEVIFRIDGTPLTKVKDSPEKFLGTWVTGSSHGCMNMIRDKIETTLNNIDSVCIRPEYKLKIYTKYFLYAIKFLLSVHDLTKTQRSSLDKCSSRFLKKWLNMPQGATLAIVHCQQGMDIPTISQVYSECHAQTVAHCLIRADERVNAAMTACIVREESYSRKSYGNTDARDMVNIAMNTTPDRKWSKVKSNITCAVKNKYQDIWTDKVEGLLLQGKFLELMRLEQEDLTWKSIIYDLPSKVLSFAVRSSIDCLPTFRNLQRWGKKLSANCKLCGNKQTLLHVLNGCKIMLEQGRYTWRHNNILNAIYECLQSSISGDYTLRVDLPDKANHPTIPMNILPTPLRPDLVLSSVQNKEVIVVELTVPFEQNIDSRHVSKCNKYAPLTNDIIDQGYSCKLFCIEVGSRGYVSKQNKVRIKSLLKTMKLGKKNKAMLNRISKMSIMTSYSLFLAKDQPTWTEPPLLSVPENNQS

SEQ ID NO: 20672 - protein, 989 aa, Lytechinus variegatus
MSLNLFYLLVHILAVLVCSRENYALRFDVPSLPSHVWTNYNDELSDILEPLHFELGSESVSPKVAGEQFSHLLTTFLSRKSEFTREERESRFQSHVPKTLSEAKKKKNELRKKAFGRHGTEEDRKAFQEAVKTVSFLNKIKRRNDERKLTSHQEKMFRSNFFDFAKKCSEGKLLSSQQKPQFSKEEADKYFLSKYSEQSPLDFSQLNWFPWLPDRFDTSFDMNAIKPKDIKNILRAKKSKSAPGDDGIMYGILRNLPTTHRFMATLFTKILTEGDPPECWKNSRITLLHKGGDTKDPSNFRMIALTSCVGKLYHQILASRTISYLQANNLIDTTTQKAFLPDVSGCIEHSRCLTEIIADARHRKRTVHVTFFDLADAFGSVNHDLIAHTLERNGIPPSIIRYVKTLYNGLNGYVQGPGWKSSRFPFKKGTFQGDPFSPVLFIMVFDPIISFLKTFEDSHGYELNGYKIITLPYADDFILVTNHKTKHQKLMNEISRIARSMNFSLKLPKCKSLSISSGSMKEVIFRIDGTPLTKVKDSPEKFLGTWVTGSSHGCMNMIRDKIETTLNNIDSVCIRPEYKLKIYTKYFLYAIKFLLSVHDLTKTQRSSLDKCSSRFLKKWLNMPQGATLAIVHCQQGMDIPTISQVYSECHAQTVAHCLIRADERVNAAMTACIAREESYSRKSYGNTDARDMVNIAMNTTPDRKWSKVKSNITCAVKNKYQDIWTDKVEGLLLQGKFLELMRLEQEDLTWKSIIYDLPSKVLSFAVRSSIDCLPTFRNLQRWGKKLSANCKLCGNKQTLLHVLNGCKIMLEQGRYTWRHNNILNAIYECLQSSISGDYTLRVDLPDKANHPTIPMNILPTPLRPDLVLSSVQNKEVIVVELTVPFEQNIDSRHVSKCNKYAPLTNDIIDQGYSCKLFCIEVGSRGYVSKQNKVRIKSLLKTMKLGKKNKAMLNRISKMSIMTSYSLFLAKDQPTWTEPPLLSVPENNQS

SEQ ID NO: 20673 - protein, 899 aa, Ephestia elutella
MGLLLTTIFVHFSQYIQGNRSRRLITNIQTIKNKYSNHSQYEERNQSDEQFLDTLKQKLCTAVSRLRRYKNCTLRKKQNYQFTNNEKQFYRQLTSNTQSNTTSSNNPNPDDLQNFWHNIWANPLSHNESAEWIEKDRQKVQHIPQMTFEYIPIETFVQIIKKTHNWKAPGSDNIHNYWYKKFTSLHVYLHNHINDFIHSPHTMPLYITQGLTYLLPKDSDTLNPSKYRPITCLQTFYKILTSCIAELIYKHITDNKILSEEQKGCRKNSQGCKEQLIIDTTAMRHAMTHRNNINTMYVDYRKAYDSVPHSWLTYILEHYKIHPVIISFLQHAMQHWKTKLHLKDSPNLGIEFIPIRRGIFQGDALSPLWFCLALNPLSNLLNESNKGYEIITDHEHITLSHLMYMDDIKLYSHTKDSLHSLADITQMFSNDICMEFGIEKCKIFCIDKGKVMPNDYVMESGVCIESLDQFTTYKYLGFHQSRQIQHKEIKSELIKKFKHRLNSLLRSQLNSGNLVKAINTYAIPVLTYSFGIIKWSKTDLLQLQRIINTSLTYHRKHHPRSCIQRLTLPRSEGGRGIIDLSNLHNKQIASLRNYFHTQAHHSILHSIVSQVDKKHTPLNLHDNHIQNNELLTEDREKITIWQQKSLHGRHRKDLQQAHVDKAASNTWLRQGELFPETEAFMIAIQDQIIDTRNYQKHIIRSFNLTSDSCRRCHGPSETIQHITGACKSIVQTDYKHRHDQVAAILHQNLAFKYNLITEKTPYYKYKPSCILENTEYKIYWDRTILTDKTVHFNRPDITVLHKNTKIVYLIDVAVCNTHNLENTNSEKISKYIDLSIEIKTQWRVNTVKTIPIVISTTGVIPQSLHTYLQTLEMHPSTYILLQKAVVLNTCRIVRKFLAS

SEQ ID NO: 20674 - protein, 1402 aa, Ephestia elutella
MFSLAFRGNKIGEINKRYFLRSRPARYRDNPSNHADERVEVDRSEGGSPPSSISSLFPSLESSRHSFSPHSSPTHAMSPASVVSTDFSNPHPHPSPTISPTMSIDVAHEAYATNRAPTTGTIKSARKKWTDEMNRFIWRTYLIASNLETNSRTYLDELHTKFTQRFPEMDASRQRLGDQKRAIVRNRLLSQEELENIRQEVENDMRTQNRTNEITYNAETERQTRRMKWTNDLNETLIRCYYQITEIENNQSTYRKILRNRFIEHYPDLAYLSEQRISDQRRSIVNNRLIPEKKLQEIKQAIINQNSTSLANISSCRQDLTLSVQNHNFIPSNQLTHQNADIPSSDMPFTLTDSHNNLMNTEDIETENHRQELDIPQTQTLINNSHNNSCNTNRTFNSNSINTVEIDTIFDQTLKRFIDTDPTTRPHIPKQKTSKKFASTVDYINSEIIPKHINRDQDFMKTQTLIYCAAYTTAKYNGTKIRESGSNLQRVEKIPAWQKRLQTKIDTLRKDIGRLSQYIQGNRSRRLITHIQTIKNKYSNHSQYEERNQSDEQFLDTLKQKLCTAVSRLRRYKNCTLRKKQNYQFANSEKQFYRQLTSNTQSHSTPPNNPNPEDLQNFWFNIWANPLNHNESSEWIEKDRQKVQHIPQMTFEFIPIETFVQVIKKTHNWKAPGSDNIHNYWYKKLTSLYTSLHNHINDFIHSPYTMPLYLTQGLTYLLPKDNDTQNPSKYRPITCLQTFYKILTSCIAELIYKHITDHKILSEEQKGCRKSSQGCKEQLIIDTTAMRHAMTHRNNINTMYVDYRKAYDSVPHSWLTYILQHYKIHPMIISFLQHTMQHWKTKLHLKGNTNLDTEFIPIRRGIFQGDALSPLWFCLALNPLSNLLNESDKGYEIISNHSHISLTHLMYMDDIKLYSHTKESLHSLADITQRFSNDICMEFGIEKCKIFCIEKGKVMPNDYVMETGVCIESLDQFSTYKYLGFQQSRQIQHKEIKSELIKKFRHRLNSLLRSQLNSGNLVKAINSYAIPVLTYSFGIIKWSKTDLLNLQRIINTSLTYHRKHHPRSCIQRLTLPRSEGGRGIIDLSNLHNKQITSLRTYFHTQAHHSILHAIVSQVDKKHTPLNLHDNHIQNNEVLIENSEKIDTWQQKALHGRHRKDLQQTHVDKTASNAWLRHGELFPETEAFMIAIQDQIIDTRNYQKHIIRSFNLTSDSCRRCHGPSETIQHITGACKAIVQTDYKHRHDQVAAILHQNLAFKYNLITEKTPYYKYKPSCILENNDYKIYWDRTILTDKTVHFNRPDITILHKNTKTVYLIDVAVCNTHNLEKTNSEKISKYIDLSIEIKTQWRVNTVKTIPIVISTTGVIPQSLHTYLQTIEMHPSTYILLQKAVVLNTCRIVRKFLAF

SEQ ID NO: 20675 - protein, 1283 aa, Hypermnestra helios
MTNRALVTQNNMEKQLRGKRLMSLPGGYRQGTPGANAGCDSIQTVSGSSLNRRARAGEPENATADNIRNTDDALRNEAMPTTPAGVSESTTTSSDLTDNRRKWSDNDLKELMFCYYKAKSLGVGYTRRLEKLYQERNPHNPKIKQFNGKTLANQARSVINRQFISSEVLNEIKDLAERTPNIHTTATHNSQIPQEVILSNTESINTEPHINYSSSDEIPQDSVMPPNLNIYSSLQDNHSLISLVDNDNPDNRENVRLLLQQMDICESQDPIILDFLQNFSVSIHTTIEEREYLPKPKFCKLFFDNLRKLNNFIPNLLLTYKSLRDINNIVYAAAKTLIVANNQNPYSKSSIRKTKNDPPWKQRLKKKLEELRKELGQLMEINNGVESRKMVKVKDRIYNKYNIFNQEDHNYIVEILKQKVKAIAGRLKRFNDINRRKLDNRCFKENQHKFYQNLSETNIEAEIIPTKEITEAFWTDILSQPVSYNTKAKWIKEIETSKADIQEHKFENISLNQVKTAIGKLQNWKAPGMDKVQNYYLKYLTCTHEAITNLYNRILQDTEITEDWFTTGRVILIPKDTNTQDPKNWRPIACLPTMYKLLTSVIANELYVHCEKNNIITPEQRGCRRYAKGCKDHLMINKAILEDAHQSQKNLSMGWVDYRKAFDTISHEWLLKVMDLYKCPKVIKEFLRKTMPSWKVIMTANGTNCTVTTDPIYIRRGIFQGDSLSPLLFCLGINPISQILQKYKKKGFYLKNSVHINHLLYMDDLKVYANNKNNLKILLDSAEIFTRDIGMSFGLNKCNILHLEAGRRQENTGKGHILLTGEEFQHLKENQEYKYLGVYESGKIDHNEIRQRTCKEYYNRIKRLTDSKLNNRYLINAINAYAIPILLYSFGIINYKINDLKSIDIKTRRILTIKKAHFGKADVDRLYLPVTEGGRGLINVEYMYKSQIIKLKQYLERANDYLIKAIVQHDRKRQKYSIMTDSEKFEQELHLTQNNIYTDQELKNAFIKKQKQNWRNKNLHGQFPKAVLDQANIDTKSSFQWLKKQSISPTLEASLFAIQDQAIITKQYERDILKRQNDGKCRLCITRDETVSHIISGCEKLAGSYYITRHNNLVKYIYWCLAKKHDIDVSKLWWKEDLKQPQVKENESTKILWEIPVQTDTTVIHNRPDLIYIDKIQNKTYLIDVAVPSDYNVGAKEIEKMTKYHLLGTEINRLWNTHTTIIPIVVGATGIVAKNINRHCEKLNANININILQKQAAIHSSTILTKVLGDNIFIRENEIDITG

SEQ ID NO: 20676 - protein, 1372 aa, Quadrus cerialis
MATTADYEMKKTATQKTYNLRPLKARQVAPRESTRYCSEDESTHGELNNKHEIPIMTNEESLDSDSTSLFSCPTSSLQSHCSSPLLSNSSSISSSPISLVQENVARTALLVENSASIACTNTRKKWTNEMNQFILRTYLHLTKNNTETNSYLQPLHSKFIDKFPNMIVSRQRVGDQRRAIIRNKLLPQETIDRIDNEVRSNLQSTQITGQVPTTDCLNANTHITGQRMKWTNDYNETIMRIYYRITKLETNKTDYRKPLHQEFIRIFPHLSHISEQRIADQRRIIINNKRLTTEKIKAIKLEIEDELKASNNTEAENHTDEVTYNQDRNINEDFDITVETFNRINLPAISGDLPEETRTKIQETFKIALEYYTNTEPTKRNFIPRQKTTKTLYKIITYIDNEILPQYINTNTDFSSLHTAIYCAAWTAAKINGTKLTLQTTLPNQKNTVRKPKWQIRLEKRVLDLRTKIGRLTQFINGNRTTNLCRHVNNILQNYKIHTNHEEINTDLAQFLDTLKQKLTVTASRLRRYKTCTLRKTQNLQFIKNEKQFYRSLNNNTTFQKHDDQPSVESLKTFWAGVWEKSPQHNDVAGWIKDEVEKHRNINPMEFQFITGEVFHGVLRDLHNWKSPGSDHIHNFWYKKLKYIQPLLYSHFNNFINNPGSVPKFVTQGKTYLLPKDLNKLSDPSKYRPITCLQTVYKILTSCLTHTIYKHLEINQILTEEQKGCRKFSQGCKEQLVIDSVILKQAYKNKRDLYSVYIDYAKAFDSVPHSWLLKVLEIYKIHPTIISFLKTVASTWTTLLSIKTEYANIDTEPIKINRGIFQGDALSPLWFCLALNPLSNLLNSSRKGFLLQGCTSTNELRHQDIKINHLLYMDDLKLYAATENELQDLIRITDSFSTDICMNFGIEKCKINSYKSGILYQHQHELHNMQLIEALQENNTYKYLGYNQSNLIHHTETKSILIQEFKRRLTAILKSQLNSRNMIKSINTYTIPILTYSFGIINWTKSELLKLQRCIHTNLTKHRKHHPRACFQRMILPRNEGGRGIIDIRNLHNKQITILRKYFHEKSLTSTLHKAIVNNDCKLTPLNLNNKETQKNEKNIDNQTKIREWQQKALHGRHLKDLNQPHIDKTASNAWLTFGDLFPETEGFIQAIQDQVIETRNYNKYIVKSNNIIDICRRCNKSSETIQHITGACSSIVQTEYKHRHDQVVNIIHQKLAIQHHLINDSPIAYYKYHPKTVLENASHKMYFDRAILTDKTVHYNRPDITIIDKINKTAFIIDVAIPNTHNLQSTISEKINKYVELKDEIIRMWRLKTVSIIPIVLSTTGVIPKILHRSIKSINISPHTYITLQKATILNTCRIVRKFLQTDPESP

SEQ ID NO: 20677 - protein, 943 aa, Nerula fibrena
MNGTNLILPPKTSKIHRNTLSPKWQVRLEKKVLDLRAKIGRLTQYIKGSRAKNLTKHVNAILQNYKVHTNHEEFNTDLTQFLDTLKQKLAVTASRLKRYKTCTLRKTQNSQFVRNEKQFYRSVGNNMTPDSECSPSIDSLKTYWSNIWEEPVIHNREASWISQETEKHTHIEPMQFDYITVDVFQEVIKNLHNWKTPGSDHIHNFWYKKFTYIQPFLYKLLNNFIQNLRSLPEFVTEGTTYLLPKDYDDLTNPSKYRPITCLQTIYKILTSCLTHTIYKHLEAQQILTEQQKGCRKFSQGCKEQLIIDSVILQHIHKHKNDLHTVYIDYAKAFDSVPHSWLLKVLEIYRIHPTIVSFLRNTTTSWTTRLRVTTKQNTFETEPIKIKRGIFQGDALSPLWFCLALNPLSNKLNSTEKGLTLQYKIPEIESIHREIKVNHLLYMDDLKLYASTPIELEELIKVTEHFSNDIHMNFGIDKCKINSYIAGVHHPYQHELGTGQYINSLQETDAYKYLGYKQSKLIHHKETKCALSEEFKHRLNVILKTQLNSRNMIKSINTYCIPILTYSFGVINWTKSELLQLQRLINVNMTKQRKHHPRACFQRLTLPRVEGGRGVIDICNLHNKQITVLRNYFHNKSMHSTLHNAIVSNDHKLTPLNLHSRNTQKNEKILDKQSKIEAWNKKTLHGRHLKDLNQAYIDKTASNAWMKMGELFPETEGFMQAIQDQVIETRNYNKYIVKLNNVIDVCRKCNKSSETIQHITGACSSIVQTDYKYRHDQVVNIIHQKLAIQHNLITDLPMPYYKYNPKTILENATYKMYFDRAILTDKTVHYNRPDITLIDKINKTTYIIDIAIPNTHNIQNTISGKLSKYVELKNEILRMWRHNKVCIVPIVLSSTGVIPKTLHQSLKSINIPPYTYLTLQKAVILNTCRIVRKFLQTDTTILST

SEQ ID NO: 20678 - protein, 1511 aa, Helias cama
MVLLRDAFEPNLMQSLEGSPVLVHTGPFANIAHGCSSIIADKIALKLVREKGYVATEAGFGSDIGKNIIFCVVYNNNNNNLRPLPGGRRGALGAGAECYSMRTIGDGGLSRRAPLEENTTADIKTIKRFLSSSPSSSSVSLFPSLPSSPPSYLCDDNYLSDASVTPSTISYSETEDVVQVSDDTTLTAPANVVSSCTQRKCTDEYLSCKFTTSSSSSSHHSLNQIPSYCRNPSNTLSVSPSNQMQEDVAQSTASVDKSVPTPCINKRKKWTSEMNQFILRTYLYLTKIDTETDSYLHTLHTKFIQQFPHMLVSRQRVGDQRRAIIRNKLLPQEAIDSIYSEVRSNLLTTQQFETNSLTDIENDNKSSQRMKWTREHNENIMKAYYKITSLETNKTDYRKQLHQEFIRSFPHLKHISEQRISDQRRVIINNRRLSMETLKAIKQKVEKELEASNFCEANNSNYTDTHSSTENVHNTSDTLISNNVEVRREGQDKTDLLEERKIQINETFTSALEYYRFIPPTNRCFIPRQKISKEFCRIVKYIDREILPKYINAETDFYLMHTIIYCAAWTAAKINGTKLVLPPITKEFKSNLKPKWQIRLEKKLADLRTKIGRLTQYIRGNRNKNITQHVNTILESYKVHTKHDEINTDLTHFLDTLKQKLAVTASRLRRYKTCNLRKTQNNHFANNEKQFYKSLNNNTSAQSIDNSPSLDSLKTYWSRIWGEPVIHNDDSSWIREEIDKHMQLEPMQFNNITADVFQEVMKKLHNWKSPGSDRIHNFWYKKLTYTQPFLCNHLNNFIKNPTSMPEFVTQGTTFLLPKDSNDSINPSKYRPITCLQTVYKILTSCLTHIIYKHVETNQILTEQQKGCRKFSQGCKEQLIIDSVVLQQVNKNKSNIYTAFIDYAKAFDSVPHSWLLKVLEIYKIHPLIILFLQQTILKWTTQLRVKNKENILETEPISIKRGIFQGDSLSPLWFCLALNPLSNKLNQSSKGYSLQHDMLTQEIKINHLLYMDDLKLYATSKDDLKDLVNITECFSNDICMNFGIEKCKLNSYEAGIHIQHQHELQCKQVIHSLQEHNTYKYLGYNQSNLIHSKDTKKNLTEEFKRRLNLILKTHLNSRNLVKSINTYTIPVLTYSFGVLNWTKSELIRLQRIIHTTLTKHRKHHPRACYQRMTLPRFEGGRGIIDILNLHNKQITTLRSYFHNKTQYSTLHKAITQNDRKYTPLNLYSKETQRNETITENQFKIKAWGQKTLHGRHVKDLNQIHIDKKASNAWLSSGELFPETEGFMQAIQDQVIETRNYNKYIVKLNNTTDVCRKCYKASETIQHITGSCSSIVQNEYKHRHDQVVNIIHQKLALKYHLINEPSVPYYKYKPQIVLENVSYKMYYDRAILTDKTVHYNRPDITLVDKINKNAIIIDVAIPNTHNLQNTISEKLTKYTELKEEIMRMWQLKSVTVVPVVLSTTGVIPKTLHKSLESIKISPYTYYTLQKAVILNTCRIVRKFLQTDINTSSS

SEQ ID NO: 20679 - protein, 1246 aa, Ebrietas anacreon
MIQFIFRTYLYLTKADTETNTYLHTLHSKFMQQFPHILVSRQRIGDQRRAIIRNRLLSQQIIDNIYDEVRTNLQTSQQFTTGTEKTSISSQRMKWAREHNETIMRAYYKITSLETNKTNYRKQLHQEFITAFPHLNHISEQRISDQRRVIINNRRLSTKTLETIKQDVEKELTASNYHKSNDSDIDHVHTHIGTHMHDTVESQTLSTAEVSNLTHTINSEQCFEKRDSTNLLQEIKIKINETFTLALEYYRIIPPTERDYIPKQKITKYFYRIVDYINREILPQYINEETDFYLMHAIIYCAAWTAAKVNGTNLTLPPIMKQTKCNSKPKWQIRLENKITDLRTKIGRLTQFIRGNRNKNITKHVTTILESYKIHTKHDEMNTDLTHFLDTLKQKLTVSASRLRRYKACNLRKTQNNQFANNEKQFYRSLNNSNTVRSIDNGPFLDGLKTFWSSIWEEPVMHNNNSTCVKDEIEKYLHLEPMQFDNIAAEVFQEVIKKLHNWKTPGSDHIHNFWYKKLTYTQPFLYRYLNNFIKNPTTMPDFITQGTTYLLPKDLNDFTNPTKYRPITCLQTVYKIITSCLTHTIHKHIETNQILTEQQKGCRKFSQGCKEQLVIDSVVLQQAHKNKSNLYTAYIDYAKAFDSVPHSWLLKVLDIYKINPLIISFLQNTILKWSTKLRVKSKEQILETGPIRIKRGIFQGDSLSPLWFCLALNPLSNKLNSLTKGYTFQHNTLTQQIKINHLLYMDDLKLYTTTEDDLKNLIQVTESFSKDICMRFGVEKCKLNSYKGGNHLQHQHELQSGQTIHSLHEHDSYKYLGYNQSNLIHCKNTKNMLIEEFKRRLNLILKTHLNSRNLVKSINTYTIPVLTYSFGIINWSKTELTRLQRIINTTLTKQRKHHPRACYQRMTLPRSEGGRGIIDILNLHNKQITVLRSYFNNKALNSTLHEAVTRNDRKFTPLNLYSTETQKNKAIITNKLKLEAWEQKSLHGRHPKDLNQTHIDKKASNAWLTLGELFPETEGFMQAIQDQVIETRNYNRYIVKLNNTIDTCRKCYKASETIQHITGSCSSIVQTDYKYRHDQVVNIVHQKLALKYHLINDPPLPYYKYKPQVVLENVSYKMYYDRAILTDKTVHYNRPDITLVDKINKNATIIDIAIPNTHNLQNTISEKLTKYTELREEIMRMWQLQTVTIVPVVLSTTGVIPKSLHQSLKTLKIPAYTHFTMQKAVILNTCRIVRKFLQTDMTESAS

SEQ ID NO: 20680 - protein, 1441 aa, Ebrietas anacreon
MEKARNKRYNLRPLPGGRRGALGADAECYSMRTIGDGGLSRRAPLEENTTADITNTKHSLSSSPSSSSASLFPSLSSSPPSYLCDENYLSDDSIFPSTISYSAAEDVVQVSDDAILNAPAKVVSSCMQKKCTDEYLSCKSASPVSHHSPKTLSYYTHPSNSSFAQPSNQIQEDVAQSTVSVGKTVPTPCINKRKKWTPEMNQFILRTYLYLTKVDTETDTYLHTLHSKFIQQFPHMLVSRQRVGDQRRAIIRNRLLPQETIDNIYSEVQSNILSTQKNATNSLIDIESNHKSSQRMKWTREHNEAIMRAYYKITSLETNKTDYRKQLHQEFIRSFPHLRHISEQRISDQRRVIINNRRLSIETLKTIKHEVEKELETRNICEANNINNTYIHSPIESIHNAQDTIQSDNVETSNVRIDEQDTTDLLVEKKEQIIETFKLALEYFRDIPPTKRCFIPKQKISKEFYKTIKYIDREVLPTYINKETDFLLMHTIIYCAAWTAAKINGTKLAIPPMTKETKSNFKPKWQIRLEKKIADLRTKIGRLTQYIRGNRNKNITKHVNIILQSYKIHTKHDEINTDLTHFLDTLKQKLGVAASRLRRYKACNLRKTQNNQFANNEKQFYRSLSNNTSVQATDNSPSLDSLKTFWSSIWEETVMHKDDSSWIREEIDKHLDNLEPMQFKNITADVFQEVIKKLHNWKSPGSDHIHNFWYKKFTYTQPFLYIHLNNFIENPITMPEFITQGRTFLLPKDLNNSIDPAKYRPITCLQTVYKILTSCLTHTIYKHIENNQILTEQQKGCRKFSQGCKEQLIIDSVILQQVNKNKSNIYTAFIDYAKAFDSVPHSWLLKVLEIYKIHPLIISFLQQTILKWTTQLQVKTKENISETEPISIKRGIFQGDSLSPLWFCLALNPLSNKLNLSPKGYPLQLDPLKQNIKINHLLYMDDLKLYATTEDDLKDLINVTERFSNDIAMNFGIEKCKLNSYEAGTRFQHQHELQCKQVINSLQGHDTYKYLGYNQSNLIHSKDTKNILNEEFKRRLNLILKTHLNSRNLVKSINTYTIPILTYSFGVLNWTKSELIRFQRIIHTNLTKYRKHHPRACYQRMTLPRSEGGRGIIDIINLHNKQITALRSYFFNKALNSMLHKAVTHNDRKFTPLNLFSKETQRNEFIINNQLKIEAWEQKTLHGRHKKDLNQTHIDKKASNAWLISGELFPETEGFMQAIQDQVIETRNYNKYIVKLNNTTDVCRKCYKAPETIQHITGSCSSIVQNEYKHRHDQVVNIIHQKLALKYHLINEPSVPYYKYKPEIVLENVSYKMYYDRAILTDKTVHYNRPDITLVDKINKNALIIDVAIPNTHNLQNTISEKLTKYTELREEVKRMWQLRSVTVVPVVLSTTGVIPKSLHQSLESIKISPYTYFTLQKAVILNTCRIVRKFLQTDITASSS

SEQ ID NO: 20681 - protein, 1437 aa, Gorgythion begga
MEEAKKSRYNLRPLPGGRRGALGAGAECYSMRTIGDGGLSRRAPLEENTTAEITNLLSSSPSSSSVSLFPSLPSSPPSYLCDERNLSDISNSSSLSATEDVVQVSEDTILTAPTTVSSCTLTNSTDETPSYEFAASSSSSLSSHYSRQILSHSSYATKSSNPSSKNKMQEDVAQTTIPVVNSVPTPCINKRKKWTPEMNQFILRTYLHLTKVDTVTNTYLPILHSKFIQQFPHMSVSRQRIGDQRRAIIRKRLLPQETIDNIYREVRQNLLTTQESATNTLTDSGSTYLSSQRMKWTREYNETIMRAYYKITSLETNKTDYRKQLHQAFITAFPHLSHVSEQRVSDQRRVIINNRRLSIETLKTIKLEVEKELKINSKRDLNETDTDNTHTGICTDIHSPIVSTNNASNSTHTNNVEQWREEQDTTCLQQEKKDQINETFTLALEYFRIIPPTERSFIPKQKLSRDFYKIVKYVDTEILPQYINAETDFYLTHTIVYCAAWTVAKINGTNLTLPPVTKEIKANSKPKWQLRLENRVADLRTKIGRLTQYIKGNRNKNITKHVNTILESYKIHTKHEETNTDLTHFLDTLKQKLAVTASRLRRYKACNLRKTQNNQFSNNEKQFYRTLSNNAPVQSSDNSASLDGLKTFWSGVWEEPVIHNNNSTLIKEETEKYSHLDSMEFNNITVNVFQEVVKKLHNWKTPGSDHIHNFWYKKLTYVHPFLYKHLNNFIKNPTIMPEFITQGTSYLLPKDLKDLTNPTKYRPITCLQTIYKILTSCLTHTIYKHLETNKILTEQQKGCRKFSQGCKEQLIIDSVILQQVHKYKSNLYTAYIDYAKAFDSVPHSWLLEVLKIYKIHPQIISFLKETILKWTTRLKVKTKEHILETEPISIKRGIFQGDALSPLWFCLALNPLSNKLNSLTKGYSFQHDILAQKTIINHLLYMDDLKLYSTTEYDLKELIQVTEGFSNDICMNFGIEKCKLNSYEAGTHFQHQHELQSRQVMHSLQDQGTYKYLGYNQSNLIHCKDTKKVLIAEFKRRLNLILKTHLNSRNLVKSINSLSIPLLTYSFGILKWTKTELIRLQRIINTTLTKQRKHHPRACYQRMTLPRSEGGRGIIDILNLHNKQITSLRSFFYNKALDSELHKAVTHNDLKFTPLNLHSKETQSNETITNNQHKIEAWEQKTLHGRHLKDLNQTHIDKKASNTWLTLGELFPETEGFMQAIQDQVIETRNYNKYIVKLNHTIDTCRKCYKGSETIQHITGSCSSIVQTEYKHRHDQVVNVIHQKLALKYHLINEPPVPYYKYKPQIVLENASYKMYYDRAILTDKTVHYNRPDVTLIDKINKNAFIIDVAIPNTHNLQNSISEKLTKYTELREEIMRMWQLRSVTVVPVVLSTTGVIPKTLHQSLKTINISPYTYINLQKAVILNTCRIVRKFLQTD

SEQ ID NO: 20682 - protein, 1432 aa, Mylon lassia
MDRTMKSRYNLRPLPGGRRGALGAGAKCYSMRTIGDGGLNRRAPLEENTTAGTEDVISLSPSSSSVSLFPSLPSSPPSYLNHDSNVSDISITSSTVSTTADVVQVSDDAILTAPAKVSSRTRTKCTDECLSCKSVASSSSHQFPIILSCYSHSSTSLPPPPNSQIQEDVAQTTTSVDISVPTACINKRKKWTPEMNQFILRTYLFLTKVDTDTNTYLQPLHSKFIEQFPNMLVSSQRVGDQRRAIIRNRLLPQETIDNIYSEVRSHLLSSQQTATNILSDSTHTSSQRMKWTAEHNETIMRAYYKITSLETNKTDYRKELHQEFVQSFPHLSHVSEQRISDQRRVIINNRRLPIERLKAIQEEVRKELKAVNNPKPNNSDNTHIHSSAESTYNTSHIVNSNYIEQQKDTHEQDTTNLLQEIKNQVNEAFALALEYYRVIPPTERCFIPKQKNSRDFYRIVRYIDREILPKYINEETDFYQTHTIIYCAAWTAAKINGTKLTLPPAIKQTDSNFKPKWQIRLEKRITDLRAKIGRLTQYIRGNRSPNITKQVNKILASYKIHTIHDEINTDLTHFLDTLKQKLTVTASRLRRYKSCHLRKIQNNQLVNNEKQFYRSLNNNIPKQSIESSPSLDGLKTFWSNIWEKSETHNDNAGWIEEEVNKHLHLEPMQFENITPNVFQNVIKKLHNWKTPGSDHIHNFWYKKLTYVQPFIYKYLNYFINNPTKMPDFITQGSTYLLPKDLNDLTNPAKYRPITCLQTIYKILTSCLTQTIYTHIDTNEILTEQQKGCRKFSQGCKEQLIIDSVILQQVHKNKSHLYTAYIDYAKAFDSVPHTWLLKVLEIYKIHPLIISFLQKTVLNWSTRLRIKTKEGFLWSESMRIKRGIFQGDALSPLWFCLALNPLSTKLNSSIKGYLLQNPTTSKHIRINHLLYMDDLKLYATTEDDLKDLIKTTECFSKDICMDFGIDKCKLNSYVARIQYQHQHELHSKQVIHSLHGNNTYKYLGYNQSNLINGKDTKNTLREEFKRRLNLILKTHLNSRNLIKSINTYTIPILTYSFGVIHWTKAELIQFQRTIHTTLTKHRKHHPRACYQRMTLPRTEGGRGIIDILNLHNKQITTLRSYFHNKAVNSPLHKAVTHNDDKFTPLNLQRKDTQKNENIISNQLKIEAWEQKALHGRHLNDLNQTHVDKKASNAWLTSGELFPETEGFMQAIQDQVIETRNYSKHIIKLNSTVDICRKCCKVSETIQHITGACSSIVQTEYKHRHDQVVNIIHQKLGIKYNLINEPPLPYYKYKPQVVLENDSYKMYYDRAILTDKTVHYNRPDITLIDKSNKHALIIDVAIPNTHNLQNTISEKFTKYTELRDEIMRMWQLQTVTVVPVVLSTTGVIPKSLHQSLKSIKISPYTYFTLQKAVILNTCRIVRKFLQTDITASYS

SEQ ID NO: 20683 - protein, 1430 aa, Cycloglypha thrasibulus
MEKARKSRYNLRPLPGGRRGALGAGAECYSMRTIGDGGLNRRALLEENTTAEIKTSLSSSPSSSSVSLFPSLPSSPPSYLHGENHLSDISMTLSTDSDSTTEDVVQVSEDVILTAPAKVVSSCTQTKYTDKCLSYKVALSTSSDHSQILSCYIHSSNSSTTPPNQIQEDVAQTTISVDKPVPTTCINKRRKWTSEMNEFILRTYLYLTKVDTQTDTYLDQLHLKFIQQFPHMLVSRQRVGDQRRAIIRNRLLSQETIDNIYSEVRSHLLSTPQFETNTSTDNNSTCTSSQRMKWTKEHNETIMRAYYKITLLETNKTDYRKQLHQEFTKSFPHLSHISEQRISDQRRVIINNRRLSTSTLKSIKEDVEKELNDNDIHTHRSTESPNNISNIQSNTLTVHSNNIELRREHQENTDLLEEIKNQINETFELAFEYYRTIPPTKRCFIPKQKISKQFHKTVKYIDEEILPKYLKAETDFDLMHTIIYCAAWTVAKINGTKLTIPPKSIEIKSRLKPKWQTRLEKRIADLRTKIGRLTQYIGGNRNTNVTKHVNIILERYKIHTKHDEINRDLTHFLDTLKQKLAVAASRLRRYKSCNLRKNQNNQFANNEKQFYRSLSNNISTPTIDNSPSLDGLKTFWSSVWEEAVIHNDNSSWIQEEIDKHLHLEPMQFNNIKGSVFQEVMKKLHNWKTPGSDHIHNFWYKKLTYVQPFLYKHLNNFIKDPTTMPEFITQGTTYLLPKDLNDPTNPTKYRPITCLQTVYKILTSCLTHTLHKHIETNQILAEQQKGCRKYSQGCKEQLIIDSVILQQVHKNSSNLYTAYIDYAKAFDSVPHSWLLKVLEIYKIHPLIISFLQKTILKWTTKLRVKTKEHILETEPMSIKRGIFQGDPLSPLWFCLALNPLSNKLNFSPQGYQLKHNTLTLQTKINHLLYMDDLKLYATTEDDLKDLIKITECFSTDICMNFGIEKCKLNSYEAGTQFQHQHELQCKQVIHSLQEHNTYRYLGYNQTNLIHCKETKNILTEEFKRRLKLILKTHLNSRNLFKSINTYTIPILTYSFGVIKWTKTELIRLQRIIHTSLTKERKHHPRACYQRMTLPRVEGGRGIIDIVNLHNKQITSLRSYFHNKALNSKLHEAITHNDRKFTPLNLCNKEVQRNESIITNQSKIESWEQKALHGRHLKDLNQTHVDKKASNAWLTLGELFPETEGFMQAIQDQVIETRNYSRYIVKLNNTIDTCRKCYKASETIQHITGSCSSIVQTEYKHRHDQVLNILHQKLALKYHLINETPVPYYKYVPQVILENVSYKMYYDRAILTDKTVHYNRPDITLIDKSNKSAFIIDIAIPNTHNLQNTISEKLTKYTELREEIMRMWQLQTVTVVPIVLSTTGVIPKTLHQSLKTIKISPYTFFIMQKAVILNTCRIVRKFLQTDITPSSS

SEQ ID NO: 20684 - protein, 1400 aa, Potamanaxas melicertes
MRTIGDGGLSRRAPLEQHTTADIEILSPSSSSVSLFPSLPSSPPSYIDNDRNLSPSSISSFTEDVVQVSQNEILTAPAKVSSSTHVLPNDEFSSSNSIALSSSHQYSILSHPFSKPSPNDSTIQENVAQITTSVDKSAPVTCSNNTRKKWTLEMNEFILRTYLYLTKLDTEVDTYLQPLHSRFIKRFPNMMVSRQRVGDQRRAIMRGLLSQEIIKSIYDEVRSNLANTLTTPEYATKCFINSAHTTSQRMRWTNAHNETIMRAYYKITLLETNKTEYRKQLHQEFITRFPHLSHISEQRVADQRRVIINNRRVTTERLEIIKQEVSTEIRTLRNHTQDNNNDIQNTQPPLIQNNDISETIHPNNNDQEIDSINSSTVELDFRHLLEETRNNIIDTFKLAFEYYNGTPPTNRCYIPKQQVSKHFNRIVTYLDKEILTKYININTDFLSMHTVIYCAAWTAAKVNGTKLSLPPKTNEYRANDLKPKWQVRLEKKVADLRIKIGRLTQYINGNRTINIKKHVNKILQNYKIHTVHDEINTDLTHFLDTLKQKLSVTASRLRRYKNCNLRKTQNNQFTKNEKQFYRSLSNNTTSQSNGQTISLDGLKTFWSSVWEEPVLHNNEATWIEEEIDNHTQIESMQFECITINIYKEVLRKLHNWKTPGSDHIHNFWYKKFTYIHPFLYNHFNNFIMNPHTMPNFLTLGTTYLLPKDCNDLNNPSKYRPITCLQTVYKILTSCLTHTIHKHIERNFILNEQQKGCRKSSQGCKEQLIIDSVILQQVYKNKSDLYTGYIDYAKAYDSVPHSWLFKVLEIYKIHPSIILFLQNTSSSWMTRLRMKIKDNMIESEPIRIKRGIFQGDALSPLWFCLALNPLSNKLKAIDNGYLLQHVSSEQQIKINHLLYMDDLKLYATTKDDLDHLIKNTEIFSTDICMNFGIDKCKLNSYKSGIHYQHEHELQCREIIHSLQENNAYKYLGYNQTNRINCKDTKNILLQEFKRRLNLILKSQLNSRNLIKAINTFTIPILTYSFGIISWTKFELTKLQRIVNTSLTKQRKHHPRACYQRMILPRAEGGRGIIDIHNLHNKQITTLRDYFHSKEISSTLHLAIVYNDRKLTPLNLYSRDKQKNEAIVDNQSKLEAWNMKSLHGRHLKDINQSFVDKKASNAWLTLGEIFPETEGFMQAIQDQVIETRNYSKHIIKLKNITDICRKCNKASETIQHITGSCSSIVQTEYKHRHDQVVNIIHQKLAIKYKLVKDPPVPYYKYKPQIVLENCSYKMYYDRAILTDKTVHYNRPDITIIDKINKNAIIIDVAIPNTHNLQNTISDKLTKYIELRDEIMRMWQIQKVIIVPIVLSTTGVIPNTLHQSLKSINVSPYTYFTLQKAVILNTCRIVRKFLQTDISASPT

SEQ ID NO: 20685 - protein, 1433 aa, Potamanaxas melicertes
MERVNKSRYNLRPLPGGRRGALGAGAECYSMRTIGDGGLNRRAPLEQNTTAGIEDVLSSSPSSLSSSLFPSLPSSPPSYLCNDKDLSDISITSSIVSYSTTEDVVQVFKDASFTAPAEVSSCTRPKSTDDYKSCKFVASSLSHHSTITVSSHTDPSTSVSTPPLRGQIQEDVAQTTKPVDKSVPTTCINKRKKWTPEMNQFILRTYLYLTKADTETDTYLPHLHSKFIKRFPNMLVSRQRVGDQRRAIIRKKLLPQETIDNIYSEVRSNLLTTPQCTTYSLTDSNDTCVQRMKWTREYNEAIMRAYYKITLLETNKTDYRKQLHQEFVTLFPHLSHVTEQRISDQRRVIINNRRIPIERLKIIQEEVEKEIQTTRAQESNGCDDIHIRLPVASTNITSNTVASNNTEQLLDTYEQDTIYLLQEIKSQINETFTLSFEYFRVISPTKRSFIPKQKVSKDFYKIVRYIDREILPKYINEETNFCMIHTIIYCAAWTAAKINGTKLTLPPIVKQIKSSLKSKPKWQIRLEKKIEDLRTKIGRLTQYIRGNRNANITKHVNNILESYKIHTIHDEVNTDLTHFLDTLKQKLVVTASRLRRYKSCNLRKIQNIQFVNNEKQFYRSLTNNISIQSTDNSPSLDGLKTFWSSIWEEPIEHNNNSTWIREEVHNQLHLEPMQFENITADVFQEVITKLHNWKSPGSDQIHNFWYKKFTFIQPYLYKHLNNFIKNPTEMPEFITQGSTYLLPKDSNDLTNPTKYRPITCLQTVYKILTSCLTKTIYKHIETNKILAEQQKGCRKFSQGCKEQLVIDSVILQQVHKNKSNLYTAYIDYTKAFDSVPHTWLVKVLEIYKIHPSIITFLQTTLLNWTTDLRVKTKESTSETEPIRIKRGIFQGDSLSPLWFCLALNPLSNILNSSAKGYPLQNNTETQQLKINHLLYMDDLKLYATTEDDLKDLIRVSECFSKDICMDFGIEKCKLNSYEAGVHYQHQHELDSRQVIQSLQENNTYKYLGYNQSNLIECKETKNVLNEKFRNRLNLIVKTQLNSRNLVKSINTYCIPILTYSFGVIHWTKTELIKLQRTIHTTLTKHRKHHPRACYQRMTLPRSEGGRGIIDILNLHNKQITVLRSYFHNKAANSSLHKAITHIDRKFTPLNLQSKDKQSNENIISNKVKIEDWKQKSLHGRHLKDLNQTHIDKKASNAWLLLGELFPETEGFMQAIQDQVIETRNYSKHIIKVNNTIDICRKCYKASETIQHVTGSCSSIVQTEYKHRHDQVVNIIHQKLALKYHLINGPPVPYYKYKPEVVLENTTHKMYYDRAILTDKTVHYNRPDITLIDKISKNAIIIDIAIPNTHNLQSTISEKLTKYTELRDEIMRMWQLQTVTVVPVVISTTGVIPKTLHKSLNSIKISPYTYFTLQKAVILNTCRIVRKFLQTDIT

SEQ ID NO: 20686 - protein, 1441 aa, Chiomara georgina
MEEAKKSRYNLRPLPGGRRGALGAGAECYSMRTIGDGGLSRRAPLEENTTADIQNFLSSSPSSSSVSLFPSLPSSPPSYLCDENNLSDASITSTQSTTEDVVQVSEDAILTAPTTVASCTITNHIYECPSCKSAALLPPSSYSPQILLHNSHTSKSSHPSPGTKMQEDVAQTTIPVENSVPTACANKRKKWTSEMNQLILRTYLSLTKVDTETDTYLPTLHSKFIQQFPHMTVSRQRVGDQRRAIIRKRLLPQETIDKIYSDVRKNLATTQISETTNTNTLTDSINTNTRSQRMKWTREYNETIMRAYYKITSLETNKTDYRKQLHQAFITAYPHLSHISEQRISDQRRVIINNRRLSTGTLQTIRLEVEKELKSNTDSDHNDIDIDNTDTRTCTDIYSPIVNTDNTSNLAQTNNIEQMRKEHDTTNLIQERKDQINETFTLALDYFRTISPIERSYIPKQKLTKDFYRIVKYLDTEILPQFINKETDFHLMHTIIYCAAWTAAKINGTKLTLPPVTKIKGNSKAKWQLRLENRIADLRTKIGRLTQYIRGNRNNNIIKHVNTILEIYKIHTKHEETNTDLTHFLDTLKQKLAVTASRLRRYKACNLRKTQNNQFANNEKQFYRILSNNTPVQPSNSSPSLDGLKTFWSGVWDEPIIHNDNSTCIKEETEKYLHLEPMEFSNITVDVFQEVIKKLHNWKSPGSDNIHNFWYKKLTYAQPFLYKHLNTFIKNPAIMPEFITQGTSYLLPKDLNDLTNPTKYRPITCLQTIYKIITSCLTHTIYKHLETNKILTEQQKGCRRFSQGCKEQLIIDSVILQQVHKNKSNLYTAYIDYAKAFDSVPHSWLLKVLEIYKIHPNIISFLQQTILKWTTRLRVKTKEQILETEPISIKRGIFQGNALSPLWFCLCLNPLSNKLNSSTKGYSFQHDILTQETELNHLLYMDDLKLYSTTENDLKDLIQITESFSNDICMNFGIEKCKLNSYKAGIHLQHQHELQSRQVIESLQEHGTYKYLGYNQSNLIHYKDTKNILIEEFKRRLNLILKTHLNSKNLVKSINTYTIPVLTYSFGIIKWSKTELIKLQRTINTTLTKQRKHHPRACYQRMTLPRNEGGRGIIDILNLHNKQISGLRSFFYNKSLNSTLHRLVAHNDRKFTPLNLHSTQTQSNETIIDNKLKIETWKQKTLHGRHLNDLNQTHIDKNASNAWLTLGELFPETEGFMQAIQDQVIETRNYNKYIVKLNNTLDTCRKCNKASETIQHITGSCSSIVQTEYKHRHDQVVNVIHQKLALKYHLLNEPPIPYYKYKPQVVLENASYKMYYDRAILTDKTVHYNRPDITVIDKINKNAIIIDVAIPNTHNLQNTISEKLTKYTELREEILRMWQLRTVTVVPVVLSTTGVIPKTLHQSLKTIQISPYTYFTLQKAVILNTCRIVRKFLQTDITVSP

SEQ ID NO: 20687 - protein, 1402 aa, Cycloglypha thrasibulus
MEKARNNRYNLRPLPGGRRGALGAGAECYSMRTIGDGGLSRRAPLEENTTADFKNIKHFLSSSPSSSSVSLFPSLPSSPPSYLCDDTYLSDDSITPSTIPYSSTYVSPSSHHSTKILSNDMHPLNSSSAPPSNQMQENVAQSTASVDKSVPTPCINKRKKWTPEMNEFILRTYLYLTKVDTETDTYLHTLHTKFTQQFPHMFVSRQRVGDQRRAIIRNRLLPQETMDNIYREVRSNLLTTEQLTINSLTDIESEHKSSQRMKWTREHNETIMRAYYKITHLETNKTDYRKQLHQEFVTSFPHLRHISEQRISDQRRVIINNRRLSTETLKTIKQEVEEELETSKVCEANNSNNTHIHSPTESTHNTLNTLQSNNAELQIDGQNSTDLLVEKKEQIIETFTLALEYYRNIPPTNRCFIPKQKISKEFNRIVKYIDSEILPKYINAETDFYFMHTVIYCAAWTAAKINGTKLALPPTIKQTKSNHKPIWQIRLEKKIVDLRTKIGRLTQYIRGNRNKNITKHVNVILESYKIHTKHDEVNTDLTHFLDTLKQKLGVTASRLRRYKICNLRKTQNNHFANNEKQFYRSLSSSTSVQATNNCPSLDSLKTYWSSIWEEPVKHNEDSSWIREENDKHMHLEPMQFKNISTNVFQEVMKKLHNWKSPGSDHIHNFWYKKFTYTQPFLYNHLNNFIENPTTMPDFITQGTTFLLPKDTNNSMNPAKYRPITCLQTVYKILTSCLTHTIHKHIENNRILTEQQKGCRKFSQGCKEQLIIDSVVLKQVHRNKSNIYTAFIDYAKAFDSVPHSWLLKVLEIYKIHPLIISFLQQIILKWTTQLRVKTKEIFLESEPISIKRGIFQGDSLSPLWFCLALNPLSNKLNMSSNGYPLQLDTLKQKIKINHLLYMDDLKLYATTEGDLRDLINVTECFSNDICMNFGIEKCKLNSYEAGTHVQHQHELQSKQVIHSLQEHDTYKYLGYNQSNLIHCKDTKNILTEEFKRRLNLVLKTHLNSRNLVKSINTYTIPILTYSFGVLNWTKSELIRLQRNIHTNLTKHRKHHPRACYQRMTLPRSEGGRGIIDILNLHNKQITSLRSYFHNKASNSTIHQAVTHNDRKFTPLNLHSKETQRNETVINNQLKIETWEQKSLHGRHVKDLNQTHIDKKASNAWLISGELFPETEGFMQAIQDQVIETRNYNKHIVKLSNTIDVCRKCYKAPETIQHITGSCSSIVQSEYKHRHDQVVNVIHQKLALKYHLIDEPSVPYYKYKPQIVLENCFYKMYYDRAILTDKTVHYNRPDITLVDKINKNAIIIDVAIPNTHNLQNTISEKLTKYTELKEEIMRMWQLRSVTVVPVVLSATGVIPKSLHQSLQSIEISPYIYFTLQKAVILNTCRIVRKFLQTDITAPTS

SEQ ID NO: 20688 - protein, 1419 aa, Tagiades gana
MRLRSRNTLPQAGTSNGESRPEDTASGSPTYSGGGAVSLRLAQSSTIAGHTLMHSSSSSTSKSHKKEGLEKTVRKYNLRPKSSRVSPLITPTLGRDRRHDDLKLITDYELSTTESTTSLVSSTFTTSSSSYSPTSLESNRLENVAQTAVSAKISVPITSTYKRKKWTEEMNQFILRNYLYLTKLDTVKDKYLEALHSKFVEQFPDMIVSRQRVGDQRRAILRTKLLSQETIDSIYNEVQSDLQLQNVQLTHSTNSHTQQFSSNNIVKTGQRMKWTEEHNETIMRAYFRITKIETNKTDYRKQLHQEFIKTFPHLCHISEQRISDQRRIIINNKRLTQERIEKIKTDVAQELQIINDDDDNIRTNSSVTIADNIDADGIDDTNFNSKINSNKTPEQNMHSNQNIFPDQTCNKIQETFKQALEYFSSILPTDRCFIPKQKNSKKFTKIVNYINTNILPKYVDSSTDFKTFHLVIYSAAWTAVKTNGTKLELQPLQLKLKNKNVQPGWQIRLEKKILGFRTDIGRLLQYMRGNRSTKLTKHVNTIFDKYKLHSNHEEINTELSHFLDTLKQKLSATASRLRRYKACTIRKFQNSQFINNEKQFYRNLANFSKSQNISISPSESQLKKYWAGIWEEPVTHNTEAEWIKEEISKHSHIDPMQFDYVTIDIFKDVLKNLHNWKTPGSDHIHNFWYKKFTYIHPILYKHINTFIQNPVNIPEFVTQGTTFLLPKDLDDLANPSKYRPITCLQTFYKILTSCLSQAIYEHLEFNQILSEQQKGCRKFSQGCKEQLIIDSVILQQVYKKKKDLYTVYIDYAKAFDSVPHSWLLKVLEIYKINPTIITFLQHATSTWKTRLRLTTSKMLLETESIKIRRGIFQGDALSPLWFCLALNPLSNVLNSTQKGYTLQYNPENETMQSKLAINHLLYMDDLKLYAPTQSDLEYLIDKTEKFSIDICMNFGIDKCKINSNISGQHYEHNHKLHTGEFINSLHDNKAYKYLGYNQSILIHYKNTKTILIQEFNRRLNLILKSQLNSRNIVKSINSYTIPILTYSFGIINWSKTELLKLQRSINTNLTKYRKHHPRTCVQRMTLPRVEGGRGIIDIYNLHNKQITTIRNYFYNKATTSNLHNAVIQNDHKYTPLNLFNKEIQNNELANEKQSKLERWEQKTLHGRHRKDLNQSHVDKRSSNAWLTSGKLFPETEGFMLAIQDQVIETRNYSKYIIKRHNTIDICRKCNKSSETIQHITGACSSIVQTDYKHRHDQVVNIIHQKLAIKYHLTSDPPTPYYKYNPKTVLENASHKLYFDRAILTDKTVHYNRPDITLIDKINRTGLIIDIAIPNTHNLQNTISEKLTKYTELKEEITRMWNLQKVTVIPVVLSTTGVIPKVLHQSLKSIDISPYTYYTLQKAVILNTCRIVRKFLNIDT

SEQ ID NO: 20689 - protein, 1378 aa, Urbanus esmeraldus
MKKSTELKKVYNLRPLPRASRITSGANAGCRGKRERINVNTRNRAAAVVTDDDLSSTESSLFSSPISSPISYNTSPLNSCSSISISSNSSLVQEDVAQTTIPVEVTVPTTSINKRRKWTQEMNQFILRTYLYLTKLETDTNTYLQPLHTQFIKQFPDMTVSRQHIGDQRRAIIRNKLLSQEIINNIYSEVQLDLNTTQTSTQQPTSNIPDNIVHIPGQRMKWTQEYNETIMRLYYKITKVETNKTDYRKHLHQEFIKIFPHLSHISEQRISDQRRVIINNNRIQKERLEIIRQEVEDELKITSNNEVICYDNNIETDHTISNINNTCNIINNDKESPTTVNLNVSMNQDANIFPEDTCNKIQETFTLAINHYKNISPTEHTFIPKQKLSKNFYKIVNYIDTIILPKFINVETDFKTFHTVIYCAAWTAAKINGTHLTLQPKKSKQYSNHKKPQWQIRLENKIIDLRSNIGRLTQYIMGNRSKNLTKHINTILIKYKIHTIHENINTDLSQFLDTLKQKLTVTASRLKRYKACTLRKTQNNQFISNEKQFYRTLRNNTITHNIHTSPTVDTLTNFWSGIWEESVQHNNEAKWITEEFENHSHIELMQFQSVPIEIFQEVINNLKNWKAPGSDQIHNFWYKKLTYTQPFLYNFINRFISNPKIMPEYITQGTTYLLPKDLEDLSNPAKYRPITCLQTIYKVLTACLANTIYTHLEKNLILTEQQKGCRKYSQGCKEQLIIDSVVLHQVNKNKSDLYSIYIDYAKAFDSVPHSWLLKILEIYKIHPSIISFLQNTMSTWTTRLRLTTKDDTLETEPIKIKRGIFQGDALSPLWFCLALNPLSNKLNSLNTGYILQYSPSEKEYDQQELKLNHLLYMDDLKLYASKEADLHNLISVTEHFSIDICMNFGIDKCKINSLVAGIPHEHRHELQSGELINSLQDNSAYKYLGYNQSNLIHYKDTKILLITEFKRRLSSILKTQLNSRNIIKSINTYTIPILTYSFGIINWTKSELLQLQRNVNTMLSKHRKHHPRACFQRMTLPRAEGGRGVIDIHNLHNKQVTTLRNYFYRKAETSILHELIAHNDRRLTPLNLYNKSTQKHEETVSIQSKLDTWKNKALHGRHLKDLSQLHIDKRASNAWLRYGELFPETEGFMQAIQDQVIETRNYSKHIIKRHNVIDICRKCNKSPETIQHITGACSSIVQTEYKHRHDQVVNIIHQKLATQYRLLNDPPTPYYKYTPKTVLENAFYKMYYDRAILTDRTVHYNRPDITFIDKNNKTALIIDVAIPNTHNIQNTISDKLTKYIELKDEIIRMWGLKKVTIIPVVLSTTGVIPKVLHTSLKSINLSPYTYITLQKAVILNTCRIVRKFLQIDTTIDTTVTNT

SEQ ID NO: 20690 - protein, 1053 aa, Urbanus sp.
MQYNINNDKESPTRVNLNVSMNQDANVFPEDICCKIQETFTLAINHYMNISPTEYTFIPKQKLSKNFYKIVNYIDTIILPKYINVETDFKTFHAIIYCAAWTTAKINGTHLTLQPKKSKQNSNNKKPHWQIRLENKIIDLRTNIGRLTQYIMGNRSKNVTKHINTILIKYKIHTVHEDINTDLSQFLDTLKQKLTVAASRLKRYKACTLRKTQNNQFISNEKQFYRTLRNNTITQNINTSPTVDSLTNFWSAIWEESVQHNNEAKWITEEVQNNSHIELMQFQSVSIETFQEVINNLKNWKAPGSDQIHNFWYKRLTYIQPFLYNFINKFISNPKIMPEYITQGTTYLLPKDLEDLSNPAKYRPITCLQTIYKILTACLANTIYTHLEKNQILTEQQKGCRKYSQGCKEQLIIDSVVLRQVNKNKSDLYSIYIDYAKAFDSVPHSWLLKILEIYKIHPSIISFLQNTMSTWTTRLRLKSKDDTLETEPIKIKRGIFQGDALSPLWFCLALNPLSNKLNSLNTGYILQYSPSEKEYDQQELKLNHLLYMDDLKLYASNEADLHNLIHVTEHFSIDICMSFGIDKCKINSLVTGIPYEHQHELQSGALINSLQDNNAYKYLGYNQSNLIHYKDTKILLTTEFKRRLSSTLKTQLNSRNIIKSINTYTIPILTYSFGIINWTKSELLQLQRNVNTMLSKYRKHHPRACFQRMTLPRAEGGRGIIDIHNLHSKQITTLRNYFYKKADTSILHKLVAYNDRRLTPLNLYNKSTQKHQEPVSIQTKIETWKNKALHGRHLKDLSQLHIDKQASNAWLRHGELFPETEGFMQAIQDQVIETRNYSKHIVKRHNIIDICRKCNKSPETIQHITGACSSIVQTEYKHRHDQVVNIIHQKLVTQYRLLNDPPTPYYKYTPKSVLENASYKIYFDRAILTDKTVHYNRPDITFIDKNNKTALIIDVAIPNTHNIQNTISDKLTKYIELKDEIIRMWGLKKVTIIPVVLSTTGVIPKVLHTSLKSINISPYTYITLQKAVILNTCRIVRKFLQTDTTIDTTVTNT

SEQ ID NO: 20691 - protein, 1033 aa, Astraptes hopfferi
MNQDTNMFSEDICNKIQETFTLAINYYKNISPIEHAFIPKQKLSKKFDKIINYIDKIILPKYINLKTDFKTFHTVVYCAAWTAAKINGTNLPLQPTKSKRYNNHKKPQWQIRLENKIIDLRTNIGRLTQYITGNRSKNVTKHINAILTKYKVHTSHEEINTDLSQFLDTLKQKLTVTASRLKRYKACTLRKVQNNQFVSNEKQFYRTLRNNTINQNVNISPTVDTLTNFWSGIWEESVIHNNEANWIAEEFENHSHIELMQFQSISIETFHEVLNNLKNWKSPGSDQIHNFWYKRLTYTQPFLYNYLNEFISNPKIMPDFVTQGTTYLLPKDLDDLSNPAKYRPITCLQTIYKILTACLANTIYTHLEKNQILTEQQKGCRKFSQGCKEQLIIDSVVLHQVNKNKSDLYSIYIDYAKAFDSVPHSWLLKILEIYKIHPSIISFLQSTMSTWTTRLRLTTKDDTLETEPIRIKRGIFQGDAFSPLWFCLALNPLSNKLNSINAGYLLQYSTSERESIQEVLKFNHLLYMDDLKLYASKEIDLYNLINVTERFSIDICMNFGIDKCKINSLVAGLPYQHQHELQSGELIHSLEDNNAYKYLGYNQSSLIHYKDTKLLLIAEFKRRLSSILKTQLNSRNIIKSINTYTIPILTYSFGIINWTKTELLQLQRNINTMLTKYRKHHPRACFQRMTLPRAEGGRGITDIHNLHNKQITTLRNYFYKKAETSILHQNISYNDRKLTPLNLYNKETHKHQEIISIEAKIQTWKHKSLHGRHLKDLNQLHIDKRASNAWLRHGELFPETEGFMQAIQDQVIETRNYSKHIVKRHNIIDICRKCNKSPETIQHITGACSSIVQTEYKHRHDQVVNIIHQKLATQYRLLNDPPIPYYKYTPKTVLENSSYKMYFDRAILTDKTVHYNRPDITFIDKTNKTALIIDVAIPNTHNLQNTISDKLTKYIELKDEIIRMWGLKKVSIIPVVLSTTGVIPKVLHTSLKSINISPYTYITLQKAVILNTCRIVRKFLQIDTTIDAIVTNT

SEQ ID NO: 20692 - protein, 832 aa, Urbanus proteus
MGNRSKNVTNHINTILIKYKIHTVHENINTDLSDFLDTLKQKLTVTASRLKRYKACTLRKTQNNQFNSNEKQFYRTLRNNTITQNINTTPALDTLTNFWSGIWEESVQHNNEANWITEEFENNSHIELMQFQSVSVEIFQEVINNLKNWKAPGSDQIHNFWYKRLTYIQPFLYNFINGFISNPKIMPEYITQGTTYLLPKDLEDLSNPAKYRPITCLQTIYKILTACLANTIYTHLEKNLILTEQQKGCRKYSQGCKEQLIIDSVVLHQVNKNKSDLYSIYIDYAKAYDSVPHSWLLKILEIYKIHPSIISFLQNTMSTWTTRLRLTTKDDTLETEPIKIKRGIFQGDALSPLWFCLALNPLSNKLNSLNTGYILQYSPSEKEYDQEELKLNHLLYMDDLKLYASNEADLHNLINVTEHFSIDICMNFGIDKCKINSLVAGIPYEHQHELQSGELINSLQDNSAYKYLGYNQSNLIHYKDTKILLITEFKRRLSSTLKTQLNSRNIIKAINTYTIPILTYSFGIINWTKSELLQLQRNVNTMLSKYRKHHPRACFQRMTLPRTEGGRGIIDIHNLHSKQITTLRSYFHKKAETSTLHELITYNDRRLTPLNLYNKSTQKHQETVSIQTKIEIWKNKALHGRHLKDLSQLHIDKRASNAWLRHGDLFPETEGFMQAIQDQVIETRNYSKHIVKRHNIIDICRKCNKSPETIQHITGACSSIVQTEYKHRHDQVVNIIHQKLATQYRLLNDPPTPYYKYTPKTVLENASYKMYFDRAILTDKTVHYNRPDITFVDKNNKTALIIDIAIPNTHNIQNTISDKLTKYIELKDEIIR

SEQ ID NO: 20693 - protein, 1379 aa, Telegonus cellus
MEKPTKVKKYNLRPLPRASRITSDTNVGCSRMREIISVKSSNHAARAVTDGELSSTESNLSLFSSPISSPISFNTSPLNSSSSISISSTSSQIQEDVAQTTIPVEITVPTTSMNKRRKWTQEMNQFILRTYLYLTKMETETNTYVQPLHSQFIKQFPDMTVSRQRIGDQRRAIIRNKLLSQEIINNIYSEVQSDLKTTQNFTQQSTSKITDNTAHIPGQRMKWTQEYNETIMRLYYKITNVETNKTDYRKYLHQEFIKTYPHLSHITEQRISDQRRVIINNNRLQKERLQIIRQEVEEELKITSNSEIISSNNDTQADHTISDISNTCNIINKDKELPARVNLNANGNQDTNIFPEDICNKIQETFTLAINHYKNISPTEHTFIPKQKLSKKFDKIVNYIDKIILPKYINVKTEFKTFHTVIYCAAWTAAKINGTNLTLQPTKSKRYSNHKKPQWQIRLENKVIDLRTNIGRLTQYIRGNRSKNVTKHINAILIKYKVHTSHEEINTDLLQFLDTLKQKLTVTASRLKRYKACTLRKIQNNQFINNEKQFYRTLRNNTINQNVNITPTVDTLTNFWSGIWEESVIHNNEAKWIAEEFENHSHIELMQFQSVSIEIFQEVINNLKNWKAPGSDQIHNFWYKRLTYTQPFLYNYINKFISNPKTMPECVTQGTTYLLPKDLDDLSNPAKYRPITCLQTIYKILTACLANTIYTHLEKNQILTEQQKGCRKFSQGCKEQLIIDSVVLHQVNKNKSDLYSIYIDYAKAFDSVPHSWLLKVLEIYKIHPSIISFLQSTMSTWTTRLRLTTKDDILETEPVRIKRGIFQGDAFSPLWFCLALNPLSNKLNSINAGYLLQHSTFERGSIQQVLKLNHLLYMDDLKLYASNETDLHNLINVTEGFSIDICMNFGIEKCKINSLVAGLPYQLQHELQSGELINSLQDNSAYKYLGYNQSNLINYKDTKILLIAEFKRRLSSILKTQLNSRNIIKSINTYTIPILTYSFGIINWTKTELLQLQRNINTLLTKYRKHHPRACFQRMTLPRAEGGRGIIDIHNLHNKQITTLRNYFYKKAETSTLHQVISYNDRKLTPLDLYNKETQKHQEIISIEAKIQTWKHKALHGRHLKDLNQLHIDKSASNTWLIHGELFPETEGFMQAIQDQIIETRNYSKHIVKRHNVIDICRKCNKSPETIQHITGACSSIVQTEYKHRHDQVVNIIHQKLANQYRLLNDPPIPYYKYTPKTVLENDSYKMYFDRAILTDKTVHYNRPDITFIDKKNKTALIIDVAIPNTHNLQNTISDKLTKYIELKDEIIRMWGLKKVSIIPVVLSTTGVIPKVLHLSLKSINISPYTYITLQKAVILNTCRIVRKFLQIHTTIDALVTGT

SEQ ID NO: 20694 - protein, 1320 aa, Urbanus velinus
MKKSTELKKIYNLRPLPRASRITSGTIAGCGGTRERINVNSRNRSAGVVTDGDLSSTESSLSSSPISSPISHNTSPLNSSSSISISSNSSLVQEDVAQTTIPVEVTVPTTSINKRRKWTQEMNQFILRTYLYLTKMETDTNTYLQPLHSQFIKRFPDMTVSRQHIGDQRRAIIRNKLLSQEIINNIYSEVQSNLNTTQQPTSNIPDKTAHIPGQRMKWTQEYNETIMRLYYKITKVETNKTDYRKHLHQEFIKIFPHLSHITEQRISDQRRVIINNNRLQKERLEIIRQEVEDELKITSNNEVISHDNNIETDINNDKESATRVNLNTSINQDANIFPEDICNKIQDTFSLAINHFKNISPTEYTFIPKQKLSKTFYKIVNYIDTIILPKFINVETDFKTFHTVIYCAAWTASKINGTHLTLQPKKSKQYRNLKKPQWQIRLENKINDLRTNIGRLTQYIMGNRSKNVTKHINTILIKYKIHTVHENINTDLSEFLDTLKQKLTVTASRLKRYKACTLRKTQNNQFISNEKQFYRTLRNNTITQNINTTTPTLDTLTNFWSGIWEESVQHNNEANWITEEFENNSHIELMQFQSVSIEIFQEVINNLKNWKAPGSDQIHNFWYKRLTYIQPFLYNFINGFISNPKIMPEYITQGTTYLLPKDLEDLSNPAKYRPITCLQTIYKILTACLANTIYTHLEKNLILTEQQKGCRKYSQGCKEQLIIDSVVLHQVNKNKSDLYSIYIDYAKAYDSVPHSWLLKILEIYKIHPSIISFLQNTMSTWTTRLRLTTKDDTLETEPIKIKRGIFQGDALSPLWFCLALNPLSNKLNSLNTGYILQYSPSEKEYDQKELKLNHLLYMDDLKLYASNEADLHHLINVTEHFSIDICMNFGIDKCKINSLVAGIPYEHQHELQSGELINSLQDNSAYKYLGYNQSNLIHYKDTKILLITEFKRRLSSTLKTQLNSRNIIKAINTYTIPILTYSFGIINWTKSELLQLQRNVNTMLSKYRKHHPRACFQRMTLPRAEGGRGIIDIHNLHSKQITTLRSYFYKKAETSTLHELIAYNDRRLTPLNLYNKSTQKNQETVSIQTKIEIWKNKALHGRHLKDLSQLHIDKRASNAWLRHGDLFPETEGFMQAIQDQVIETRNYSKYIVKRHNIIDICRKCNKSPETIQHITGACSSIVQTEYKHRHDQVVNIIHQKLATQYRLLNDPPTPYYKYTPKTLLENASYKMYFDRAILTDKTVHYNRPDIAFIDKYNKTALIIDVTIPNIHNIQNTISDKITKYIDLKDEIIRMWGLKKVTIIPVVLSTTGIIPKCSIHH

SEQ ID NO: 20695 - protein, 1379 aa, Urbanus sp.
MKKSTDVKKIYNLRPLPRASRITSGTNAGCGGKREIIGVNPSNHPARVVTDGELSSTESHSSLFSSPISSPISYTSPLNSSPSISSASSLIQEDVAQTTIPVELTVPTTSMNKRRKWTQEMNQFILRTYLHLTKMETDTNTYLQQLHSQFIKQFPDTLVSRQRIGDQRRAIIRNKLLPQDIINHIYSEVQSNLKTTQNFTQQSTSNISDNTTHIPGQRMKWTREYNETIMRLYFRITQLETNKTDYRKQLHQEFIRTFPHLSHITEQRISDQRRVIINNNRLQKERLAIIRQEVEDELRITSNSEITNSINNDIQTDHVISYINSNCNVINNEEEFPATVNLSVGVDQDTNIFPEDMCNKIQETFTVAINHYKDISPTEHTFIPKQKLSKKFYKIVNYIDKIILPRYINMETDFKTFHTVIYCAAWTAAKINGTNLTLQPTKSKRNNSLLKPKWQTRLENKVIDLRSNIGRLTQYIKGNRSKNVTKHISTILEKYKVHTIHEDINKDLSQFLDTLKQRLTVTASRLKRYKACSLRKTQNNQFICNEKQFYRNLRNNNIGHNNNNISPSVESMSKFWSGIWEESVLHNSEATWITEESENNSHIELMQFKSVAIDIFQEVINNLKNWKAPGSDQIHNFWYKRLTYTQPFLYNFLNKFISNPKSMPEYITQGTTYLLPKDSDDLSNPAKYRPITCLQTIYKILTACLSNTIYTHLEKNQILTEQQKGCRKFSQGCKEQLIIDSVILHQVNKNKSDLYSIYIDYAKAFDSVPHSWLVKVLEIYKIHPSIISFLQRTMSTWTTRLRLTTKDKILETEPIKIKRGIFQGDALSPLWFCLALNPLSNKLNSIYTGYLLQYSTSERESIQQDLKLNHLLYMDDLKLYATNETDLHNLIDVTERFSIDICMNFGIDKCKINSFVAGLRYQYQHELESGELINSLQDNSAYKYLGYNQSNLIQYKDTKVLLIAEFKRRLNSILKTQLNSRNIFKSINTYTVPILTYSFGVINWNKTELLQLQRNINTTLTKYRKHHPRACFQRMTLPRAEGGRGIIDIHNLHNKQVTTLRNYFYKKAETSILHKIICYSDRNFTPLNLYNRETQKHQVIVSIESKIETWKHKSLHGRHLKDLNQLHVDKRASNAWLRYGELFPETEGFMQAIQDQIIETRNYSKHIVKRHSILDICRKCNKSPETIQHITGACSAIVQTEYKHRHDQVVNIIHQKLASQYRLLSDPPIPYYKYTPKTVLENSSHKMYFDRAILTDKTVHYNRPDITFIDKNNKTALIIDIAIPNTHNVQNTISDKLSKYTELKDEIMRMWGLKKVNIIPVVLSTTGVIPKVLHLSLKSMNISPYTYITLQKAVILNTCRIVRKFLQTDTSLDTIVTST

SEQ ID NO: 20696 - protein, 1378 aa, Urbanus evona
MKKSTELKKVYNLRPLPRASRITSGANAGCGGKRERINVNTRNRAAAVVTDGDLSSTESSLFSSPISSPISYNTSPLNSCSSISISSNSSLVQEDVAQTTIPVEVTVPTTSINKRRKWTQEMNQFILRTYLYLTKLETDTNTYLQPLHTQFIKQFPDMTVSRQHIGDQRRAIIRNKLLSQEIINNIYSEVQLNLNTTQISTQQPTSNIPDNIVHIPGQRMKWTQEYNETIMRLYYKITKVETNKTDYRKHLHQEFIKIFPHLSHISEQRISDQRRVIINNNRIQKERLEIIRQEVEDELKITSNNEVISYDNNIETDHTTSNTNNTCNIINNDKESPTTVNLNVNKNQDANIFPEDTCNKIQETFTLAINHYKNISPTEHTFIPKQKLSKNFYKIVNYIDTIILPKFINVETDFKTFHTVIYCAAWTAAKINGTHLTLQPKKSKQYSNHKKPQWQIRLENKIIDLRSNIGRLTQYIMGNRSKNLTKHINTILIKYKIHTIHENINTDLSHFLDTLKQKLTVTASRLKRYKACTLRKIQNNQFISNEKQFYRTLRNNTITQNIHTSPTVDTLTNFWSGIWEESVQHNNEAKWIAEEFENNSHIELMQFQSVPIEIFQEVINNLKNWKAPGSDQIHNFWYKKLTYTQPFLYNFINRFISNPKMMPEYITQGTTYLLPKDLEDLSNPAKYRPITCLQTIYKVLTACLANTIYTHLEKNLILTEQQKGCRKYSQGCKEQLIIDSVVLNQVNKNKSDLYSIYIDYAKAFDSVPHSWLLKILEIYKIHPSIISFLQNTMSTWTTRLRLTTKDDTLETEPIKIKRGIFQGDALSPLWFCLALNPLSNKLNSLNTGYILQYSPSEKEYDQQELKLNHLLYMDDLKLYASKEADLHNLINVTEHFSIDICMNFGIDKCKINSLVAGIPHEHRHELQSGELINSLQDNSAYKYLGYNQSNLIHYKDTKILLITEFKRRLSSILKTQLNSRNIIKSINTYTIPILTYSFGIINWTKSELLQLQRNVNTMLSKHRKHHPRACFQRMTLPRAEGGRGIIDIHNLHNKQVTTLRNYFYRKAETSILHELIAHNDRRLTPLNLYNKSTQKHEETVSIQSKLETWKNKSLHGRHLKDLSQLHIDKRASNAWLRHGELFPETEGFMQAIQDQVIETRNYSKHIIKRHNVIDICRKCNKSPETIQHITGACSSIVQTEYKHRHDQVVNIIHQKLATQYRLLNDPPTPYYKYTPKTVLENAFYKMYYDRAILTDRTVHYNRPDITFIDKNNKTALIIDVAIPNTHNIQNTISDKLTKYIELKDEIIRMWGLKKVTIIPVVLSTTGVIPKVLHTSLKSINISPYTYITLQKAVILNTCRIVRKFLQIDTTIDTTVINT

SEQ ID NO: 20697 - protein, 1372 aa, Telegonus anausis
MEKPKEVKKYNLRPLPRASRITSGTNVGCSRVWEGDKSVKSSNRAARVVTDGELSSTESNLSLFTSPISSPVSFNTSPLNSSSSISSTSSLIQEDVAQTTIPVEITVPTTSMNRRRKWTQEMNQFILRTYLYLTKMETNTNTYLQPLHSQFMKQFPDMTVSRQRIGDQRRAIMRNKLLSQEIIDNIYSEVQSDLKTTQQSTSNITNNTTHIPGQRMKWTQEYNETIMRLYYKITNVEINKTDYRKHLHQEFIETFPHLSHITEQRISDQRRVIINNNRLPKERLEIIRQEVEDELKIRSNNEIISRNNDIQTDHTSNDINNTCNIINNDKELPSNLNVSMNQDTNMFSEDICNNIQETFALAINHYKNISPTEHAFIPKQKLSKKFDKIINYINKIILPKYINVKTDFKTFHTVVYCAAWTAAKINGTNLPLQPKKSKRHNNQKKPQWQIRLENKVNDLRTNIGRLTQYIRGNRSKNVTKHINAILTKYKVHTIHEEINTDLSQFLDTLKQKLTVTASRLKRYKACTLRKIQNNQFINNEKQFYRTLKNNTISQNVNITPTADTLTNFWSGIWEESVIHNNEANWIAEEFENHSHIELMQFQSVSIEIFQEVINNLKNWKAPGSDQIHNFWYKRLTYIQPFLYNYINEFISNPKIMPEFVTQGTTYLLPKDLDDLSNPAKYRPITCLQTIYKILTACLANTIYTHLEKNQILTEQQKGCRKFSQGCKEQLIIDSVVLHQVNKNKSDLYSIYIDYAKAFDSVPHSWLLKILEIYKIHPSIISFLQSTMSTWTTRLRLTTKDDTLETEPIRIKRGIFQGDAFSPLWFCLALNPLSNKLNSINAGYLLQYSTSERESIQQVLKFNHLLYMDDLKLYASNEIDLYNLINVTERFSIDIRMNFGIDKCKINSLVAGLPYQHQHELQSGELIHSLEDNSAYKYLGYNQSNLIHYKDTKILLIAEFKRRLGSILKTKLNSRNIIKSINTYTIPILTYSFGIINWTKTELLQLQRNINTMLTKYRKHHPRACFQRMTLPRAEGGRGIIDIYNLHNKQISSLRSYFYKKAETSTLHQNISYNDRRLTPLNLYNRETQKHQEIMSIETKIQTWKHKSLHGRHLKDLNQLHIDKRASNAWLRHGELFPETEGFMQAIQDQVIETRNYSKHIVKRHNIIDICRKCNKSPETIQHITGACSSIVQTEYKHRHDQVVNIIHQKLATQYRLSNDPPIPYYKYIPKTVLENASYKMYFDRAILTDKTVHYNRPDITFIDKNNKTALIIDVAIPNTHNLQNTISDKLTKYIELKDEIIRMWGLKKVSIIPVVLSTTGVIPKVLHISLKSINISPYTYITLQKAVILNTCRIVRKFLQIDTTTDTIITST

SEQ ID NO: 20698 - protein, 1387 aa, Spathilepia clonius
MASLSEADNEMKKSKSTIQTNIYNLRPLPRASRISSDTNAGCSGMKEILSMKSSTRAAEVITEEEPSTSESNASLFSSPISSPITYNSSPIVSVPSSSISSPTTLIQEDVAQTTIPVEVPVPTTSINKRRKWTQEMNQFLLRKYLYLTKMETETNTYLQPLHSQFIQQFPNMTVSRQRVGDQRRAIIRSKLLPQETINTIYSEVQSDLKNTRNCRQESTSNMSCNTTHIPGQRMKWTQEHNETIMRAYYKITKLETNKTDYRKQLHQEFVKTFPQLNHISEQRISDQRRVIINNNRLQKERLDIIRQEVEDELKMTSNDEGIRINNDIQTDYTINNINNTTSSNIIHNNTVPPGRGDVSVEHDINVFPEQMSSKIQETFKLAVDFYKNISPTERTFIPKQKLSKKFYKIVNYIDKIILPKYINVNTDFNTFHTVIYCAAWTSAKINGTNLNLEPVKSKRHSSLKKPQWQIRLENKVADLRTKIGRLTQYIRGNRSTNIIKHINIILEKYKVHTIHEGENTDLSQFLDTLKQKLTVTASRLKRYKTCTLRKNQNNQFISNEKQFYRSLRNNTTFQNSSISPAMDTVRKFWSGIWGESVMHNSEAKWIQEEIDNNSHVELMQFQTIPMKIFQEVLNKLNNWKAPGCDKIHNFWYKRLAYTQPFLYNFVNKFISNPQTMPEYVTQGTTFLLPKDLNDLTNPAKYRPITCLQTIYKIITACLTHIIYKHLETNQILAEQQKGCRKFSQGCKEQLIIDSVILHQVHKNKSDLYSVYIDYAKAFDSVPHSWLLKILDIYKINPIIISFLQNTMSTWTTRLRLTTKDDTLETEPFKIKRGIFQGDALSPLWFCLAINPLSNKLNSMNTGYMLQHCTPDTQTTHQNVTLNHLLYMDDLKLYATSQSDIHNLINAAECFSIDICMNFGIDKCKINSFEAGLPFQHQHELQSGELINPLQDNNAYKYLGYNQSNLIHYRDTKTLLIDEFKRRLSSILKTQLNSRNTVKSINTYTIPILTYSFGIINWTKSELLKLQRNINTMLTKHRKHHPRACFQRMYLPRVEGGRGIIDINNLHNKQITTLRHYFHSKSETSILHKLISHNDRRLTPLNLHNRETLKHQEITSIKTKLETWKHKVLHGRHLKDLNQLHVDKAASNAWLTQGELFPETEGFMLAIQDQVIETRNYSKHIIKRHNIIDICRRCNKSAETIQHITGACSSIVQTEYKHRHDQVVSIIHQKLAIQYHLLNDPSLPYYKYTPKTVLENNSYKMYYDRAILTDKTVHYNRPDITLIDKNNKTALIIDVAIPNTHNLQNTISEKLTKYIELKEEIIRMWGLKKVNIIPVVLSTTGVIPKVLHQSLKSMNISPYIYITLQKAVVLNTCRIVRKFLQTDTATDT

SEQ ID NO: 20699 - protein, 1367 aa, Pyrgus malvae
MENYTMKTYNLRPLPRARRITSGGNARCSRRKEESNVEDNNHVEISNTKDDVISICESTSSLFSCPTFSSSNSSSYPPSLRSSPISNLIQEDVAQTGISTVTTVPTTCTTSTKRKKWTNEMNIFILRTYLYLTKIDTDTNSYLQQLHSEFIQRFPHMTVSRQRVGDQRRAIIRNKYLSQETIDRIYDEVRSNIQNSQYFTQPSSSSSLINNITSITGTRMKWSQEHNETIMRAYYRITNLETNKTDYRNQLHKEFTQKFPHLSHVSEQRVSDQRRVIVNNNRITPQRLEIIRKEVEDELKNNSNNEVQISNEEHTYTRDQNPGDALQHITPNYENTHIDSAEKSLSEEIRNKIEETFKAALEYHSQTLPTNRPFIPKQKVSKKFCNIIHFINKVILPKYVNTETDFLTLHTSIYCAAWTAATFNGTKLTLPPKTTESYKNNKLFKPKWQIRMEKKVADLRAKIGRLTQYIKGNRNTNLTKHVDAILKNYKIHTNHEAINTDLAHFLDTLKQKLAVTASRLKRYKTCTLRKTQNNQFARNESQFYRSLGNTYIPEKVDCIPSLDSLKTFWSSVWEDSALHNNEASWIDQEVKRHLHIEPMEFEYIKIDVFSKVIRNLHNWKAPGSDHIHNFWYKKLTSIQPFLYKFFNNFIINPTSLPKFVTEGTTYLLPKDLQDMANPSKYRPITCLQTVYKILTSCLTHTIHHHLEENQILSEQQKGCRKFSQGCKEQVIIDSVILQHIHKYKKDLHTGYIDYAKAFDSVPHSWLIKVLEIYKIHPSIISFLKNTITNWTTRLRISTKQNTLETELIQIKRGIFQGDSLSPIWFCLALNPLSNKLNSTQKGLRLQYISEGESVDTEIKVSHLLYMDDLKLYASTESELKDLIEVTEGFSNDIHMNFGIEKCKINSYVAGINQQYQHELGNGLLINSLQNNDTYKYLGYNQSKLIHYKDTKNTLNKEFKRRLHLILKTQLNSRNTIKCINSYCIPVLTYSFGIINWTKSELLKLQRSINTSMTKQRKHHPRACFQRMTLPRAEGGRGIIDIYNLHSKQITVLRNYFHNKSVHSTLHNIIVHNDLKLTPLNLNDKNTQNKENIIDKQSKIEAWQQKALHGRHLKDLNQSSVDKTASNAWLISGELFPETEGFMQAIQDQVVETRNYNKYIVKLNNVLDICRKCNKSSETIQHITGACSSIVQTEYKHRHDQVANIIHQKLAIQHNLTNDPPIPYYKYSPKTILENATHKMYFDRAILTDKTVHYNRPDITLIDKINKTAYIIDIAIPNTHNLQNTISGKLSKYSELKDEIMRMWRLRKVNIVPIVISTTGVVPKNLHQSLKCIQISPYTYLTLQKAVILNTCRIVRKFLQTDTTTIST

SEQ ID NO: 20700 - protein, 1367 aa, Pyrgus malvae
MENYTMKTYNLRPLPRARRITSGDNARCSRRKEESNVEDNNHVEISNTKDDVISICESTSSLFSCPTFSSSNSSSYPPSLRSSPISNLIQEDVAQTGISTVTTVPTTCTTSTKRKKWTNEMNIFILRTYLYLTKIDTDTNSYLQQLHSEFIQRFPHMTVSRQRVGDQRRAIIRNKYLSQETIDRIYDEVRSNIQNSQYFTQPSSSSSLINNITSITGTRMKWSQEHNETIMRAYYRITNLETNKTDYRNQLHKEFTQKFPHLSHVSEQRVSDQRRVIVNNNRITPQRLEIIRKEVEDELKNNSNNEVQISNEEHTYTRDQNPGDALQHITPNYENTHIDSAEKSLSEEIRNKIEETFKAALEYHSQTLPTNRPFIPKQKVSKKFCNIIHFINKVILPKYVNTETDFLTLHTSIYCAAWTAATFNGTKLTLPPKTTESYKNNKLFKPKWQIRMEKKVADLRAKIGRLTQYIKGNRNTNLTKHVDAILKNYKIHTNHEAINTDLAHFLDTLKQKLAVTASRLKRYKTCTLRKTQNNQFARNESQFYRSLGNTYIPEKVDCIPSLDSLKTFWSSVWEDSALHNNEASWIDQEVKRHLHIEPMEFEYIKIDVFSKVIRNLHNWKAPGSDHIHNFWYKKLTSIQPFLYKFFNNFIINPTSLPKFVTEGTTYLLPKDLQDMANPSKYRPITCLQTVYKILTSCLTHTIHHHLEENQILSEQQKGCRKFSQGCKEQVIIDSVILQHIHKYKKDLHTGYIDYAKAFDSVPHSWLIKVLEIYKIHPSIISFLKNTITNWTTRLRISTKQNTLETELIQIKRGIFQGDSLSPIWFCLALNPLSNKLNSTQKGLRLQYISEGESVDTEIKVSHLLYMDDFKLYASTESELKDLIEVTEGFSNDIHMNFGIEKCKINSYVAGINQQYQHELGNGLLINSLQNNDTYKYLGYNQSKLIHYKDTKNTLNKEFKRRLHLILKTQLNSRNTIKCINSYCIPVLTYSFGIINWTKSELLKLQRSINTSMTKQRKHHPRACFQRMTLPRAEGGRGIIDIYNLHSKQITVLRNYFHNKSVHSTLHNIIVHNDLKLTPLNLNDKNTQNKENIIDKQSKIEAWQQKALHGRHLKDLNQSSVDKTASNAWLISGELFPETEGFMQAIQDQVIETRNYNKYIVKLNNVLDICRKCNKSSETIQHITGACSSIVQTEYKHRHDQVANIIHQKLAIQHNLTNDPPIPYYKYSPKTILENATHKMYFDRAILTDKTVHYNRPDITLIDKINKTAYIIDIAIPNTHNLQNTISGKLSKYSELKDEIMRMWRLRKVNIVPIVISTTGVVPKNLHQSLKCIQISPYTYLTLQKAVILNTCRIVRKFLQTDTTTIST

SEQ ID NO: 20701 - protein, 1367 aa, Pyrgus malvae
MENYTMKTYNLRPLPRARRITSGGNARCSRRKEESNVEDNNHVEISNTKDDVISICESTSSLFSCPTFSSSNSSSYPPSLRSSPISNLIQEDVAQTGISTVTTVPTTCTTSTKRKKWTNEMNIFILRTYLYLTKIDTDTNSYLQQLHSEFIQRFPHMTVSRQRVGDQRRAIIRNKYLSQETIDRIYDEVRSNIQNSQYFTQPSSSSSLINNITSITGTRMKWSQEHNETIMRAYYRITNLETNKTDYRNQLHKEFTQKFPHLSHVSEQRVSDQRRVIVNNNRITPQRLEIIRKEVEDELKNNSNNEVQISNEEHTYTRDQNPGDALQHITPNYENTHIDSAEKSLSEEIRNKIEETFKAALEYHSQTLPTNRPFIPKQKVSKKFCNIIHFINKVILPKYVNTETDFLTLHTSIYCAAWTAATFNGTKLTLPPKTTESYKNNKLFKPKWQIRMEKKVADLRAKIGRLTQYIKGNRNTNLTKHVDAILKNYKIHTNHEAINTDLAHFLDTLKQKLAVTASRLKRYKTCTLRKTQNNQFARNESQFYRSLGNTYIPEKVDCIPSLDSLKTFWSSVWEDSALHNNEASWIDQEVKRHLHIEPMEFEYIKIDVFSKVIRNLHNWKAPGSDHIHNFWYKKLTSIQPFLYKFFNNFIINPTSLPKFVTEGTTYLLPKDLQDMANPSKYRPITCLQTVYKILTSCLTHTIHHHLEENQILSEQQKGCRKFSQGCKEQVIIDSVILQHIHKYKKDLHTGYIDYAKAFDSVPHSWLIKVLEIYKIHPSIISFLKNTITNWTTRLRISTKQNTLETELIQIKRGIFQGDSLSPIWFCLALNPLSNKLNSTQKGLRLQYISEGESVDTEIKVSHLLYMDDLKLYASTESELKDLIEVTEGFSNDIHMNFGIEKCKINSYVAGINQQYQHELGNGLLINSLQNNDTYKYLGYNQSKLIHYKDTKNTLNKEFKRRLHLILKTQLNSRNTIKCINSYCIPVLTYSFGIINWTKSELLKLQRSINTSMTKQRKHHPRACFQRMTLPRAEGGRGIIDIYNLHSKQITVLRNYFHNKSVHSTLHNIIVHNDLKLTPLNLNDKNTQNKENIIDKQSKIEAWQQKALHGRHLKDLNQSSVDKTASNAWLISGELFPETEGFMQAIQDQVIETRNYNKYIVKLNNVLDICRKCNKSSETIQHITGACSSIVQTEYKHRHDQVANIIHQKLAIQHNLTNDPPIPYYKYSPKTILENATHKMYFDRAILTDKTVHYNRPDITLIDKINKTAYIIDIAIPNTHNLQNTISGKLSKYSELKDEIMRMWRLRKVNIVPIVISTTGVVPKNLHQSLKCIQISPYTYLTLQKAVILNTCRIVRKFLQTDTTTIST

SEQ ID NO: 20702 - protein, 1367 aa, Pyrgus malvae
MENYTMKTYNLRPLPRARRITSGGNARCSRRKEESNVEDNNHVEISNTKDDVISICESTSSLFSCPTFSSSNSSSYPPSLRSSPISNLIQEDVAQTGISTVTTVPTTCTTSTKRKKWTNEMNIFILRTYLYLTKIDTDTNSYLQQLHSEFIQRFPHMTVSRQRVGDQRRAIIRNKYLSQETIDRIYDEVRSNIQNSQYFTQPSSSSSLINNITSITGTRMKWSQEHNETIMRAYYRITNLETNKTDYRNQLHKEFTQKFPHLSHVSEQRVSDQRRVIVNNNRITPQRLEIIRKEVEDELKNNSNNEVQISNEEHTYTRDQNPGDALQHITPNYENTHIDSAEKSLSEEIRNKIEETFKAALEYHSQTLPTNRPFIPKQKVSKKFCNIIHFINKVILPKYVNTETDFLTLHTSIYCAAWTAATFNGTKLTLPPKTTESYKNNKLFKPKWQIRMEKKVADLRAKIGRLTQYIKGNRNTNLTKHVDAILKNYKIHTNHEAINTDLAHFLDTLKQKLAVTASRLKRYKTCTLRKTQNNQFARNESQFYRSLGNTYIPEKVDCIPSLDSLKTFWSSVWEDSALHNNEASWIDQEVKRHLHIEPMEFEYIKIDVFSKVIRNLHNWKAPGSDHIHNFWYKKLTSIQPFLYKFFNNFIINPTSLPKFVTEGTTYLLPKDLQDMANPSKYRPITCLQTVYKILTSCLTHTIHHHLEENQILSEQQKGCRKFSQGCKEQVIIDSVILQHIHKYKKDLHTGYIDYAKAFDSVPHSWLIKVLEIYKIHPSIISFLKNTITNWTTRLRISTKQNTLETELIQIKRGIFQGDSLSPIWFCLALNPLSNKLNSTQKGLRLQYISEGESVDTEIKVSHLLYMDDLKLYASTESELKDLIEVTEGFSNDIHMNFGIEKCKINSYVAGINQQYQHELGNGLLINSLQNNDTYKYLGYNQSKLIHYKDTKNTLNKEFKRRLHLILKTQLNSRNTIKCINSYCIPVLTYSFGIINWTKSELLKLQRSINTSMTKQRKHHPRACFQRMTLPRAEGGRGIIDIYNLHSKQITVLRNYFHNKSVHSTLHNIIVHNDLKLTPLNLNDKNTQNKENIIDKQSKIEAWQQKALHGRHLKDLNQSSVDKTASNAWLISGELFPETEGFMQAIQDQVIETRNYNKYIVKLNNVLDICRKCNKSSETIQHITGACSSIVQTEYKHRHDQVANIIHQKLAIQHNLTNDPPIPYYKYSPKIILENATHKMYFDRAILTDKTVHYNRPDITLIDKINKTAYIIDIAIPNTHNLQNTISGKLSKYSELKDEIMRMWRLRKVNIVPIVISTTGVVPKNLHQSLKCIQISPYTYLTLQKAVILNTCRIVRKFLQTDTTTIST

SEQ ID NO: 20703 - protein, 981 aa, Paramimus stigma
MSINNLEIGLEQENTNLGKDVETKIEDTFKSTLDYYSNISPTNRCYIPKQKTSKKFYRILNYINSVILPKYIDTDTDFSTLHTLIYCTAWTAAKLNGSNLTLQPTMLNLHKNYEKPRWQVRLEKRHADLRTKIGRLTQYINGNRTTKISKHVKNILENYKIHTTHEQINVDLTQFLDTLKQKLSVTASRLKRYKTCTLRKIQNTQFVKNEKQFYRSLNGKILQDASNGPSVDNLKTFWAEIWEDPISHNSEADWIKEETEKHEHVKSMEFELITTDIFQEVLRNIHNWKAPGSDHIHNFWLKKLTYMHPFLYKHLNNFINNSNDLPEFITQGTTHMLPKDLDDDLTNPAKYRPITCLQTMYKLLTSCLAQAINIHLESNQILTEQQKGCRRFSQGCKEQLVIDSVILQHVHKYKRNLFSIYIDYAKAFDSIPHSWLIKVLEIYKIHPKIILFLKNIISTWTTRLQVKTKYEAIQTTPIKIKRGIFQGDSLSPLWFCLALNPLSNQLNSTYKGFVLKYNAESTSTSEKININHLLYMDDLKLYASNEKDLQDLIKYTEYFSRDINMNFGIEKCKINSYKAGTQYQHQYKLNNTQIIKSLQDNNNYKYLGYNQSNLIQYKDIKNTLTQEFKHRLNTILKSQLNSRNIIKAINTYTIPILTYSFGIINWTKAELIKIQRCINTNLTKHRKHHPRACFQRMTLPRSEGGRGIIDICNLHNTQITRLRNYFHNKALSSTLHTAIVENDCKFTPLNLSNKITQKNETIVNNQTKLEMWKKKTLHGRHIKELNQTYVDKKASNAWLTSGVLFPETEGFMQAIQDQVIETRNYRKHIVKSNSTIDICRKCNKSSETIQHITGACSSIVQTEYKHRHDQVANIIHQKLAHQFYLISDPPIPYYKYSPKNVIENATHKLYFDRAILTDKTVHYNRPDITLIDKINKTALIIDIAIPNTHNLQTTISQKLTKYTELKDEITRMWRLKKVSII

SEQ ID NO: 20704 - protein, 1331 aa, Charidia lucaria
MLGWTVYFPCCNDYDMKKSPTFIKYNLRPRKDRVYVESHSPPEEFSSSDSSYSLYSSSTPTTQSNCSSSSQSNLFSSIPSLPSIPVQGNVAQNTLLGENSEPIPCTNKRKKWSNEMNQFILRTYLYLTKVDTETNSYLQELHSKFVEKFPDMLVSRQRVGDQRRAIIRNKLLPQETIEKIYQEVKSNLPTTQISTQTATLNITSSNTHVTNKRMKWTTDHNETIIRTYYKITKLESNKTDYRKPLHQEFVRVFPHLGHVSEQRVSDQRRVIINSNRLTKERLKTLKQEVANELKLNEQIADEIHNTESTNSHTTNSNIQDTEPRNMNQVNFMSINISEKGLEQDITNLDKDMESKIQETFKTTLDYYNNISPTNRCYIPKQKTSKKFYRILNYINSVILPKYLDKDTDFSTLHTIIYCAAWTAAKLNGTNLTLQPRMLNLQKKYGKPRWQIRLEKRLTDLRAKIGRLTQFINGNRTTKISKHVKNILENYKIHTTHEQINTDLTHFLDTLKQKLSVTASRLKRYKNCTLRKTQNTQLVKNEKQFYRSLNAKIFQDVSNGPTVDNLKAFWAEIWEDPISHNSQADWIKEETEKHEQVKTMEFELITTNIFQEALRNTHNWKAPGSDHIHNFWLKKLTYMQPFLYKHLNNFITNPIDVPKFLTQGTTHMLPKGVDDLVNPAKYRPITCLQTMYKLLTSCLAQAINNHLGNNQILTEQQKGCRRFSQGCKEQLVIDSVILQYVHKHRSNLFSVYIDYAKAFDSIPHSWLIKVLEIYKIHPKIVLFLKNIISTWTTRLQVKTKYEAIQSTPIKIKRGIFQGDSLSPLWFCLALNPLSNQLNSTNKGFLLKYNTSEPTNAPEKININHLLYMDDLKLYASNEKDLQDLIQYTEKFSTDISMNFGIEKCKINSYKAGTPYQHQYKLNNTQIIESLQDNNNYKYLGYNQSNLIHHKDIKNTLIQEFKHRLNTILKSQLNSRNTIKAINTYTIPILTYSFGIINWTKTELIKIQRSINTNLTKHRKHHPRACFQRMILPRSEGGRGIIDICNLHNTQITRLRNYFHNKSLSSTLHTAIVKNDCKYTPLNLSDKRTQKNEKVVNNQTKLEMWKKKTLHGRHITELNQTYVDKEASNAWLTSGDLFPETEGFMQAIQDQVIETRNYRKHIVKSNNITDVCRKCNKSSETIQHITGACSSIVQTEYKHRHDQVVNIIHQKLAHQFYIINEPPMPYYKYSPKNVLENATHKLYFDRAILTDKTVHYNRPDITLIDKINKTALIIDIAIPNTHNLQTTISQKLTKYTELKDEITRMWRLKKVIIIPIVLSTTGVIPKLLHQSLK

SEQ ID NO: 20705 - protein, 887 aa, Achlyodes pallida
MILINYQIHTTHDGINTELTHFLDTLKQKLAVAASRLKRYKTCTLRKVQNTQFNKNEKQFYRSLNSSMTSQRIEDSPAIDSFKTFWSDVWGGSVSHNREAVWIKEETEKYLHTEFMEFEAITGDVFHEALRNLHNWKTPGSDNIHNFWYKKLTYIQPFLYKHYNNFIKNPKSVPEFVTQGVTYLLPKDLSELNNPAKYRPITCLQTVYKILTSCLTLTINKHLENNQILTEQQKGCRKFSQGCKEQLVIDSVILQHVHKTKSNLYSAYIDYAKAFDSVPHSWLLKILEIYKIHPLIISFLQNTISTWTTRLRVKTKEDTIETEPINIKRGIFQGDALSPLWFCLALNPLSNKLNSIDKGFLLQCNTSTTPAMQVDKTINHLLYMDDLKLYASSEYDLQHLIRITERFSTDICMNFGIEKCKINSYKAGVHYEHQHELQDLQFINSLQEHSTYKYLGYNQSNLIQHKDTKTILIKEFKRRLTAVLKSHLNSRNMIKSINTYTIPILTYSFGIINWTKSELVKLQRSINTNLTKHRKHHPRACFQRMTLPRHEGGRGLIDINNLHNKQITILRNYFHIKAETSKLHKAIIHYDRKLTPLNLNKKEKQKNEHIIEKQVKIEAWRKKVLHGRHLKDLNQTHIDKAASNAWLTSGGLFPETEGFVQAIQDQVIETRNYRKHIIKLHNVTDICRKCNKASETIQHITGACSSIAQTDYKHRHDQVVNIIHQKLAFKYSLIKDPPLPYYKYNPKTILENACYKMYFDRAILTDKTVHYNRPDITLIDKINKTALIIDIAIPNTHNLQNTISEKLTKYIELKEEIIRMWHLKKVNIIPVVLSTTGVIPKTLHQSLKSINISPYTYLTIQKAVILNTCRLVRKFLQTNNTEPISTS

SEQ ID NO: 20706 - protein, 1340 aa, Atarnes sallei
MKKSTNLKKYYLRPRKERVYAESHSPPEDISSPESSYLSSTPTTQSNLSSCIPSLTSSPIQENVAQNTLLGENSEPIPCTIKRKKWSDEMNQFILRTYLYLTKVDTETNSYLQELHSKFLEKFPNMIVSRQRVGDQRRAIIRNKLLPQEIIEEIYEEVKSKLQTTQINTQTATPNITTNNTHVTNKRMKWTTEHNETIIRAYYKITKLECNKTDYRKQLHQEFVQVFPHLGHVSEQRVSDQRRVIINSNRLTKDRLKTLKQEVANELKLNEQTVDECYNIESTNSHITKSNASGSENHTDSIGINNIEMGFEHDSTDLDKDLKTKIEEIFKSTLDYYNNISPTNRCYIPKQKTSKKFYRILNYINSIILPKFINKDTDFSTLHTSIYCAAWTAAKLNGTNLTLQPKMLNLNKSYGKPRWQIRLEKRHDDLRTKIGRLTQYINGNRTTKMNKHVTNILENYKIHTTHEQINTDLTQFLDTLKQKLSVTASRLKRYKTCTLRKIQNTHFVKNEKQFYRSLNGKLFQEPSNGPSADNLKTFWTEIWEDPISHNNKADWIKKETVKHEHVKTMEFELITADIFNEALRNIHNWKAPGSDHIHNFWLKKLTYMHPFLYKHINNFINKPSDIPEFITQGTTHMLPKDLGDLANPAKYRPITCLQTVYKLLTSCLAQAINIHLERYHILTEQQKGCRRFSQGCKEQLVIDSVILQHVHKFKSNLFSVYIDYAKAFDSIPHSWLMKVLEIYKIHPKIILFLKNIITTWTTRLQVKIKDEVIQTTPIKIKRGIFQGDSLSPLWFCLALNPLSNELNSTNKGFPLKYNTSEPANASEKLYINHLLYMDDLKLYASNEKDLQDLIKLTEYFSTDICMNFGIEKCKINSYKAGTQYQHQYKLNDMQIIKSLQDNNYYKYLGYNQSNLIIYVDTKKTLIREFKNRLNTILKSQLNSKNTIKAINTYTIPILTYSFGIINWTKAELIKIQRCINTNLTKHRKHHPRACFQRMILPRNEGGRGIIDIHNLHNTQITRLRNYFHNKALSSTLHTAIVKNDCKFTPLNLSDNRTQKNEKIVSNQTKLEMWQKKTLHGRHIKELNQTYVDKGASNAWLTSGDLFPETEGFMQAIQDQVIETRNYRKYIVKSNNITDICRKCNKASETIQHITGACSSIVQTEYKHRHDQAVNIIHQKLAHKFYLIRDPPIPYYKYSPKNVIETATHKMYFDRAILTDKTVHYNRPDITLIDKVNKTALIIDIAIPNTHNLQTTISHKLTKYVELKDEITRMWRLKKVSIIPIVLSTTGVIPKLLHQSLKSINISPYTYLTLQKAAILNTCRIVRKFLQTDTTLYTQVY

SEQ ID NO: 20707 - protein, 1364 aa, Cecropterus phalaecus
MKKSIREKRYNLRPLPRASRVTSGTNAGCSRMREIISVKSSNCAAEVITDDEVSPTKSNSTLFSSPISSPISYFTSPLNSSSPSSTSSTIKLIQEDVAQTTIAVELPVPTTSTNKRRRWTQEMNQFILRTYLYLTKMETETNTYLQSLHSQFIKQFPEMTVSRQRVGDQRRAIIRNKLLSQEIIDNIHSAVQSDLIIKQNTTQQSTSNISNNTTNIPGQRMKWTQEHNETIMRAYYKITKLETNKTDYRKQLHQEFIKSFPHLSNISEQRISDQRRVIINNNRLQKERLEIIRQEVEDELKITSNCEQLSSHNNASNIINNDNQFSTTTHINVSGDQGTNLFSEPICKKIRDTFKLAINYYKNTSPTERTFIPKQKLSRNFNNIVNYIDKNILPHYLNIHTDFNTFHTVIYCAAWTAAKINGTNLALQPTNSKRYSSHKKPQWQIRLEKKVMDLRTHIGRLTQYIRGNRSINVTKHINTILSKYKVHTIHEDINTDLLQFLDTLKQKLTVIASRLKRYKACTLSKTQNNQFTNNEKQFYRNLRSNAIPQNINISPTVDALTNFWSGIWEEPVLHNNEAKWIKEEFNNNSHVELMQFQSITIEIFQEVIKNLKNWKAPGSDQIHNFWYKNFTYTHRFLHNYINKFINNQETMPEYITQGTTYLLPKEPNDLINPAKYRPITCLQTIYKIITACISHSVYAHLQQNQIITEQQKGCRKFSQGCKEQLIIDSVVLHHVQKNKNDLYSIYKDYAKAFDSVPHSWLLKVLEIYKIHPSIISFLQRTMSTWTTRLKLTTSADTLETEPIKIKRGIFQGDALSPLWFCLALNPLSNKLNSIDTGYVLQYSGAERESIQQDLKLNHLLYMDDLKLYASKEPELYNLINITECFSIDICMKFGIDKCKINSLVAGLPYQHQYELESGQLIHSLQDDNEYKYLGYNQSNLIHYKNTKTLLIAEFKRRLSSILKTQLNSRNIVKSINTYTIPILTYSFGIINWTKTELLKFQRIINTMLTKYRKHHPRACFQRMTLPRAEGGRGIIDFHNLHNNQITTLRNYFHKKTETSTLHKLISYNDRKFTPLNLYNKKTQNNQEIISINSKIETWKHKALHGRHLKDLNQPHIDKRASNAWLKHGELFPETEGFMQAIQDQIIETRNYSKHIIKRHNIIDICRKCNKSPETIQHITGACSSIVQTDYKHRHDQIVNIIHQKLAIQHQLLNDLPMPYYKYTPKTVLENSSYKMYFDRAILTDKTVHYNRPDITILDKNIKSALIIDVAIPNTHNLQNTISDKLTKYTELKDEIMRMWGLKTVNIIPVVLSTTGVIPKALHLSLKSINISPYTYIHLQKAVILNTCRIVRKFLQTDNNIVTST

SEQ ID NO: 20708 - protein, 1361 aa, Autochton longipennis
MKRKPVIEQRYNLRPLPRASRVTSGTNVGCSSMREITSVRSSNRAAEVVTDDELSSTESNSPLFSSPITSPISYCTSTLNSSSSVSPTISLIQEDVAQTTIAVELPVPTPSMNKRRRWTQEMNQFILRNYLYLTKMETETNTYLQSLHSQFIKQFPEMTVSRQRVGDQRRAIIRNKLLSQETINNIYSAVRSDLIIKQNSTQQSTSHISNNTTHIPGQRMKWTQEHNETIIRAYFKITKLETNKTDYRKQLHQEFIKSFPHLSNISEQRISDQRRVIINNNRLLKGRLEVIKQEVEDDLNINNDSEILDSNNAFNLINTDKDFSSRVDVGGEKDTNSEPIPSHPIPEPVCIKIQETFKLAINYYKNTSPTEHTFIPKQKLSKKFHNIVNYIDKIILPQYINDETDFSIFHKVIYCAAWTAAKINGTNLTLQSKNSKRYSSHKKPQWQIRLEKKVIDLRTHIGRLTQYIMGNRSENVTKHINTILSKYKVHTIHEDINTDLSEFLDTLKQKLTVTASRLKRYKACTLRKTQNNQFTNNEKQFYRTLRNNTITENINISPTADTLTNFWSGIWEKPVLHNNEAGWIKEEFNYNSHIELMQFQSVSKEIFQEVINNLKNWKAPGSDQIHNFWYKHFTYTHPFLYKYINKFINNQQTIPEYITQGTTYLLPKDLNDLTNPAKYRPITCLQTIYKIITACISHTIYTHLEKNQILTEQQKGCRKFSQGCKEQLIIDSVVLHHVHKNKNDLYSIYIDYAKAFDSVPHSWLLKILEIYKIHPSIISFLQSTMSTWTTRLKLTTRDDTIETEPIKIKRGIFQGDALSPLWFCLALNPLSNKLNSMNTGYLLQHSGSERESIQQDLKFNHLLYMDDLKLYASKESDLYDLISVTECFSTDICMDFGIDKCKINSLVAGLPYQHQYELQSGELIHSLQDDSAYKYLGYNQSNLIHYKNTKLLLIAEFKRRLSSILKTQLNSRNIVKSINTYTIPILTYSFGIINWTKTDLLKLQRTINTMLTKYRKHHPRACFQRMTLPRAEGGRGIIDINNLHNNQITTLRNYFHKKADTFTLHKLISSNDRKFTPLNLHNRETQNNQEITSIKSKIETWKHKALHGRHLKDLNQLHIDKHASNAWLRHGELFPETEGFMQAIQDQVIETRNYSKHIIKRHNVTDICRKCNKSPETIQHITGACSSIVQTDYKHRHDQIVNIIHQKLATQYQLLNDPPMPYYKYTPKTVLENHSYKMYFDRAILTDKTVHFNRPDITFIDKKNKTALIIDIAIPNTHNLQNTISDKLTKYTELKDEIIRMWGLKTVNIIPVVLSTTGVIPKSLHLSLKSINMSPYTYVHLQKAVVLNTCRIVRKFLQTHN

SEQ ID NO: 20709 - protein, 1357 aa, Telemiades fides
MKSPTLNKNKYNLRPLPRASRIISDKNVGCRRRMERMSAKPNKRAARMVTDDLLTSDGSNESLFSSSNLSPTSSITALLQSHSSSVTSSSSSSLILGDVAQAAILVDVPVPTTSINKRKKWTQEMNQFILRTYLYLSNMEKDTNNYLQSLHSQFIEQFPEMTVSRQRVGDQRRAIIRNKLLSQEIIDNIYSEVQTKLNITQIPSQLLTPSIPKISSHVSTQRMKWTQEYNETIMRVYYKITSLETNKTDYRKQLHQEFVKTFPHLSHLSEQRISDQRRIIVNNNRLKKELLLNIRKEVEEELKMTCNRDVMNSNKDTHTDCRDRDTNHNCSTIENDKTHSYNTDINVSTKESEFTALPEEVCNKILETFKIAFEFFKNTSPIKRSFIPKQKLSKKFYNIVNYIDKIILPNYTNIDSDFNTLHLVIYCAAWTAAKINGTNLTLLPRKPKQHKNHKNLQWQIRLENKVIDLRTKIGRLTQYIRGNRTTNITKHVNSILENYKIHSNHENINTDLTQFLDTLKQKLAVTASRLRRYKACTLRKTQNHQFINNEKQFYRNLPNNTKSQNVKISPTKDTLTSFWSGIWEKPVIHNIEAKWIKNELDRNSNVEVMQFQSVTIEIFQNVLKSLHNWKAPGSDQIHNFWYKKLTYSHPFLYNHINKFINNPQTLPEFVTQGTSYLLPKDVSDPTNPSKYRPITCLQTVYKILTACLTHTIYKHLETNKILTEQQKGCRKFSQGCKEQVIIDSVILHQVHKNKTDLYSVYIDYAKAYDSVPHSWLLEVLEIYKIHPTIISFLRIVMQTWTTRLRLTINNDTLETEPIKIKRGIFQGDALSPLWFCLALNPLSNKLNSMTSGYSLQYSTSASESKDQDLKFNHLLYMDDLKLYASSPSNLHSLINVTECFSTDICMNFGIDKCKINSHKTGLPYEHQYELQSGQLINSLRDNNTYKYLGYHQSNLIHYKDIKNKVTEEFKRRLNLVLKTQLNSRNIIKAINSYIIPIFTYSFGIINWTKSELFQLQRKINTMLTKFRKHHPRACFQRMILPRAEGGRGIIDIYNLHNKQITTLREYFYKKAETSNIHKAISLIDHNFTPLNLCNRKIQRNQQTISMKTKIEMWERKALHGRHLKDINQPHVDKLASNAWLRYGELFPETEGFMQAIQDQVIETRNYSKHIVKRHSIIDICRKCNKSSETIQHITGACSSIVQTEYKHRHDQVVNIIHQKLAIQYNLINDPPTAYYKYNPKAVLENTSHKLYFDRAILTDKTVHYNRPDVLLLDKKNKTALIIDVAIPNTHNVQNTISEKLTKYVELKEEIIRMWGFKKVSIIPVVLSTTGVIPKSLHLSLKSINISPYTYIILQFTF

SEQ ID NO: 20710 - protein, 1362 aa, Cecropterus bathyllus
MKKLISTEKRYNLRPLPRASRVTSGTNAGCSRMREIISVKPSNHAAKVVTDDEVSSTESNFTLFSSPISSPISYCTSPLNSSSSISLASNLIQEDVAQTTIAVESPVPTTSMNKRRRWTQEMNQFILRTYLYITKMETETNTYLKTLHSQFIKQFPEMTVSRQRVGDQRRAIIRNKLLSQEIIDNIYSAVQTDLIMKQNSTQKSTPNKSNNTTYISGQRMKWTQEHNETIMRAYYKITKLETNKTDYRKQLHQEFIKSFPHLGNISEQRISDQRRVIIKNNRLQKERLEIIRQEVEDELKITSYSELLSSENACNVIDNEKEFSATADLNVSGDQDTNMIPESICNKIRETFKLAINYFKNTSPTEHKFIPKQKLSKNFYNIVNYIDKIILPQYINEETDFNTFLTVIYCAAWTAAKINGTNLTLQPTNSKRYSCQKKPQWQIRLEKKVTDLRTHIGRLTQYIRGNRSINVTKHINIILAKYKVHTIHEDINTDLSQFLDTLKQKLTVTASRLKRYKACTLRKTQNNQFTSNEKQFYRNLKSNAIPQKINISPTVEALTNFWSGIWEEPVLHNNEAKWIKEEYDNNSHVELMQFQSVTKEIFQEVIKNLKNWKAPGSDQIHNFWYKNFTYTHPYLHNYINKFINNQETMPEYITQGTTYLLPKDLNDLINPAKYRPITCLQTIYKIITACISHSIYAHLEKNQILTEQQKGCRKFSQGCKEQLIIDSVVLHHVQKNKNDLYTTYIDYAKAFDSVPHSWLLKILEIYKIHPSIISFLQSTMSKWTTRLKLTTTDDTLETEPIKIKRGIFQGDALSPLWFCLALNPLSNKLNSIDTGYLLQYSGAERESIQQNLKLNHLLYMDDLKLYASKESDLYNLINVTECFSIDICMNFGIDKCKINSLVAGVPYQHQYELQSGELIHSLEDDSAYKYLGYSQSNLIHYKKTKILLIAEFKRRLRSILKTQLNSRNIFKSINTYTIPILTYSFGIINWTKTELLKLQRNINTMLTKYRKHHPRACFQRMTLPRAEGGRGIIDIHNLHSNQINTLRNYFHKKAETSTLHKLISNNDRKFTPLNLYNRETQRNQEIISIKSKIETWKHKALHGRHLKDLNQLHIDKRASNAWLRYGELFPETEGFMQAIQDQVIETRNYSKHIIKRHNVIDICRKCNKSPETIQHITGACPSIVQTDYKHRHDQIVNIIHQKLAIQYRLLNDPPMPYYKYTPKTVLENPSYKMYFDRAILTDKTVHYNRPDITLLDKNNKTALIIDVAIPNTHNLQNTISDKLTKYTELKDEIMRMWGLKKVNIIPVVLSTTGVIPKALHLSLKSINISPYTYIHLQKAVVLNTCRIVRKFLRTDNTVFKSI

SEQ ID NO: 20711 - protein, 1364 aa, Cecropterus takuta
MKKSIREKRYNLRPLPRASRVTSGTNAGCSRMREIISVKSSNRATEVITDDEVSPTKSNSTLFTSPISSPISYFTSPLNSSSPSSTSSTIKLIQEDVAQTTIAVELPVPTTSTNKRRRWTQEMNQFILRTYLYLTKMETETNTYLQSLHSQFIKQFPEMTVSRQRVGDQRRAIIRNKLLSQEIIDNIHSAVQSDLIIKQNSTQQSTSNISNNTTNIPGQRMKWTQEHNETIMRAYYKITKLETNKTDYRKQLHQEFIKSFPHLSNISEQRISDQRRVIINNNRLQKERLEIIRQEVEDELKITSNCEQLSSHNNASNIINNDNQFSTTTDINVSGDQGTNLFSEPICNKIRDTFKLAINYYKNTSPTERTFIPKQKLSRNFNNIVNYIDKNILPQYLNIHTDFNTFHTVIYCAAWTAAKINGTNLALQPTNSKRYSSHKKPQWQIRLEKKVIDLRTHIGRLTQYIRGNRSINVTKHINTILSKYKVHTIHEDINTDLLQFLDTLKQKLTVTASRLKRYKACTLRKTQNNQFTNNEKQFYRNLRSNAIPQNINISPTVDALTNFWSGIWEEPVLHNNEAKWIKEEFNNNSHVELMQFQSITIEIFQEVIKNLKNWKAPGSDQIHNFWYKNFTYTHRFLHNYINKFINNQETMPEYITQGTTYLLPKEPNDLINPAKYRPITCLQTIYKIITACISHSIYAHLEQNQILTEQQKGCRKFSQGCKEQLIIDSVVLHHVQKNKNDLYSIYIDYAKAFDSVPHSWLLKVLEIYKIHPSIISFLQRTMSTWTTRLKLTTSADTLETEPIKIKRGIFQGDALSPLWFCLALNPLSNKLNSIDTGYVLQYSGAERESIQQDLKLNHLLYMDDLKLYASKEPELYNLINITECFSIDICMKFGIDKCKINSLVAGLPYQHQYELESGQLIHSLQDDNAYKYLGYNQSNLIHYKNTKTLLIAEFKRRLSSILKTQLNSRNIVKSINTYTIPILTYSFGIIKWTKTELLKFQRIINTMLTKYRKHHPRACFQRMTLPRAEGGRGIIDIHNLHNNQITTLRNYFHKKTETSTLHKLISYNDRKFTPLNLYNKETQNNQEIISINSKIETWKHKALHGRHLKDLNQPHIDKRASNAWLKHGELFPETEGFMQAIQDQIIETRNYSKHIIKRHNIIDICRKCNKSPETIQHITGACSSIVQTDYKHRHDQIVNIIHQKLAIQHQLLNDLPMPYYKYTPKTVLENSSYKMYFDRAILTDKTVHYNRPDITILDKNNKSALIIDVAIPNTHNLQNTISDKLTKYTELKDEIMRMWGLKTVNIIPVVLSTTGVIPKALHLSLKSINISPYTYIHLQKAVILNTCRIVRKFLQTDNNIVTST

SEQ ID NO: 20712 - protein, 1381 aa, Cecropterus dorantes
MASLSGAEYKMEKPLIEKRYNLRPLPRASRLTSGTNAGCSRIRRDIVSVKSSNRVVKVVTDEEASSTESNLTLFSSPISSPISYCTSSLNSSLSISSTANLIQEDVAQATIPVELPEPTTSMNKRRRWTQEMNQFILRTYLYLTKMETETNTYLQSLHSQFIKQFPEMTVSRQRVGDQRRAIIRNKLLSQEIIDSIYSEVQSDLVNKQNSMQQSTSNVSNNTTYIPGQRMKWTQEHNETIMRAYYKITKLETNKTDYRKQLHQEFIKSFPNLSNISEQRISDQRRVILNNNRLQKERLEVIRQEVEDELKRTDNSELLSSDDACNVINNDTEFSATEDFNVSGHQDTNMLPEVISNKIHETFKLAISYYKNTTPTEHTFIPKQRLSRNFYNIVNYINKIILPQYINVETDFNTFHTVIYCAAWTAAKINGTNLSLQPRNSKRCSSHNKPHWQIRLEKKVIDLRSHIGRLTQYIRGNRSINVTKHINTILSKYKVHTIHEDINTDLSQFLDTLKQKLTVTASRLRRYKACTLRKTQNNQFTNNEKQFYRTLKGNAIPQDINISPTVDAITNFWSGMWEEPVLHNNEAKWIKEEFDNYSHVELMQFESVTKETFQEVIKNLKNWKAPGSDQIHNFWYKNFTYIHPFLHNYINRFIKNQETMPEYITQGTTYLLPKDLNDLTNPAKYRPITCLQTIYKIITTCISHSIYAHLEKNHILTDQQKGCRKFSQGCKEQLIIDSVVLHHVQKNKNDLYSIYIDYAKAFDSVPHSWLLEILEIYKIHPSIISFLQSTMLTWTTRLKLTTKDTLETEPIKIKRGIFQGDALSPLWFCLALNPLSNKLNSIDTGYLLQYHQGNAIGTLCDTPEKESTQQDLKVSHLLYMDDLKLYASKESDLYNLINVTECFSIDICMNFGIDKCKINSIVAGLPYQHQYELQSGEVILSLQDDSAYKYLGYNQSNLIHYKNTKISLMAEFKRRLSSILKTQLNSRNIIKSINTYAIPILTYSFGIINWTKTELLKLQRIINTMLSKCRKHHPRSCFQRMTLPRAEGGRGIIDIHNLHNCQITTLRNYFHKKVETSTLYKLISYNDRKFTPLNLYNRETQKNQEIISIKSKIETWKHKALHGRHINDLNQPHIDKRASNAWLRYGELFPETEGFMQAIQDQVIETRNYSKHIIKRHNVIDICRKCNKSAETIQHITGACSSIVQTDYKHRHDQIVNIIHQKLAIQYRLLNDPPMPYYKYTPKTVLENSSYKMYFDRAILTDKTVHYNRPDITLLDKNNKTALIIDVAIPNTHNLQNTISDKLTKYTELKDEIMRMWGLKAVKIIPVVLSTTGVIPKALHLSLKSINLSPYTYIHLQKAVVLNTCRIVRKFLQTDNSIVIST

SEQ ID NO: 20713 - protein, 1350 aa, Haemactis sanguinalis
MTKSTTFIKYNLRPRKDRVYTETQCPTEEIFSSPESSYSLFSRSTQTTQSNCSLSSQSNVSSSIPLLSYSPVQENVAQNALVGKNSEPISCANKRRKWSDEMNQFILRTYLYLTKVDTETNSYLQELHTKFVEKFPDMIVSRQRVGDQRRAIIRNKLLSQETIDKIYEEVKSNLQNTQKTTQTIIPNIIASNPYVPNKRMKWTTEHNETIMRAYYKITRLENNKTDYRKSLHQEFVQIFPHLGHISEQRISDQRRVIINNNRLTKERLKTLKQEVANELKLNEQAEDISHNVESAKSHITNSKAYDTEDHADSISIRNLGIGLEQDICSLDKNIETKIRETFNRTLNYYNNISPTKRCYIPKQKTSKNFYRILNYINSVVLPKYIDKDTDFPTLHTSIYCAAWTAAKLNGTNLTLQPTISNLNKSYTKPRWQIRLEKRHTDLRTKIGRLTQYINGNRSKKIIKHVKNILENYKIHTTHEQINTELTHFLDTLKQKLSVTASRLKRYKTCTLRKIQNTQFVKNEKQFYRSLNSKMFQDTSNGPSVDNLKTFWAKIWEVPISYNSEADWIKEEIIKHEHIKTMEFEFITPDIFQEVLQNIHSWKAPGSDQIHNFWLKKLTYTHPFLHKHLNNFINNPSDVPEFITQGTTHMLPKDLGDLANPAKYRPITCLQTVYKLLTSCLAQAIYNHLERNEILTEQQKGCRKFSQGCKEQLVIDSVILQHVHKYKSDLFSVYIDYAKAFDSVPHSWLIKVLEIYKIHPKIICFLNNIISTWITRLQVKTKDELIQTKPIKIKRGIFQGDSLSPLWFCLALNPLSNKLNSSNKGFSLKYNATEPISASEKICINHLLYMDDLKLYASNEKDLQDLIKTTEYFSTDINMNFGIEKCKINSYKAGTQYQHQYTLSNTQIIKSLQDNNNSYKYLGYNQSNLIHYNETKNLLVQEFKHRLNTILKLHLNSKNTIKAINTYIIPILTYSFGIINWTKTELIKFQRCINTNLTKHRKHHPRACYQRMILPRREGGRGIIDIYNLHNNQITRLRNYFNNKALTSTLHTAIVKNDSKFTPLNLSDKGTQKNETIVTKETKLEMWKKKTLHGRHIKELNQTYVDKGASNAWLTSGDLFPETEGFMQAIQDQVIETRNYKKYIMKLNDITDICRKCNKLSETIQHITGACSSIVQTEYKHRHDQVVNIIHQKLAHQFHLTSEPHMSYYKYSPKNVMENATHKLYFDRAILTDKTVHYNRPDITLIDKINKTALIIDIAIPNTHNLQNTVSQKLTKYTELKDEITRMWRLKKVSIVPIVISTTGVIPKLLQQSLKAINISPYTILTLQKAVILNTCRIVRKFLQTDTTMYT

SEQ ID NO: 20714 - protein, 1127 aa, Doberes anticus
MNQFILRTYLYLTKMDTETDTYLQPLHSKFLEQFPNRVVSRQRIGDQRRAIIRNKLLPQETINNIYSEVRSNLQTTQDTTQASVSQSSAESTHMTGQRMKWTKDHNETIMRSYFKITQLETNKTDYRKQLHQEFIQIFPHLSHVSEQRISDQRRVIINNRRLTRERIEIIKQEVAEELKTSYFSEIDSNNDVHTDSPVKNINTIDSVNTNSEQNTLNLTEEKRIQIHETFKSALELFSNSSPTKRCFIPKQRVTKFFCKVIKYIDNQILSKYINANTDFSTLHTTIYCAAWTAAKLNGTKFTFPPTAPKQNKNYIKPKWQIRLEKRVVDLRAKIGRLTQYIGGNRTNNINVHVKTILENYKIHTTHEEINTDLTHFLDTLKQKLTVTASRLRRYKTCTLRKIQNNQFIKNEKQFYRSLNNSTISQNIDDRPSVGSIKTFWSGVWEEPISHNSEALWIKEEIEKHLQVESMQFESITKYVFQEVLRNLNNWKTPGSDHIHNFWYKKLTYVQPFLYNHLNNFIKNPTSVPEFVTQGTTYLLPKDLDGLSDPAKYRPITCLQTVYKILTSCLTQTIYKHLESNQILTEQQKGCRKFSQGCKEQLVIDSVILQQVHKKKKDLYSVYIDYAKAFDSVPHSWLLKVLEIYKIHPLIISFLENTMSTWTTRLRVLTKDTLETEPIKIKRGIFQGDALSPLWFCLALNPLSNKLNSTGKGFLLRYGTSKTESRLHEIKVNHLLYMDDLKLYASAECDLQNLIETTERFSIDICMNFGIEKCKINSYKAGVHFQHQHELHNMQLIQSLRENNTYKYLGYNQSNLIHYKDTKTILTQEFKRRLTAILKSHLNSRNLTKSINTYTVPILTYSFGIINWTKAELIKLQRSINTNLTKHRKHHPRACFQRMTLPRSEGGRGIIDIYNLHNKQIKKLRHYFHNKAVTSTLHKAIIHNDNKLTPLNLNNQETQKNENIVDIQTKIEEWKQKALHGRHLKDLNQSHIDKAASNGWLTCGDMFPETEGFMQAVQDQVIETRNYGKHIMKLNNITDICRKCNKSSETIQHITGACPSIVQTEYKYRHDQVVNIIHQKLAIQCRLISDPAIPYYKYNPKPVLENASHKIYFDRAILTDKTVHYKRN

SEQ ID NO: 20715 - protein, 1377 aa, Oechydrus chersis
MAEYGMKMNNKTIKKYNLRPLPRARRVTSGNNTRCSYKKEISSIELSNQFEKLIVDDELSATESTTSLFSSPNSTNPSYKSVSNPSSCVCSPTSSLVQEEVAQSALTVENLVPTTCIKKRKKWTDEMNQFILRTYLYLTKMETEINSYLEPLHSKFMDQFPDMLVSRQRVGDQRRAIIRNNYLTPEVVKQIYTEVQSNLKNTHKPIQPTLFCSTSSTSAPGTRMKWTQEYNETIIRTFYRITHLETNKTEYRKQLHQEFIKIFPHLSHLSEQRIADQRRVIINNNRLTKERLELIKQEVADEIKINNDRESQINIDINTQSPITSIDYRDHISLGNDENTVNLIPRLSRDTTNLTEEKRLIIQELFESVFQFYKETSPTNRCYIPKQKLSKKFYRVVNYIDCAILPKYINAKTDFSSLHTLIYCAAWTAAKMNGTKLTLTAKSAEVSIKNVKPKWQIRLENKITDLRAKIGRLTQYIRGNKTKNITKHVNAIIENYKIHTTFDKINTDLTHFLDTLKQKLAVTASRLRRYKTCSLRKTQNNQFIRNEKQYYRSLSNNITPQNTKTSPSLDSFKTLWSSIWGEPILHNCEAKWINEEKEKHMHIEAMQFESITIDVYQEVIRKLHNWKTTGSDHIHNFWFKKLTCIQPFLYKHLNNFIKNPAIMPDFITQGTTYLLPKDLDDLMNPSKYRPITCLQTVYKILTSCLSQIICKHLETNHILTEQQKGCRKFSQGCKEQLVIDSVILQRAHKNKNDLYTVYIDYAKAFDSVPHSWLLKVLEIYKIHPLLISFLRDSSSSWATRLRLKTIDNTFETEPIKIKRGIFQGDALSPLWFCLALNPLSNILNSTDKGYSLNYEQSENTRQDIKINHLLYMDDLKLYATNKHDLDHLIRLTEHFSMDISMNFGIEKCKINSYKSGVYQQYQYKLDNRQHINSLQQNNPYKYLGYNQTNLIQYKETKAILTQEFKRRLTTVLKSQLNSRNLIKAINTYTIPILTYSFGVIKWTKTELINLQRSIHTNLTKHRKHHPRACLQRMTLPRNEGGRGIIDIYNLHNKQISTLRKYFQNKTETSSLHTAVTYNDHNLTPLNLYSRDTQRNENIIDNQTKVEAWQQKTLHGRHLKELNLSHIDKTASNSWLMSGELFPETEGFMQAIQDQVIETRNYSKYIIKLNNIVDLCRKCNKCSETIQHITGACSSIVQTEYKHRHDQVVNIIHQKLAIQHRLITNPPTPYYKYNPQTVLENHSYKMYYDRAILTDKTVHYNRPDITLVDKINKTALIIDIAVPNSHNLQNTISEKITKYLELKDEITRMWRLEKVSIIPVVLSTTGVIPKILHQSLKSMNVSPYTYITLQKAVILNTCRIVRKFLQTDTYSRSTSRFS

SEQ ID NO: 20716 - protein, 794 aa, Chiomara georgina
MQFEYIKIDIFKEVVRKLHNWKTPGSDLIHNFWYKKLTFIQPFLFHHLNNFVKNPKETPNFITEGITYLLPKDPNKYDDPSKYRPITCLQTVYKILTSCLAETMYKHLDDNNILTEQQKGCRKMSQGCKEQLIIDSVVLQQVHKNKSDLYTAYIDYAKAFDSVPHSWLLKVLEIYKIHPLIISFLQNTSSNWKTHLRLKVKDNMLESEPISIKRGIFQGDALSPLWFCLALNPLSNILNSIDEGYSLQHFNTEHPIQINHLLYMDDLKLYATAEADLNRLIENTERFSTDICMNFGIDKCKLNSYKAGTHYQHEHELQSRQIIHSLQENNTYKYLGYNQTNLINSKDTKNKLTEEFKRRLNLILKTQLNSRNLVKAINTYTVPILTYSFGIINWTKSELINLQRTIHTSLTRQRKHHPRACYQRMTLPRAEGGRGIIDIHNLHNKQITTLRHYFHNKSINSTLYTAIVHNDRRLTPLNLFNRETQKNENIIKIQSKLEAWNMKSLHGRHLKDLNQSYADKKASNAWLTFGELFPETEGFMQAIQDQVIETRNYSKHIIKVNNITDICRKCNKASETIQHITSACSSIAQTEYKHRHDQVVNIIHQKLAIKYNLIKEPPVSYYKYKPQIILENTAYKMYYDRAILTDKTVHYNRPDITIIDKVNKTAFIIDIAIPNTHNLQNTISDKLTKYTELKDEIIRMWQLRKVTVVPVVVSATGVIPNTLHQSLKSINVSPYTYIQLQKAVILNTCRIVRKFLQADASVSPTQHLFLTMLFTWFKPVSNINNRLSNRESKN

SEQ ID NO: 20717 - protein, 1401 aa, Cycloglypha thrasibulus
MRTIGDGGLSRRAPLEQHITADIQSLSPSSSSASLFPSLPSSPPSYLDHTKNKNFSPTSNTSSTEDVVQMSQNEISLAPAEVSSPTRTLDADEFLSSNFIASSSSSSSHQLPTVSYPLNNFSSSSSIIQEDVARTTIAVDKSGPTTCSNKRKKWTQEMNQFILRTYLYLTKLDTETDTYLQPLHSKFTERFPNMSVSRQRVGDQRRAIMRSGLLPQETIRKIYNEVRINLETATTIPAQTTHCSIASTRTSTQRMRWTKVLNETIIRSYYKITLLETNKTDYRKQLHQEFVTKFPHLSHISEQRVSDQRRVIINNHRITPERLEIIKLEVAEELRATNNSTPDNSSDISHTHSQPSNDAYETVDTADQCTDNVGPITVESDIADLSEDTRNKILETFKSALEYFNGTLPTNRCYIPKQHVSKYFNKIVKYIDKEILRNYIDFDTSFLTMHTVVYCAAWTAAKINGTKLNLPPKLIENNTNNSIPRWQVRLEKKVADLRIKIGRLTQYINGNRSVNIQKQVNIILENYKIHTIHDEINTDLTHFLDTLKQKLSVTASRLRRYKTCSLRKTQNNQFIKNEKQFYRGLNNKTSSESTDCTIPLDGLKTFWSSVWEEPITHNDNATWIQKEIESHTHVEPMHFEYITVDIFREVLRKLHNWKTPGSDHIHNFWYKKFIFIQPFLYRHFNNFIKNPNATPSFVTQGTTYMLPKDFNNLNNPSKYRPITCLQTVYKILTSCLAHTIYKHLESNHILTEQQKGCRKMSQGCKEQLIIDSVILQQVHKSKRDLYTGYIDYAKAFDSVPHSWLFRVLEIYKIHPTIILFLQSTTSTWTTHLRVKSRYNMLESEPIKIKRGIFQGDALSPLWFCLALNPLSNQLNSIDKGYLLQHSSSERQIKINHLLYMDDLKLYATASDDLDHLIKSTEKFSTDICMNFGIDKCKLNSYKAGIHYQHHHELQSKQIIHSLQDNDTYKYLGYNQSNLIISKDTKNTLLQEFKRRLNLILKTQLNSRNLIKAINTYTISILTYSFGVISWTKSEIINFQRTINTNLTRQRKHHPRACYQRMTLPRYEGGRGVIDIYNLHNKQITSLRQYFHKKEINSVLHTAIVHNDRKLTPLNLFSRETQKNENLVKNQSKIQAWNLKSLHGRHLKDLNQLHVDKKASNAWLTMGELFPETEGFMQAIQDQVIETRNYSKHIIKLNNIIDTCRKCNKAPETIQHVTGSCSSIVQTEYKHRHDQVANIIHQKLAIKYNLVKDPPVPYYKYKPQSVLENTLYKMYYDRAILTDKTIHYNRPDITLIDKINKSAIIIDVAIPNTHNLQSTISDKLTKYTELKDEIIRLWQLRKVTIVPVVLSTTGVIPNTLHQSLKSINVSPHTYFTLQKAVILNTCRIVRKFLQTDISVIST

SEQ ID NO: 20718 - protein, 1389 aa, Ebrietas anacreon
MRTIGDGGLSRRAPLEQHTTADTENLSPSSSTVSLFPSLPSSPPSYLDNNHNLSPFSTTSSTEDVVQVSPKENLIAPAKVTSSTQIFHTDEFPSNNFTASSSSHYLPVSCQFYKTLLPFSSKTQEDVAQISEPVHESVPTTCNNKRKKWTQEMNQLILRNYLQLTNLDTDTDTYLQPLHSRFIEQFPNMTVSRQRVGDQRRAIMRRGLLTEETIKEIYDEVRSNLATSLTTETPTTHTSNQRMRWTNIYNETIMRAYYKITLLETNKTDYRKQLHQEFVAKFPHLSHISEQRVADQRRVIINNRRIKPERLEIIKQEVANEIRIAENCIQGTDIDIHTHPQIVNDAPETVELNNADQGINSTNLRIADSDNTNLTEETRNKILETFQSALEYYSDTLPTNRSYIPKQHISKQFNSIVRYIDTEILPKYVNKDTSFMLMHTVVYCAAWTAAKVNGTKLNLPPKTVEPQTDNFKPKWQVRLEKRVADLRIKIGRLTQYINGNRGINLTKHVNSILENYKTHTVHDEINTDLTHFLDTLKQKLSVTSSRLRRYKTCNLRKIQNNYFRKNEKQFYRSLNNNTTPESVDRTILLDDLKAFWSNVWEEPVSHNDNATWIEKEIEKHTHVEPMQFEHIKVEIFKEVLRKLHNWKTPGSDYIHNFWYKKFNFIQPFLFHHFNNFIKNPKAMPNFLTQGLTFLLPKDNNNFNDPSKYRPITCLQTVYKILTSCLAQTIYKHLDHYHILTEQQKGCRKMSQGCKEQLIIDSVILQQVHKNKSNLYTAYIDYAKAFDSVPHSWLLKVLEIYKIHPSIILFLQNTSSNWTTHLRLKLNKNTLESEPIKIKRGIFQGDALSPLWFCLALNPLSNKLNSIDQGYLLQHLTSEHEVKINHLLYMDDLKLYATTEDNLNHLIKSTERFSMDICMNFGIDKCKLNSYKAGIHYEHQHELHSRQIIYSLQENNTYKYLGYNQSNLINTKDTKNKLLQEFKRRLNLILKTHLNSRNMTKAINTYTVPILTYSFGIINWTKSELTNLQRTIHTSLTRQRKHHPRACYQRMVLPRTEGGRGIIDIYNLHNKQIKTLRHYFHNREISSTIHTAIVHNDRKLTPLNLFSREIQKNENLITNQSKIEAWNMKSLHGRHLKDLNQPHVDKKASNAWLTSGELFPETEGFMQAIQDQVIETRNYSKHIIKLNNTTDICRKCNKASETIQHVTGACSSIVQTEYKHRHDQVVNIIHQKLAIKYNLVKDPPVPYYKYKPQIVLENTSFKMYYDRAILTDKTVHYNRPDITIIDKITKNAIIIDIAIPNTHNLQNSISDKLTKYTELKDEIIRMWQLQKVTVVPIVLSTTGVIPNTLHQSLKTINVSPHTYFILQKAVILNTCRIVRKFLTDSSVSPA

SEQ ID NO: 20719 - protein, 1238 aa, Camptopleura auxo
MNQFILRNYLYLTNLDTETDTYLQPLHSRFIEQFPNMTVSRQRVGDQRRAIMRRGLLPQETIKEIYNEVRSDLATSLTTQKPASQTSSQRMRWTNNYNETIMRAYYKITLLETNKTDYRKQLHQEFVAKFPHLSHISEQRVADQRRVIINNHRITPERLEIIKQEVAREIRTAENCTLDTNTDIHTHTQIVSDTSEVVDLNNDDQWINSINLGIAEADSTDLPDEIKNKILETFQSALEYYSDTLPTKRCYIPKQRVTKHFNRIVRYIDTDILPKHVNMDTSFMFMHTVVYCAAWTAAKVNGTKLNLPPKTIKPKTDNFKPKWQARLEKKVADLRIKIGRLTQYINGNRNINLTKHVNTILENYKTHTVHDEINTDLTHFLDTLKQKLSVTASRLRRYKTCTLRKTQNNYFGKNEKQFYRSLNKNTSTESIDHTISLDGLKTFWSSVWEEPISHNDNATWIETEIEKHTHVEPMHFEYIKVEIFKDVLRKLHNWKTPGSDNIHNFWYKKFNSIQSFLFHHFNNFIKNPKTMPNFITQGITYLLPKDFNDLNDPSKYRPITCLQTVYKILTSCLAQTIYKHLDSNHILTEQQKGCRKMSQGCKEQLIIDSVILQQVHRNKSNLYTAYIDYAKAFDSVPHSWLLKILEIYKIHPSIISFLQNTSSCWTTHLRLKLKNKILETEPIKIKRGIFQGDALSPLWFCLALNPLSNKLNSVDQGYSLQHLTSEHPIKINHLLYMDDLKLYATTKDDLDHLIKSTERFSIDICMNFGIDKCKLNSYKAGVQYQHQHELQSREIIHSLQENNTYKYLGYNQSNLINCKDTKNKLIQEFKRRLNLILKTQLNSRNLIKAINTYTIPILTYSFGVISWTKSDLTNLQRIIHTSLTRQRKHHPRACYQRMILPRAEGGRGIIDICNLHNKQIKTLRHYFHDRKISSTLHTAIVHNDRKLTPLNLFSRETQKNENIITNQSKTEAWNMKPLHGRHLKDLNQSYIDKKASNAWLTLGELFPETEGFMQAIQDQVIETRNYSKHIIKLNNITDICRKCNKASETIQHVTGSCSSIVQTEYKHRHDQVVNIIHQKLAIKYNLVNDPPVPYYKYKPQIVLENTSFKMYYDRAILTDKTVHYNRPDITIIDKVNKNAIIIDIAIPNTHNLQNTISDKLTKYTELKDEILRMWQLRKVTVVPVVLSSTGVIPNTLHQSLKTINISPHTYFTLQKAVILNTCRIVRKFFQTDVSVLST

SEQ ID NO: 20720 - protein, 1410 aa, Ebrietas anacreon
MEKAHLRRYNLRPLPGGRRGALGAGAECLSMRTIGDGGLSRRAPLEQHTTADIQSLSPSSSSVSLFPSLPSSPPSYLDKNHNLSPISFTSTEDVVQMSLNEISPAPTKVSSYTRTSDTDEFLSSNFIASSSSSHQLPTIYPFNNSSPSNSIIQEDVAQTTIAVDKSVPTTCSNKRKKWTQEMNQFILRTYLSLTKLDTETDTYLQPLHSKFIERFPNMLVSRQRVGDQRRAIMRSGLLPPETITTIYNEVRSNLETATNTSAQTSHCSVASTHTSSQRMRWTKVLNETIMRSYYKITLLETNKTDYRKQLHQEFVTKFPHLSHISEQRVADQRRIIINNRRITPERLEIIKQQVAEEIRVTNNNTPDNSNHIHLESFNDVSETVDTNNTDQCTDNGDLGTVESDIANLPEETRNKIIETFKSALEYYDDTPPTNRCYLPKQHVSKYFSKIVNYIDKVILPKYVDVDTDFLSMHTVVYCAAWTAAKVNGTKLNLPPKSIQNNTNNSKPKWQVRLEKKISDLRIKIGRLTQYINGNRSVNIQKQVNIILENYKIHTVHDEINTDLTHFLDTLKQKLSVTASRLRRYKTCSLRKTQNIQFIKNEKQFYRAVNSTTPEPTDCTIPLDDLKAFWSSVWEEPITHNDTATWIDKEIKNHTHIEPMNFEHITIDIFREVLRKLHNWKTPGSDHIHNFWYKKFTFIQPFLYRHFNNFVKNPNEMPSFVTQGTTYMLPKDFNNLNNPSKYRPITCLQTVYKILTSCLAHTIYKHLESNHILTEQQKGCRKMSQGCKEQLIIDSVILQQVHKSKNDLFTGYIDYAKAFDSVPHSWLFKVLEIYKIHSSIITFLQNLSSTWTTHLRVKSRHNMLESEPINIKRGIFQGDALSPLWFCLALNPLSNELNSIDKGYPLQHFSSESQTKINHLLYMDDLKLYATAKDDLDHLIKSTERFSIDICMNFGIDKCKLNSYKAGIQYQHHHELQSKQIIHSLHDNDTYKYLGYNQSNLINSKDSKNTLVQEFKRRLNLILKTQLNSRHLIKAINTYTIPILTYSFGVINWTKSELINLQRIIHTSLTRQRKHHPRACYQRMTLPRFEGGRGIIDVYNLHSKQITTLRQYFYKKEVNSVLHTAIVDNDRKLTPLNLYSRETQKNENIIKHQSKIEAWNLKSLHGRHLKDLNQSHIDKKASNAWLTLGELFPETEGFMQAIQDQVIETRNYSKHIIKLSNITDICRKCNKAPETIQHVTGSCSSIVQTEYKHRHDQVANIIHQKLAIKYNLVKEPPVPYYKYKPQSVLENTSYKMYYDRAILTDKSIHYNRPDITIIDKINKSAIIIDVAIPNTHNLQSTISDKLTKYTELKDEIRRLWQLQKVTVVPIVLSTTGVIPNTIHQSLKYYQCFSTHIFHSPKGSHPQYLELE

SEQ ID NO: 20721 - protein, 1466 aa, Camptopleura auxo
MTDFGETSTLSIKHQSNICQLTIPTFLSCYPPLNVNMEKAHVTRYNLRPLPGGRRGALGAGAECLSMRTIGDGGLSRRAPLEQHTTADIQNLSPSSSSVSLFPSLPSSPPSYLDKNHDFSPTSTTSLTEDVVQMSQNEISTAPAKVTSSTRILDTDELSSSNLTALSSLHQLSTLSCPYYNSSTSSSKIQEDVAQTTIAVDKSVPTVCNQRKKWTKEMNEFILRTYLYLTKLDTETDTYLQPLHSKFIERFPNMTVNRQRVGDQRRAIIRSGLLPRETIEKIYNEVRSNLETAITTPAPAMHCSVSSSHTSGQRMRWTKVLNEAIMRSYYKITLLETNKTDYRKQLHQEFVTQFPHLSHISEQRVSDQRRVIINNRRITPERLEMLKKEVAEEIRITNNATPVNSNNIHHTYSQSFNDTYEPLETVDTNSNDQSIDNAGLRPVESNSANLSEETRNKILETFKSALEYYDGTLPTNRCYIPKQHVSKYFNRIVSYIDKEILPKYVDVNTNFLSMHTVVYCAAWTAAKVNGSTLNLPPKLLENNKNNLKPRWQVRLEKKVADLRIKIGRLTQYINGNRSVNIQKQVKMILENYKIHTVHDEVNTDLTHFLDTLKQKLSVTASRLRRYKTCSLRKTQNNQFVKNEKQFYRSLNNKIASESTDRTIPLDDLKTFWSSVWEVPIAHNDNATWIEKEIENHTHLEPMHFKYITIDIFKEVLRKLHNWKKPGSDYIHNFWYKKFTFIPPFLFHYLNNFIKNPNTMLSFITQGTTYMLPKDFNNLHNPSKYRPITCLQTVYKILTSCLAQTIYKHLESNHILTEQQKGCRKMSQGCKEQLIIDSVILQQVHKSKSDLYTGYIDYAKAFDSVPHTWLFKVLQIYKIHPSIISFLQKTSSNWTTHLRVKSGDNMLESVPIKIKRGIFQGDALSPLWFCLALNPLSNQLNSVDKGYSLQHSSSEHQIKINHLLYMDDLKLYATTVDDLDHLIKCTDRFSIDICMNFGIDKCKLNSYKAGIHYHHHHELQSRQIILSLQDDDTYRYLGYNQTNLINAKDSKNTLLQEFKRRLNLILKTQLNSRNLIKAINTYSIPILTYSFGVINWTKSELINLQRIIHTSLTKQRKHHPRACYQRMTLPRSEGGRGIIDVYNLHNKQIATLRHYFHKRETNSTLHTEIVHNDRKLTPLNLFSREIQKNENLIKNQSKIEAWNIKSLHGRHLKDLNQSHVDKKASNAWLTLGELFPETEGFMQAIQDQVIETRNYSRHIIKLNNIKDICRKCNKAPETIQHVTGSCSSIVQTEYKHRHDQVANIIHQKLAIKYKLVTDPPVPYYKYKPQTILENTSYKMYYDRAILTDKTIHYNRPDITIIDKINKTAIIIDVAIPNTHNLQSTISDKLTKYTELKDEIIRLWQLRKVTVVPVVLSTTGVIPNTLHQSLKSINVSPHTYFTLQKAVILNTCRIVRKFLQTDISALST

SEQ ID NO: 20722 - protein, 1034 aa, Erynnis tages
MNNILVNDNILQLDNTNLLEGTKNKIKETFKLTLEYYSNTSPTDRCYIPKQQVSKSFNRIIKYIDKEILPMYVNANTDFLTMHTVIYCAAWTAAKMNGTNLTLPPKTKDHNIINFKPKWQVRLEKRISDLRIKIGRLTQYIHGNRNANITKHVNTIFQNYKVHTVHDEINTDPTHFLDTLKQKLSVAASRLRRYKTCSLRKTQNNQFTRNEKQFYRSLSKNSTSQSCDRNISLDGLKAYWSGIWEEPILHNNDATWIENEIENHLHVESMQFEYITADIFREVMRKLHNWKTPGSDPIHNFWYKKLTYIQPYLYNHFNSFIKDPPAMPKFITQGTTYLLPKESNDLNDPSKFRPITCLQTVYKILTSCLAQTIYKHVESNNILTEQQKGCRKFSQGCKEQLIIDSVILQQVHKNKRDLYTGYIDYAKAFDSVPHSWLLKVLEIYKIHPTIISFLQNTSSSWTTHLRVKTKDNMIDSEPIKIKRGIFQGDALSPLWFCLALNPLSNKLNSMNIGYSLQHTTSEQIKFNHLLYMDDLKLYAIDQDDLDHLIESTERFSIDICMNFGINKCRLNSYKAGIHYQHQHELQSGQIIHSLQNNNPYKYLGYNQTNLINCKDSKNILLQEFTRRLNLILKTQLNSRNLIKAINTYCIPILTYSFGVLKWTKLELVNLQRTIHTSLTKHRKHHPRACYQRMILPRVEGGRGIIDIYNLHNKQIATLRQFFHNRKLSSILHNLVVNNDRRLTPLNLYSKETQKNEKLINNRSKEEAWNAKALHGRHFKDLNQSFVDKKASNAWLTLGELFPETEGFMQAIQDQVIETRNYSKHIIKLNNITDICRKCNKASETIQHITGSCSSIVQTEYKHRHDQVVNIIHQKLAIKYNLINDSPVPYYKYKPNIALENASYKMYYDRAVFTDKTVHYNRPDITIVDKINKNAMIIDVAIPNTHNLQSTISEKLIKYTDLRDEIMRQWQLQKVTIVPVVLSTTGVIPKTLHQSLKSINISPYTYFTLQKAVILNTCRIVRKFLQTDTSVPYDN

SEQ ID NO: 20723 - protein, 1429 aa, Erynnis tages
MEKVRTRRYNLRPLPGGRRGALGAGAECHSMRTIGDGGLSRRAPLEQHTTADIHLSPSSSSISLFPSLPSSPPSYLDNNLNLSPISSTSSTEDVQVTQQKFLTGSAKVPSYAQILQTGECSSSHSATSSSSHQNSTIMSHPFSDSSTSGIITTQENVAQTTITVDKSGPTTCNYKRKKWTQEMNQFILRTYLYLTKLDTETDTYLQPLHSRFIEQFPNMTVSRQRVGDQRRAIMRGLLPQETIKKIYNEVRSNLAARHSTQEPINSLDNSAHTSGQRMRWTQEHNETIMRAYYKITLLETNKTDYRKQLHQEFVTKFPHLNHVTEQRISDQRRVIINNRRLTTERLEIIKQEVEKELRIVKERTPENTENIPHTCSITVSVDTSKTIDPNSDEQSMNNILVNDNILQLDNTNLLEGTKNKIKETFKLTLEYYSNTSPTDRCYIPKQQVSKSFNRIIKYIDKEILPMYVNANTDFLTMHTVIYCAAWTAAKMNGTNLTLPPKTKDHNIINFKPKWQVRLEKRISDLRIKIGRLTQYIHGNRNANITKHVNTIFQNYKVHTVHDEINTDPTHFLDTLKQKLSVAASRLRRYKTCSLRKTQNNQFTRNEKQFYRSLSKNSTSQSCDRNISLDGLKAYWSGIWEEPILHNNDATWIENEIENHLHVESMQFEYITADIFREVLRKLHNWKTPGSDHIHNFWYKKLTYIQPYLYNHFNSFIKDPPAMPKFITQGTTYLLPKESNDLNDPSKFRPITCLQTVYKILTSCLAQTIYKHVESNNILTEQQKGCRKFSQGCKEQLIIDSVILQQVHKNKRDLYTGYIDYAKAFDSVPHSWLLKVLEIYKIHPTIISFLQNTSSSWTTHLRVKTKDNMIDSEPIKIKRGIFQGDALSPLWFCLALNPLSNKLNSTNIGYSLQHTTSEQIKFNHLLYMDDLKLYAIDQDDLDHLIESTERFSIDICMNFGINKCRLNSYKAGIHYQHQHELQSGQIIHSLQNNNPYKYLGYNQTNLINCKDSKNILLQEFTRRLNLILKTQLNSRNLIKAINTYCIPILTYSFGVLKWTKLELVNLQRTIHTSLTKHRKHHPRACYQRMILPRVEGGRGIIDIYNLHNKQIATLRQFFHNRKLSSILHNLVVNNDRRLTPLNLYSKETQKNEKLINNRSKEEAWNAKALHGRHFKDLNQSFVDKKASNAWLTLGELFPETEGFMQAIQDQVIETRNYSKHIIKLNNITDICRKCNKASETIQHITGSCSSIVQTEYKHRHDQVVNIIHQKLAIKYNLINDSPVPYYKYKPNIALENASYKMYYDRAVFTDKTVHYNRPDITIVDKINKNAMIIDVAIPNTHNLQSTISEKLIKYTDLRDEIMRQWQLQKVTIVPVVLSTTGVIPKTLHQSLKSINISPYTYFTLQKAVILNTCRIVRKFLQTDTSVPYDN

SEQ ID NO: 20724 - protein, 1429 aa, Erynnis tages
MEKVRTRRYNLRPLPGGRRGALGAGAECHSMRTIGDGGLSRRAPLEQHTTADIHLSPSSSSISLFPSLPSSPPSYLDNNLNLSPISSTSSTEDVQVTQQKFLTGSAKVPSYAQILQTGECSSSHSATSSSSHQNSTIMSHPFSDSSTSGIITTQENVAQTTITVDKSGPTTCNYKRKKWTQEMNQFILRTYLYLTKLDTETDTYLQPLHSRFIEQFPNMTVSRQRVGDQRRAIMRGLLPQETIKKIYNEVRSNLAARHSTQEPINSLDNSAHTSGQRMRWTQEHNETIMRAYYKITLLETNKTDYRKQLHQEFVTKFPHLNHVTEQRISDQRRVITNNRRLTTERLEIIKQEVEKELRIVKERIPENTEDIPNTCSITVSVDTSKTIDPNSDEQSMNNILVNDNILQLDNTNLLEGTKNKIKETFKLTLEYYSNTSPTDRCYIPKQQVSKSFNRIIKYIDKEILPMYVNANTDFLTMHTVIYCAAWTAAKMNGTNLTLPPKTKDHNIINFKPKWQVRLEKRISDLRIKIGRLTQYIHGNRNANITKHVNTIFQNYKVHTVHDEINTDPTHFLDTLKQKLSVAASRLRRYKTCSLRKTQNNQFTRNEKQFYRSLSKNSTSQSCDRNISLDGLKAYWSGIWEEPILHNNDATWIENEIENHLHVESMQFEYITADIFREVLRKLHNWKTPGSDHIHNFWYKKLTYIQPYLYNHFNSFIKDPPAMPKFITQGTTYLLPKESNDLNDPSKFRPITCLQTVYKILTSCLAQTIYKHVESNNILTEQQKGCRKFSQGCKEQLIIDSVILQQVHKNKRDLYTGYIDYAKAFDSVPHSWLLKVLEIYKIHPTIISFLQNTSSSWTTHLRVKTKDNMIDSEPIKIKRGIFQGDALSPLWFCLALNPLSNKLNSTNIGYSLQHTTSEQIKFNHLLYMDDLKLYAIDQDDLDHLIESTERFSIDICMNFGINKCRLNSYKAGIHYQHQHELQSGQIIHSLQNNNPYKYLGYNQTNLINCKDSKNILLQEFTRRLNLILKTQLNSRNLIKAINTYCIPILTYSFGVLKWTKLELVNLQRTIHTSLTKHRKHHPRACYQRMILPRVEGGRGIIDIYNLHNKQIATLRQFFHNRKLSSILHKLVVNNDRRLTPLNLYSKETQKNEKLINNRSKEEAWNAKALHGRHFKDLNQSFVDKKASNAWLTLGELFPETEGFMQAIQDQVIETRNYSKHIIKLNNITDICRKCNKASETIQHITGSCSSIVQTEYKHRHDQVVNIIHQKLAIKYNLINDSPVPYYKYKPNIALENASYKMYYDRAVFTDKTVHYNRPDITIVDKINKNAMIIDVAIPNTHNLQSTISEKLIKYTDLRDEIMRQWQLQKVTIVPVVLSTTGVIPKTLHQSLKSINISLYTYFTLQKAVILNTCRIVRKFLQTDTSVPYDN

SEQ ID NO: 20725 - protein, 1427 aa, Erynnis tages
MEKVRTRRYNLRPLPGGRRGALGAGAECHSMRTIGDGGLSRRAPLEQHTTADIHLSPSSSSISLFPSLPSSPPSYLDNNLNLSPISSTSSTEDVQVTQQKFLTGSAKVPSYAQILQTGEFSSSHSATSSYQNSTIMSHPFSGSSTSGIITTQENVAQTTITVDKSGPTTCNYKRKKWTQEMNQFILRTYLYLTKLDTETDTYLQPLHSRFIEQFPNMTVSRQRVGDQRRAIMRGLLPQETIKKIYNEVRSNLAARHSTQEPINSLDNSAHTSGQRMRWTQEHNETIMRAYYKITLLETNKTDYRKQLHQEFVTKFPHLNHVTEQRISDQRRVIINNRRLTTERLEIIKQEVEKELRIVKERTPENTEDIPHTCSITVSVDTSKTIDPNSDEQSMNNILVNDNILQLDNTNLLEGTKNKIIETFKLTLEYYSNTSPTDRCYIPKQQVSKSFNRIIKYIDKEILPMYVNANTDFLTMHTVIYCAAWTAAKMNGTNLTLPPKTKHHNIINFKPKWQVRLEKRISDLRIKIGRLTQYIHGNRNANITKHVNTIFQNYKVHTVHDEINTDPTHFLDTLKQKLSVAASRLRRYKTCSLRKTQNNQFTRNEKQFYRTLSKNSTSQSCDRNISLDGLKAYWSGIWEEPILHNDDATWIENEIENHLHVESMQFEYITADIFREVLRKLHNWKTPGSDHIHNFWYKKLTYIQPYLYNHFNSFIKDPPAMPKFITQGTTYLLPKESNDLNDPSKFRPITCLQTVYKILTSCLAQTIYKHVESNNILTEQQKGCRKFSQGCKEQLIIDSVILQQVHKNKRDLYTGYIDYAKAFDSVPHSWLLKVLEIYKIHPTIISFLQNTSSSWTTHLRVKTKDNMIDSEPIKIKRGIFQGDALSPLWFCLALNPLSNKLNSTNIGYSLQHTTSEQIKFNHLLYMDDLKLYAIDQDDLDHLIESTERFSIDICMNFGINKCRLNSYKAGIHYQHQHELQSGQIIHSLQNNNPYKYLGYNQTNLINCKDSKNILLQEFTRRLNLILKTQLNSRNLIKAINTYCIPILTYSFGVLKWTKLELVNLQRTIHTSLTKHRKHHPRACYQRMILPRVEGGRGIIDIYNLHNKQIATLRQFFHNRKLSSTLHNLVVNNDRRLTPLNLYSKETQKNEKLINNRSKEEAWNAKALHGRHFKDLNQSFVDKKASNAWLTLGELFPETEGFMQAIQDQVIETRNYSKHIIKLNNITDICRKCNKASETIQHITGSCSSIVQTEYKHRHDQVVNIIHQKLAIKYNLINDSPVPYYKYKPNIALENASYKMYYDRAVFTDKTVHYNRPDITIVDKVNKNAMIIDVAIPNTHNLQSTISEKLTKYTDLRDEIMRQWQLQKVTIVPVVLSTTGVIPKTLHQSLKSINISPYTYFTLQKAVILNTCRIVRKFLQTDTSVPYDN

SEQ ID NO: 20726 - protein, 1434 aa, Camptopleura auxo
MEKVRNSRYNLRPLPGGRRGALGAGAECYSMRTIGDGGLSRRAPLEENTTADIENFSSLSPSSSPVSLFPSLPSSPPSYLCDDDFSDVSITSSYSTTEDVVQVSEDATLTALAKVSSCTRIKSINENISPKFKASPSSHHSSQILSCQSKPSIFSNPGNQIQEDVAQTTTSVDKPVPTTCINKRIKWTPEMNQFILRTYLYLTKADTETDTYLHALHSKFIQKFPHIPVSRQRVGDQRRAIIRNRLLSQKTIDNIYNEVKTNLQTTQQLATNILTDTNKTNISSQRMKWTREYNETIMRAYYKVTSLETNKTNYRKQLHQEFITSFPHLSHISEQRISDQRRVIINNRRLSVETLKTIKQEVEKELTITNNCEAVNTDIGDTYTRTYTHINSPIESTNNTSNPTHTNNFEHRTKKQDTMNLTEERKTEINETFKLALEYYRIIPPTERSFIPKQKITKDFNRIVEYINRDILPKYVNAETDFYLMHAIIYCAAWTAAKINGTNLTLPPVIKQIKCNSKPKWQIRLETKVMDLRTKIGRLTQYIRGNRSTNMTKHVSVILESYKIHTKHDEINTDLTHFLDTLKQKLAVTASRLRRYKACNLRKTQNNQFTNNEKQFYRSLSSNMSVNAFDNSPSLDGLKTFWSSIWEEPVMHNNNSICVKEEIDKYFHIEPMQFNDITADVFQEVMKKLHNWKTPGSDHIHNFWYKKLTYTQPFLYKHLNNFIKNPTTMPEFITQGTTYLLPKDLNDMTNPTKYRPITCLQTVYKILTSCLTHTIHKHIETNKILTEQQKGCRKFSQGCKEQLIIDSVILQQVHKNKSNLYTAYIDYAKAFDSVPHSWLLKVLDIYKINPLIISFLQSTILKWTTKLRVKSREHIVETEPISIKRGIFQGDSLSPLWFCLALNPLSNKLNALTKGYSFKHDTLTPQINHLLYMDDLKLYSTTEDDLKNLIEVTEGFSNDICMNFGVEKCKLNSYEAGIHLQHEHQLQSRQIIHSLQEHNTYKYLGYNQSNLIHCKNTKNMLTEEFKRRLNLILKTHLNSRNLVKSINTYTIPVLTYSFGIINWSKTELIRLQRTINTTLTKQRKHHPRACYQRMTLPRSEGGRGIIDILNLHNKQITALRSYFNNKALNSKLHNAVVHNDRKFTPLNLYSKETQNNETIINNQLKIEAWEQKTLHGRHLKDLNQSHIDKKASNAWLTLGELFPETEGFMQAIQDQVIETRNYNKYIVKLNNTIDTCRKCYKASETIQHITGSCSSIVQTEYKHRHDQVVNIIHQKLALKYHLINEPPLPYYKYKPQVVLENISYKMYYDRAILTDKTVHYNRPDITLIDKINKNATIVDIAIPNTHNLQNTISEKLTKYVDLREEIMRMWQLQTVTIVPVVLSTTGVIPKTLHQSLKSLKISPYTHFTLQKAVILNTCRIVRKFLQTDITASSS

SEQ ID NO: 20727 - protein, 1387 aa, Cycloglypha thrasibulus
MRTIGDGGLNRRAPLEQHTTADTENLSPSSSTVSLFPSLPSSPPSYLDYDHNLSPSSTTSSTEDVVQVSSNEALIAPAKVTSSTQMSVTDEFLSSNFTASSSSHHLPLSSKFLKSLPSSSSIQEDVAQISTSVDQSVPTTCNYKRKKWTQEMNQFILRNYLHLTNLDSDTNTYLQPLHSRFIEQFPNMTVSRQRVGDQRRAIMRKGLLSQDTIKEIYDEVRSELATSLTTPKPATHTSSQRMRWTNIYNETIMRAYYKITLLETNKTDYRKQLHNEFVTKFPHLSHISEQRVADQRRIIINNRRIKPERLEIIKQEVAKEIRIDENCTLGTNSEINTHMQIVTDTPEALDVNNAGHWIDNTNLRIAEPDSTNLTEETKNQILDTFQSTLEYYNDTLPTNRCYIPKQHISKHLHKIVRYIDTEILPKYIKKDTSFTFMHTVIYCAAWTAAKVNGTRLNLPPKTIEPKTDNYKPKWQVRLEKRVADLRIKIGRLTQYINGNRNINLTKHVNNILENYKTHTVYDEINTDLTHFLDTLKQKLSVTASRLRRYKTCSLRKTQNNYFGKNEKQFYRSLNNNATPESVDRSISLDGLKAFWSSVWEEPTSHNDNATWIETEIEKHTHVEPMEFEHIKIEIYKEVLRKLHNWKTPGSDYIHNFWYKKFNFIQPFLFQHLNNFIKNSNAMPNFITQGVTFLLPKDFSNLNDPSKYRPITCLQTVYKILTSCLAQTIYKHLDSNHILAEQQKGCRKMSQGCKEQLIIDSVILQQVHKNKSNLYTAYIDYAKAFDSVPHSWLLKVLEIYKIHPSIISFLHNTSSNWTTHLCLKSKNKMLESEPIKIKRGIFQGDALSPLWFCLALNPLSNKLNSVDQGYLLQYLTSEHEFKINHLLYMDDLKLYATTEDDLDHLVKSTESFSNDICMRFGIDKCKLNSYKAGIHYQHQHELQSGQIIHSLQENNTYKYLGYNQSNLINTKDTKNKLIQEFKRRLNLILKTQLNSRNLTKAINTYTVPILTYSFGVINWTKSELTNLQRIIHTSLTRQRKHHPRACYQRMILPRAEGGRGIIDIYNLHNKQIKTLRHYFHNTNSILHTTIVHNDRKLTPLNLFSRETQRNENLITSQSKIETWNMKSLHGRHLKDLNQPHVDKKASNAWLTLGELFPETEGFMQAIQDQVIETRNHSKYIIKLNNITDICRKCNKAPETIQHVTGSCSSIVQTEYKHRHDQVVNIIHQKLAIKYNLLKDPPVPYYKYKPQIVLENTSFKMYYDRAILTDKTVHYNRPDITIINKINKDALIIDIAIPNTHNLQNTISDKLTKYTELKDEIIRMWQLRKVTVVPVVLSTTGVIPNTLHQSLKTINVSPHTYCTLQKAVILNTCRIVRKFLQTDITVLST

SEQ ID NO: 20728 - protein, 831 aa, Myrinia binoculus
MKNEKQFYRTLQSTTTPEKPDGRPSVESLKTFWAGVWDLTALHNTEANWIKEETEKYLHVESMQFESITGDVFQEVLKTLHNWKTPGSDYIHNFWYKKLTHIQPFLYNHFNNFIKNPTSVPEFITQGTTYLLPKDLNKLTDPSKYRPITCLQTVYKMLTCCLTQTIYKHLETNHILTEQQKGCRRFSQGCKEQLLIDSVILQQVHKNKSDLFSVYIDYAKAFDSVPHSWLLKVLEIYKIHPLIISFLYNTSSIWTTRLRVRTKDDTLETEPIKIKRGIFQGDSLSPLWFCLNPLSNRLNSLHKGFKMQYSTPETESKLQMINVNHLLYMDDLKLYASSEHDLQKLIDITEHFSMDINMNFGIEKCKINSYKSGVQHQHQYELYNMQLIESLQENNTYKYLGYEQSNLIHYKDTKTILIKQFKRRLTAILKTQLNSRNMIKAINTYTIPILTYSFGIINWTKSELIKLQRSINTNLTKHRKHHPRACFQRMTLPRTEGGRGIIDIYNLHNKQITILRHYFRNKAINSTLHEAIIQNDRKLTPLNLHNKETQKNENIIDNKTKIEDWKQKALHGRHLKDLNQSHIDKAASNAWLKVGNLFPETEGFMQAIQDQVIETRNYSKYIVKSNNVTDMCRKCNKSSETIQHITGACSSIVQTEYKHRHDQVVNIIHQKLAIQYHLINNPPLPYYKYNPKTVLENASHKMYFDRAILTDKTVHYNRPDITLIDKINKTALIIDVAIPNTHNLQNTVSEKLTKYIELKDEIIRIWRLEKVNIIPVVLSTTGVIPKVLHQSLQSINISPNTYIILQKAVILNTCRIVRKFLQTDKTIHTFP

SEQ ID NO: 20729 - protein, 882 aa, Helias cama
MHTVLYCASWTAAKVNGTKLSLPPKSIENNTNNLKPRWQIRLEKKIADLRLKIGRLTQYIKGNRSVNIQKQVNIILENYKIHTVHDEINTELTHFLDTLKQKLSVTASRLRRYKTCSLRKTQNNQFVKNEKQFYRSLNNKSISEATDRTAPLDGLTAFWSSVWEEPITHNDNATWIEKEVENHTHVAPMHFEYITIDIFKDVLRKLHNWKTPGSDYIHNFWYKKFMFIQPFLYRHFNNFITNPNTTPSFITQGTTYMLPKDWNNLNNPSKYRPITCLQTVYKILTSCLAQIIYKHLESNHILTEQQKGCRKISQGCKEQLIIDSVILQQVHKSKSDLYTGYIDYAKAYDSVHSWLFKVLQIYKIHPSIISFLQSTSSSWTTHLRVKSRHNTLESEPIRIKRGIFQGDALSPLWFCLALNPLSNQLNSIDRGYSLQHFNSERHIKINHLLYMDDLKLYATAIDDLDHLIKSTETFSKDICMNFGIDKCKLNSYKAGIHHQHHHELQSRQIIHSLQDNDTYKYLGYNQSNLINSKYSKNTLLQEFKRRLNLILKTQLNSRNLIKAINTYTIPILTYSFGIISWTKSELINLQRIIHTSLTRHRKHHPRACYQRMTLSRSEGGRGIIDIYNLYNKQIATLRHYFHKKEINSVLHTTIVHNDRRLTPLNLFSRDTQKNEKVIENHTKIQAWNLKALHGRHLKDLNQSYVDKKASNIWLTLGELFPETKGFMQAIQDQVIETRNYSKHIIKLNNITDICRKCNKAPETIQHVTGACSSIAQTEYKHRHDQVANIIHQKLAIKYNLIKDPPIPYYKYKPLSVIENSSYKMYYDRAILTDKTIHYNRPDITIIDKINKSAIIIDVAIPNTHNLQSTISDKLTKYTELKD

SEQ ID NO: 20730 - protein, 1322 aa, Aguna metophis
MKKTTTENKYNLRPLPRASRITSGTNVGYSRQNVNSINRAAKVVTDDELSSAESNASLFSSLISSPISPPSSFISSPSSSLIQEDVAQTAISVELTVPTTSIHKRKKWTQEMNQFILRTYLYLTKLETDTNTYLQSLHSQFIKQFPNMIVSRQRIGDQRRAIIRNKLLSQDIINSIYNEVQSKLNMTQGFTSQSVPNFSYNTTQIPGQRMKWTQELNETIIRAYYRITNLETNKTDYRKQLHKEFIKTYPHLSHISEQRISDQRRIIINNNRLQKERLKIIRQEVEDELNISNNEIVGIDDNIDTNHAINDISTCNVRNTDRIIPVTVDLNLNIEPSENSLSEEICNKIQDKYKLAINSFSNNLATERPYIPKQKLSKKFYQIVNYIDKIILPKYINADTDFNTLLTAIYCAAWTAAKINGTNLTLTPAKPKSYNNNNNNNKKPHWQIRLETKVTDLRSKIGRLTQYIRGNRSTNVTKHVNNILESYKVHTIHEDINTDLSQFLDTLKQKLTVVASRLKRYKACSLRKTQNNQFNSNEKQFYRTLRNNTSSQHINDNPTLNTVTNFWSNIWEKSAEHNGEAKWIQEELDNNSHIELMQFQSITLEVFHEVLNKLNNWKAPGSDKIHNFWYKRFTYIQPFLYNYINKFINNPQTMPEFVTEGTTYLLPKDLNNLSNPAKYRPITCLQTVYKMLTACLTHTIYKHLETNQILTEQQKGCRKFSQGCKEQLIIDSVILHQVHKNKCDLYSIYIDYAKAFDSVPHSWLIKTLEIYKIHPTIISFLQNTMLTWTTRLRVTTIDGTLETEHIKIKRGMFQGDSLSPLWFCLALNPLSNKLNSMNTGYLFQYCTSQRETTRHRLNHLLYMDDLKLYASNQSDLNNLISITESFSTDICMNFGIDKCKINSLKAGLPYQHQHELQSGELIEPLQEGNAYKYLGYNQSCLIHYKDTKTKLREEFKQRVASILKTQLNSRNLIKSVNTYAIPILTYSFGIINWTKTELLQLQRKINTMLTKYRKHHPRACFQRMTLPRAKGGRGIIDIYNLHNKQITTLRQYFYNKAETSILHKIIINNDRRLTPLNLNDKEIQKYEDIVSIESKIDTWKQKALHGRHLKDLRQPHIDELASNAWLIHGELFPETEGFMQAIQDQIVETRNYSKHIVKRHSVIDICRKCNKSSETIQHITGACSSIVQTDYKHRHDQVVNIIHQKLAHQYNLLKDSPTPYYKYVPKTVLENTSYKMYFDRAILTDKTVHYNRPDITLIDKSSKTALIIDIAIPNTHNLQNTISEKLTKYLELKEEIIRMWTQKSQHNHCGCYDHWSYLYRNQ

SEQ ID NO: 20731 - protein, 1392 aa, Eracon sarahburnsae
MDSLFPLLLPWPNCMAEYEMKKSTTIKKYNLRPHPRARRVEPEDGTGYSINNSKRDFANAELNNHAAKLMADDEFLIAESNVTPFPSPTTTSSYRSSPIQSHSSLFVSSPTSSFVQEDVAQIAIIAEKSVPTTCTNKRKKWTNEMNQFILRNYLCLTKMDTETGDYLQPLHNKFIEQFPNMTVSRQRIGDQRRAIIRNKLLPQEIINNIYDEVRSNLQSTEFITQVSTPHLITDSTHTIRHRMKWSKDHNEAIMRAYYKITKLETNKTDYRKQLHQEFIQNFPHLSHVSEQRISDQRRVIINNKRLPSETLEVIKQEVANELNMVSNGEVEANNEVIYAHSPVRTINPIDSESDVEFLNRITLNQNLEQDTNNLTEQQKTKIRDLFKDALEFFSSTLPTKRCYIPKQKLSKNFYRIIKYIDGVILPQYINENTDFFALHTAIYCAAWTSAKMNGTNLTLPPAMQKQNRNNVKPKWQIRLENRITDLRAKIGRLTQYIGGNRSTNINKHVHMILQNYKVHTTHEEINIDLTHFLDTLKQKLSVTASRLRRYKTCTLRKNQNIQFIKNEKHFYRSLNNNTTAQSTDSRPTVDSLTTFWAGVWGKSVTHNPDAVWIKEETERHMYVEPMQFEFITGDVFQDVLRNLHNWKTPGSDHIHNFWYKKLTYIQPFLYHHFNNFIKNPISLPEFVTQGTTYMLPKDLNNLTNPSKYRPITCLQTIYKILTSCLTQTIYKHLEMNRILTEQQKGCRRFSQGCKEQVLIDSVILQQVHKNKSNLFSVYIDYTKAFDSVPHSWLLKVLEIYKIHPLIISFLQNTISSWTTRLRLTINDTLESEPIKIKRGIFQGDVLSPLWFCLALNPLSNKLNSDDKGYSLQLAPSQTESSHKEINVNHLLYMDDLKLYASTECDLQELINVTERFSMDICMEFGIEKCKINSHRARVHYQHQHELLNMQLIDSLQENNTYKYLGYNQSNIIHHKNTKKLLIQEFKRRLTAVLKSHLNSRNLIKAINTYTIPILTYSFGVINWTKTELIKLQRAINTNLTKQRKHHPRACFQRMTLPRIEGGRGIIDIYNLHNRQITTLRHYFHHKAETSTLHQAIIYNDRKLTPLNLNNKLTQKNENIIDNRAKIEAWKQKTLHGRHPKDLSQAHVDKAASNAWLTSGNLFPETEGFMQAIQDQVIDTRNYSKHIVKLNNIIDVCRKCNKSSETIQHITGACSSIVQTEYKHRHDQVLNIIHQKLAIQYNLINYPPVPYYKYNPKVVLENASYKMYFDRAILTDKTVHYNRPDITFIDKINKTALIIDVAIPNTHNLQNTISEKLTKYTELKDEITRMWRLQKVNIIPVVLSTTGVIPKTLHQSLKSMNITPYTYLTLQKAVILNTCRIVRKFLQTETLPL

SEQ ID NO: 20732 - protein, 1289 aa, Pyrrhopyge zenodorus
MKKLTETKKVYNLRPRLQARRATPGINTISSQRDNTNIESNNRFERVVSGDEESKTESSASLYSAPTDTSLASLSASTVSVASSATMSPIIASCQKMLTHKANNSLRPGDVAQTAVSANLSVPATGSRKRKKWTIEMNQFILRDYLYLTKMETETFNYLQPLHSNFVDRFPDMTVSRQRLGDQRRAIIRNKLLSQEIIDNIYDEVQTNLRTTQITTQQLNPNSNDNIAPIQNKRIKWSTEYNETIIRAYYRITNMEINKTDYRKQLHQDFIKTFPHLSHVSEQRISDQRRIIINSNRIKPERLETIKQEVAGELKLSTSEVRRKKEIQTYTCVESGESSDITLVSVNNINESTVPDTIINLDKNNSCSVELSTEIQNLFKQSLDFYNSITPTKRCFIPKQKISKHFNMVVNYINSNILPKFINQYTNFTELHTIIYCAAWTAAKINGTKLTIPPKIPSENKVNSLNPKWQIRLEKKVANLRTKIGRLTQYIHGNKSTKNTKHINIILESYKIHTKHEEVNTELNQFLDTLKQKLAVTASRLRRYKMCTLRKTQNNQFVKNEKEFYRSLKNNTNAKNVDVSPTTDSIMNFWSSVWEKPICHNNRSLLINTETESHSHIENMTFESITMETLQEVLKNLHNWKAPGSDHVHNYWYKKFTYIQPFILNHINNFIKNPTKLPQFLTEGITYLLPKDFDDLTNPAKYRPITCLQTMYKILTSCLSLSIYKHLENNRILTEQQKGCRKFSKGCKEQLVIDSVILQQAHKKKKDLYTVYIDYAKAFDSVPHSWLMKVLEIYKIHPSIISFLQNVSSTWTTRIRLKTKENTLETESIKIKRGIFQGDALSPLWFCLALNPLSNILNSIDKGYLLQYYTPEHVTMYHKTNINHLLYMDDLKLYASTQSDLEHLIETTERFSTDICMNFGINKCKINSFKAGIHCEHQHELQAGEIINSLEENKAYKYLGYNQSKIIHYKETKNILTQEFKQRLNSILKSKLNSRNMIKAINTFTIPILTYSFGVIHWTKTELLKLQRTINVNLGKNRKHHPRACVQRMTLPRIEGGRGIIDIYNLHNKQIANLRHYFHEQAKTSILHKVVAYNDCKFTPLNLYDKETQRNEKEIENNIKIDAWERKELHGRHKKELNQSHIDKVASNAWLTFGNLFPETEGFMQAIQDQVIKTRNYNKHIVKLKNITDICRKCNKATETIQHITGACSSIVQTDYKYRHDQVVQIIHQKLAIQYRLITDPPTPYYKYKPKTILENDTYKMYYDRAILTDKTVHYNRPDITLIDKSNKT

SEQ ID NO: 20733 - protein, 1388 aa, Pyrrhopyge pelota
MKNLIEKKVYNLRPRLQARRATPGVNTISSQKDNTNIESNNRFERVVSDDEESKTESNASLYSAPTDTSLASLSASTVSVASSATMSPIITSCQKMLTHKANNSLRPGDVAQTAVSANLSVPTTGSRKRKKWTIEMNQFILRDYLYLTKMETETFNYLQPLHSNFVDRFPDMTVSRQRLGDQRRAIIRNKLLSQEIIDNIYDEVQTNLRTTQITTQPLNPNSNDNIAPIQNKRIKWSTEYNETIIRAYYRITNMEINKTDYRKQLHQDFIKTFPHLSHVSEQRISDQRRIIINSNRIKPERLETIKQEVADELKLSTSEVRRKKERQTYTCVESGESSDIILVSDNNINESTVPDTIINLDKNNSCSVELSTEIQNLFKQSLDFYNSITPTKRCFIPKQKISKHFNIVVNYINSNILPKFINQYTNFTKLHTIIYCAAWTAAKINGTKLTIPPKIPSEKKVNNLNPKWQIRLGKKVANLRTKIGRLTQYIQGNKSTKNTKHINIILESYKIHTKHEEVNTELNQFLDTLKQKLAVTASRLRRYKMCNLRKTQNNQFVKNEKEFYRSLKNNTNGKNVDVSPTTDSIINFWSSVWEKPICHNNRSSFINTETESHSRIENMTFESITMETLQEVLKNLHNWKAPGSDHVHNFWYKKFTYIQPFILNHINNFIKNPTKLPQFLTEGITYLLPKDFDDLTNPAKYRPITCLQTMYKILTSCLSLSIYKHLENNRILTEQQKGCRKFSKGCKEQLVIDSVILQQAHKKKKDLYTVYIDYAKAFDSVPHSWLMKVLEIYKIHPSIISFLQNVSSTWTTRIRLKTKENTLETESIKIKRGIFQGDALSPLWFCLALNPLSNILNSIDKGYLLQYYTPEHMSMYHKTNINHLLYMDDLKLYASTQSDLEHLIETTERFSTDICMNFGINKCKINSFKAGMHYEHQHELQAGEIINSLEQNKAYKYLGYNQSKIIHYKETKNILTQEFKQRLNTILKSKLNSRNMIKAINTFTIPILTYSFGVIHWTKTELLKLQRTINANLGKHRKHHPRACVQRMTLPRIEGGRGIIDIYNLHNKQIANLRHYFHEQAKTSILHEVVAYNDCKFTPLNLYERETQRNEKELENNIKIDAWERKELHGRHKKELNQSHIDKVASNAWLTFGNLFPETEGFMQAIQDQVIKTRNYNKHIVKLKNITDICRKCNKATETIQHITGACSSIVQTDYKYRHDQVVQIIHQKLAIQYRLITDPPTPYYKYKPKTILENDTYKMYYDRAILTDKTVHYNRPDITLIDKSNKTALIIDVAIPNTHNLKHSISEKLTKYIELKDEIIRMWRLQKVSIVPIVLSSTGVVPKLLHASLKTINISHYTYLTLQKAVILNTCRIVRKFLQIDTHINIV

SEQ ID NO: 20734 - protein, 1376 aa, Pythonides amaryllis
MVIMTDYEVKKTETQKTYNLRPLTKARQVAPGVKSRQSSEEEYIHGESNKKHDNPIANEESLDSDSTSSFSCHTSTLGSHHSSPIPSNSPSSISSSTSSRAQENVARTANLANSSVPITCTNTRKKWTNEMNQFILRTYLYLTKVDTETNTYLQPLHSKFVEKFPNMIVSRQRVGDQRRAIIRNKLLPQETIDSIYNEVRSNLQTTQDTTHVQTPHQLTGNTHTAGQRMKWTDEYNETIMRAYYKITKLETNKTDYRKQLHQEFIRIFPHLSHISEQRISDQRRVIINNKRLTRERIEIIKVEVANELKINNNTEVENQTEEITHTQDRNIDVESENNVEVINTIIPHTDLSDLTEDIKIKIQETFKIALDYYTNTEPTKRSYIPRQKITKTLYKIVTYIDIDILPKYVNTNTDFSSLHTAIYCAAWAAAKTNGAKLTLQPTLNNQNINNRKPKWQTRLEKRVLDLRTKIGRLTQFMKGHRSTNLTKHVNTILQNYKIHTTHDETNTDLAQFLDTLKQKLTVAASRLRRYKTCSLRKTQNNQFVRNEKQFYRALNNNVTLEKKDEQPSAYSLKAFWSDVWEKSVQHNNEASWIKSEIENHCNVTPMQFEFITGNVFKEVLRNLHNWKTPGSDHIHNFWYKKLKYIQPLLYNHFNNFINNPTCIPKFITQGTTYLLPKDFEDLSNPAKYRPITCLQTVYKILTSCITETIYKHLEDNHILTEQQKGCRKFSQGCKEQLVIDSVILQHAHKNKEDLYSGYIDYAKAFDSVPHSWLFKVLEMYKIHPAIISFLQNIASSWTTLLHVKTKNTTIDTETIKIKRGIFQGDSLSPLWFCLSLNPLSNLLNSTKKGYLLQHGTSTLYTEFRHQDIKVNHLLYMDDLKLYVATENELQDLIRITECFSTDICMNFGIEKCKINSYKAGIHYQYEHELHNMMLIKSLQENDTYKYLGYNQSYLIHNKDTKTLLTQEFKRRLTAILKSQLNSRNLIKSINTYTIPILTYSFGIINWTKSDLIKLQRCIHTNLTKHRKHHPRACFQRMILPRNEGGRGIIDIYNLHNRQITILRNYFHNKSLTSTLHKAIVDNDRKLTPLNLINRETQKNEKIIDNQTKIKEWQRKALHGRHLKDLSQPHIDKAASNAWLTSGDLFPETEGFMQAIQDQVIETRNYNKYIVKLNNSTDICRRCNKSSETIQHITGACSSIVQTEYKYRHDQVVNIIHQKLAIQHHLISDPPTAYYKYQPKTVLENASHKMYFDRAILTDKTVHYNRPDITLVDKINKTAFIIDVTIPNTHNLQSSISEKINKYVELKDEIIRMWRLKTVKIIPVVLSTTGVIPKMLNRSLKSINIPPNTYLTLQKAVILNTCRIVRKFLQTDPETST

SEQ ID NO: 20735 - protein, 1364 aa, Gindanes brontinus
MVIMTDYGIKKTATQKTYNLRPLTKARQVTPRVNSRYSSEGEIYGESNNEHERPIADEEYIVSDSTSLYSCHTSTSSSPIQSNSSPSISSPLSPVQGNVARTAISVESSAPITCTNTRKKWTNEMNQFILRTYLYLTKIDTETNTYLQPLHSKFIEKFPNMIVSRQRVGDQRRAIIRNKLLPQETIDSIYNEVRTNLQTTQITAQAPNHVTTNTHITGQRIKWTDHYNEVIMRAYYRITKLETNKTDYRKQLHQEFIRIFPHLSHVTEQRISDQRRVIINNKRLTRERIETIKLEVAEELKANDTVVENHYEENTHNIDANINLVDSENNIEFLNGINLHVNSHELTEKIKTKMQETFKSALEFYSNTEPTKRCFIPRQKFTKTLHKIIDYIDSEILPIYVNNSTDFSSLHTAIYCAAWTAAKTNGTKLTLHPTPHKLNNTPVKPKWQTRLEKRILDLRTKIARLTQFINGNRTTNIRKHVNTILQNYKIHTSHDETNTDLTEFLDTLKQKLSVTASRLRRYKTCTLRKTQNKLFLKNEKQFYRSLNNSRTFPKTKDQPLADILKSFWSGVWEKSVDHNNEAGWIKDETEKHSYIEPMQFQFITGAEFQEVIRNLHNWKSPGSDHIHNFWYKKLKYIQPLLYNHLNNFINNPSSVPEFVTQGTTYLLPKNLEDLTNSANYRPITCLQTVYKILTSCLTQVIYKHLENNQLLTEQQKGCRKHSQGCKEQLIIDSVILQQTHRNKTDLYSVYIDYAKAFDSVPHSWLVKVLEIYKIHPTIISFLQNIASTWSTLLRVATKSTTIDTEPIKIKRGIFQGDALSPLWFCLALNPLSNILNKTDKGFLLKYNTVKTGPQEIKINHLLYMDDLKMYAATENDLRDLIRITESFSEDICMNFGIDKCKINSYKAGLHYQHQHELHNKQILKSLEDNSTYKYLGYNQSNLIHHKHTKTLLIQEFKHRLNAILKSHLISRNMIKAINSYSIPILTYSFGIINWTKSDLTKLQRCIHTNLTKYRKHHPRACFQRMTLPRNEGGRGITDIYNLHNTQITILRHYFHHKSETFTLHKAIVDNDCKLTPLNLHNRGTQRNEKIIDKQTKIKEWQQKALHGRHFKDISQPHIDKAASNAWLSSGDLFPETEGFMQAIQDQVIETRNYNKYIVKANNFTDTCRRCHKSSETIQHITGACSSIVQTDYQHRHDQVVNIIHQKLAIQYRLINDPAIGYYKYQSKSVLENASYKMYFDRAILTDKTVHYNRPDITVFDKINKTAFIIDVAIPNTHNLQSTISEKLNKYAELKDEITRMWRLKTVSIIPIVLSTTGVIPKTLHQSLKSINLSPYTYLTLQKAVILNTCRIVRKFLQTDSGIST

SEQ ID NO: 20736 - protein, 1422 aa, Timochares trifasciata
MNKTRKSRYNLRPLPGGRRGALGAGAECYSMRTIGDGGLNRRVPLEENTTAEIKNLLSYSPSSSLESLFPSLPSSPPSYLDEDNNPSDVSFTPSTVSYTATEDVVQESEDSISTAPAKVSSCARTKCTDKCLSCKFAAPTTSPENHSSQILSYTHSSISPRSQIQEDVAQITIAEDKSVSTTCINKRKTWTPEMNQFILRTYLYLTKLETETDSYLQQLHAKFTLEFPHMLVSRQRVGDQRRAIMRNKMLPQETIDNIYSEVRSNLSSTQFTINTLTDKNSTYTSSQRMKWTVEHNETIMRAYYKITSLETNKIDYRKQLHQEFIKSFPHLSHISEQRISDQRRVIIKNRRLSIEKLQILKQEVERELNSYDTYIHPSTEGTEVTENTSNTLHSNNVDLRIEAQYTIDLQEERKNQVNETFELAFEYYRTVPPTKRCYIPKQKISKDFYTIVKYIDREILPKYINEETDFYLMHTVIYCAAWTAAKINGTKLILPPKAVQNKSKSKPKWQIRLEKKITDLRTKIGRLTQYIRGNRNKNVTKHVNTILESYKIHTKHDEINRDLTHFLDTLKQKLSVTASRLRRYKICNLRKNQNNQFASNEKQFYRSLSNNTSVQSIENCPSIDGLKNFWSSVWEEPVIHNSHSSWIKDENDKYLHLEPMQFNNITAGVFQEVIKKLHNWKTPGSDHIHNFWYKKLTYTQPFLYKYLNNFINDPTKMPDFITQGTTYLLPKDLNDSINPAKYRPITCLQTVYKILTSCLTHTIHKHIETNKILTEQQKGCRKFSQGCKEQLLIDTVILQQVHKNKSNLYTAYIDYAKAFDSVPHSWLLEVLEIYKIHPVIISFLQKTIIKWTTQLRVKTKEHILETEPMSIKRGIFQGDSLSPLWFCLALNPLSNKLNISTKGYSLKHNTTPEIKINHLLYMDDLKLYATTEDDLKDLIKTTECFSKDICMNFGIEKCKLNSYEAGTHFQHQHELECRQVINSLQEQNTYKYLGYNQSNLIHCKDTKYILTEEFKRRLNLILKTHLNSKNLIKSINTYTIPVLTYSFGVINWTKTELIRLQRIIHTTLTKQRKHHPRACYQRMTLPRAEGGRGIIDILNLHNKQITALRSYFHNKALNSTLHKAITHNDRKLTPLNLYSKEIQRNESIITNQSKIGAWEQKAMHGRHLKDLNQTHVDKKASNAWLTLGELFPETEGFMQAIQDQVIETRNYSRYIVKHNNTIDICRKCYKESETIQHITGSCSSIVQTEYKYRHDQVVNILHQKLAFKYHLINDTVPYYKYTPQVILENVSFKMYYDRAILTDKTVHYNRPDITLIDKINKTAFIIDVAIPNTHNLQNTISEKITKYTELKEEIMRMWQLKSVSIVPIVLSTTGVIPKTLHQSLKNIKISPYTYFSLQKAVILNTCRIVRKFLQTDISALPL

SEQ ID NO: 20737 - protein, 1148 aa, Narcosius parisi
MRILCEPINKITKLETNKTNYRKQLHQEFIKSFPHLSHISEQRISDQRRVIINNNRLKKEILEIIKQNVEDELKINYNSETISSSNGIQTDHNINDSSSTRKIISSDIVLPSRVDVNVNMEQDTNDFPEKMCSKIQDTFKLTIDFYKNASPTNHTFIPKQKLTKKFYKIVHYINKIILPKYIGVDTDFNTLHTIIYCAAWTAAKINGTNLTLQPRKSKGYSNHKKPQWQIRLENKVIDLRTKIGRLTQYIRGNRSTNVTKHIDNILTKYKIHTIHEDINKDLSQFLDTLKQKLTVTASRLKRYKACTLRKTQNSQFINNEKQFYRTLRNNTTSQNVTITPTVDTLTNFWSGIWENPILHNIEAKWIQEEIDNNSHVELMQFQAVSIEIFQQVLNNLNNWKTPGSDQIHNFWYKRLTYIQPFLYRYINEFINNPQTMPEFITQGTTYLLPKDLNDLTNPNKYRPITCLQTIYKILTACLAHTIHKHLEKNQILTEQQKGCRKFSQGCKEQLIIDSVILHQVHKNKSDLYSIYIDYTKAFDSVPHSWLLKVLQIYKIHPSIISFFQNTMLTWTTRIRLTTKDDTLETEPIKIKRGIFQGDSLSPLWFCLALNPLSNKLNSMNTGYVLPYCTSEREPNYQNFILNHLLYMDDLKLYASNQSDLNNLINITEGYSIDICMNFGIEKCKINSLKAGLSYQHQHELQSGELINSLQDNTGYKYLGYNQSNLIHYRDTKTLLIEEFKRRLSSVLKTQLNSRNTVKSINTYTIPILTYSFGIINWSKTELLQLQRNINTMLTKNRKHHPRACFQRMTLPRAEGGRGIIDIHNLHNKQITNLRHYFYNRAETSTLHKVISYNDCKLTPLNLYNKESQKHQEITSIKSKIETWKHKALHGRHLNDLNQPHIDKLASNAWLTHGELFPETEGFMQAIQDQIIETRNYSKHIVKRHSTIDICRKCNKSSETIQHITGACSSIVQTEYKHRHDQVVNIIHQKLAIQHQLLTGPSIPYYKYNPKTVLENNSYKMYFDRAILTDKTVHYNRPDITLIDKNNKTVLIIDVAIPNTHNLQNTISEKLTKYIELKEEIMRMWGMKKVNIIPVVLSTTGVIPKVLHQSLKSINISPYTYISLQKAVILNTCRIVRKFLQSDTTKFTQ

SEQ ID NO: 20738 - protein, 1279 aa, Narcosius parisi
MKMKKNTIVKKYNLRPLPRASRVSSDTNVGCSRRKENLSAKSSKRAEKVVTEDEPSSSESNSSLFSSPISSSLSVIDSLPCSSISSLSSSSIQGDVAQMTIPVELTVPTTSINKRRKWTQEMNQFILRTYLYLTKMETETNTYLQPLHYQFTKQFPNMTVSRQRVGDQRRAIIRNKLLSQEIVNSIHSEVQSDLQNTQNSSQQSTSNTSDNIIHRPGQRMKWTQEHNETIMRAYYRITKLETNKTDYRKQLHQEFIKTFPQLNHISEQRISDQRRVIINNNRLQKERLHIIKQEVENELKVTSNSEIISSSSNDIQTDCTICDINNTSSFNMTDNDKVLPTRIQANVSVDQDTNILPVEICNKIQETFKLAIDFYENISPLERTFIPKQKLSKKFYKIVNYIDKIILPKYVNVNTHFDTLHTVIYCAAWTAAKINGTNLTLQPIKPKRCNNLKKPQWQIRLEDKVVDLRTKIGRLTQYIRGNRSTNLTKHINVILEKYKVHTIHEDVNTDLSQFLDTLKQKLTVTASRLKRYKACTLRKTQNNQFLSNEKQFYRSLSSNTTGQNISISPAIDTLRSFWSGIWGDTVLHNSKAKWIHDEIDSNWHIELMQFQSVSMEIFQEVISNLNNWKAPGSDKIHNFWYKRLTYTQPFLYSYINKFINNPQTVPEYITQGTTFLLPKDLNDLTNPSKYRPITCLQTVYKILTACLANTIYKHLETNQILTEQQKGCRKFSQGCKEQLIIDSIILNQVHKNKRDLYSVYIDYAKAFDSVPHSWLLKILDIYKIHPKIIAFLQNTMSIWTTRLRLTTKDDILETEPIKIKRGIFQGDALSPLWFCLALNPLSNKLNSMNTGYLLQCYPSETQPWYQNVKLNHLLYMDDLKLYATSQADLDNLINVAECFSIDICMNFGIDKCKINSLEAGLPYQHQHELQSGELIKSLQDNNAYKYLGYNQSNLIHYRDTKTLLVHEFKRRLSSILKTQLNSRNIVKSINTYTIPILTYSFGIINWTKTELLQLQRNINTMLTKFRKHHPRACFQRMILPRAEGGRGIIDIHNLHNKQITTLRHYFHNKAETSNFHKVISYNDRRLTPLNLYNRETQKHQEINSIKSKIETWKQKALHGRHLKDLNQHHVDKLASNAWLTHGELFPETEGFMQAIQDQVIETRNYSKHIIKRHSIIDICRKCNKSPETIQHITGSCSSIVQTEYKHRHDQVVNIIHQKLAIQHHLLHGPSLPYYKYTPKTVLENASYKMYFDRAILTDKTVHYNRPDITLIDKNNKSAL

SEQ ID NO: 20739 - protein, 1372 aa, Dyscophellus porcius
MRLRSGNKLPQAGTGAIRNGESRPEQSSSGSPTYSGGDTVSQSSAQCNTAADNNHNSIPVVNSPSTSSSISQDSSPTISYPSSCTSSSSSSFVLEDVAQATTLVGTSVPTTSINKRKKWTQEMNQFILRTYLNLTKMETETNNYLQPLHSRFIEQFPHMTVSRQRIGDQRRAIIRNKLLSQEIINSIYNEVRYILQTKQNSTQPSTSTSTSDVTIYRSGQRMKWTQEHNETIMRHYYKITNLETNKTDYRKQLHQQFIKSFPNLSHISEQRISDQSRAILNNNRLTKDRLEIIRQEVSDELKMTSNDETINNNSYIHTDYTASNINNTVNTINNNVTIPDRENFSVNVEQSTNIFSEEMCNRIIKSFKIAIEFFKSISPTERPFIPKQKYSKQFYRIVNYINEIILPKYINIDTDFDTFHTAIYCAAWTAAKMNGTNLTLTSRKPKRISNHVKPKWQSRLENKLEDLRTKLGRLTQYINGNRTNKIIKHINTICQRYKTHTIHEDVNTDLTQFLDTLKQKLAVTASRLKRYRACTLRKVQNNQFISNEKQFYRNLKNISTSQNVHLTPTLDSLTNYWSSIWEQSVSHNGEAKWIQEESQKNSHIELMHVQSVTPEIFQEVLKNVNNWKAPGSDQIHNFWYKKLTYIQPFLYNHINKFINDPQTMPEYITQGTTYLLPKDFNDLTNPAKYRPITCLQTVYKILTACLTHTMYKHLELNQILSEQQKGCRKFSQGCKEQLIIDSVILHQVHRSKTDLYTVYIDYAKAFDSVPHSWLLKILEIYKIHPSIISFLQIIMSTWTTRLRLTTKDDILETEPIKIKRGIFQGDALSPLWFCLALNPLSNKLNSVREGYLLPYCTSQTESVHQNVKLNHLLYMDDLKLYASSQSDLDNLINITEHFSTDICMNFGIDKCKINSLKSGLRHQHQYELQSGELINSLQNNSAYKYLGYNQSNLIHYKDSKTMLIDEFKRRLSSIVKTQLNSRNIVKAINTYTIPILTYSFGVLNWTKAELLQLQRNINTMLTKCRKHHPRASFQRMTLPRVEGGRGIIDIHNLHNKQITILRHYFYNKAEISTIHKAISYNDRKLTPLNLYNTDTQKNQHIVSIKSKIEAWKIKALHGRHLKDLNQPHIDKLASNAWLRYGELFPETEGFMQAIQDQVIETRNYSKYIVKRHNILDICRKCNKSSETIQHITGACSSIVQTEYKHRHDQVVNIIHQKLAIQHNLLNDPPTPYYKYNPKTVLENASHKMYFDRTILTDKTVHYNRPDIILVDKSNKTALLIDVAIPNTHNLQTTISEKLTKYVELKDEILRMWGLKKVNIVPIVLSSTGVIPKALHLSLKSIDLSPHTYVTLQKAVILNTCRIVRKFLQTETL

SEQ ID NO: 20740 - protein, 1242 aa, Autochton potrillo
MKRRKWTQEMNQFILRTYLYLTKMETETNTYLPLLHSQFIKQFPDMTVSRQRVGDQRRAIIRNKLLSQEIINSIYTEVRSHLTTTQSSTQQSTSNISGNTAHIAGQRMKWTQEYNETIMRTYYKITQLETNKTDYRKQLHQEFIKTFPHLSHISEQRVSDQRRVIINSNRLQKERLEIIRQEVEDELKITSNSVLINNNNDIQTDNTTRDINISANQDTHLLPEIISNNIHEAFELAINYYKNTSITERTFIPKQKLSNNFNKIVDYIDKIILPKYINTQTDFNTLHTVIYCAAWTAAKINGTNLTLQPRKFKHSSEYKKPKWQVRLENRIMYLRTNIGRLTQYIIGNRSINVTKHVNTILKKYKVHTIHEDMNTDLSQFLDTLKQKLTVTASRLKRYKACTLRKTQNNQFISNEKQFYRTLKNNTIPQNVNISPTINTLTSFWSGIWEEPVLHNNKAKWIQDEFDNNSHIDLMQFQSVPIDIFQEVLNNLKNWKTPGSDQIHNFWYKKLSYVQPFLYNYINEFIQNPKTMPEYITQGITYLLPKDLNDLSNPTKYRPITCLQTIYKILTACLAHTIYKHLEKNQILTEQQKGCRKYSQGCKEQLIIDSVVLHQVHKNKCDLYSVYIDYAKAFDSVPHSWLLKILEIYKIHPSITSFLQNTMSTWTTRLRLTTKDDTLESEPIKIKRGIFQGDALSPLWFCLALNPLSNKLNSINMGYLFQKRTSERECVQQNLKLNHLLYMDDLKLYASSQSDLSYLINVTECFSVDICMNFGIDKCKINSVKAGLPNQYQHELQSGEFINFLQDNNAYKYLGYNQSNLIHYKDTKTLLIEEFKKRLGSILKTQLNSRNIIKSINTYTIPILTYSFGIINWSKTELLQLQRIVNTMLTRYRKHHPRACFQRMTLPRAEGGRGIIDIHNLHNKQITTLRNYFYNKAESSILHKVISYNDRRLTPLNLYNRETQKCQEIISIKSKIETWKHKALHGRHLKDLNQPHIDRIASNAWLTHGQLFPETEGFMQAIQDQVIETRNYSKYIVKRHSVIDICRKCNKSSETIQHITGACSSIVQTDYKHRHDQVVNIIHQKLAIQYHLLKDPPTPYYKYNPKTVLENSSYKMYFDRAILTDKTVHFNRPDITLIDKINKTALIIDIAIPNTHNLQNTISEKLSKYIELKEEIIRMWGLNKVNIIPVVLSTTGVIPKVLHQSLKSIHISPYTYISLQKAVVLNTCRIVRKFLQTDTTTLT

SEQ ID NO: 20741 - protein, 1369 aa, Telemiades fides
MKPTITKKYNLRPLPRARRIISDTHAEYSRKIERISAKTSNRATPVITDGELTSDNSNVHLNLSPSLSSVSRNSSLTMTYPSSSISSPTSSLIQEDVAQTAKSVDIPVPTTSISKRKKWTQEMNQFILRTYLHLTNMETETNNYLQLLHSQFIEQFPEMKVSRQRVGDQRRAIVRNRLLSQQTINNIYSEVQSNVKVTQIPTQRSTSNTVVAHGSGSRMKWTQEHNEAIMRAYYTITRLETDKTNYRKQLHQEFIKVFPHLSHISEQRISDQRRVIINNNRLQKERLSIIRKEVEDELRRTDNNETITNRDIHTDSTVENLNNTYNIIDNDATYADRTEVNVSTEQNKNNLPEETCNKILESFKIALEFYKYTSPIERSFIPKQKLSKKFYNIVNYINDVILPNYINIDTDFNTLHTIIYCAAWTAAKINGTNLTVPPRLIKQYIHCKKPQWQIRLENKVEDLRTKIGRLTQYINGNRTKKIIKHINIILEKYKIHTVHEDVNRDLSQFLDTLKQKLSVAASRLKRYKACTLRKTQNIQFTNNEKQFYRTLRNNMTSQNITPTIDIMANFWSDVWAKPVLHNNEAEWIQEEFDKNVHVKLMQFKSIPVDIFQEVLKNLHNWKAPGSDHIHNFWYKKLTYIHPFLYNHVNTFINNPQIMPEFVTQGTTYLLPKDSSDLTNPAKYRPITCLQTLYKIVTACLTHTIYNHLETNHILTEQQKGCRKFTQGCKEQVIIDSVILHQIYKNKSDLYSVYIDYAKAFDSVPHSWLLKVLEIYKVHPSIISFLQHTMSSWTTRLRLTMKENTLETNPIKIKRGIFQGDALSPLWFCLALNPLSNKLNSMKSGYLLQYSTPESNSTHQDIKLNHLLYMDDLKLYASNQSDLYSLINITESFSTDICMNFGIDKCKINSLKSGIPYQHQHELQSGEVINSLQDNTAYKYLGYNQSNLIHYKETKNKLKEEFKRRLTSLLKTQLNSRNLIKSINTYAIPILTYSFGVINWTKSELLQYQRIINTMLTKYRKHHPRACFQRMTLPRAEGGRGIIDIYNLHSKQITILKQYFYNKADTSTLHKAISHNDHKFTPLNLCNRETQQNQQTISVKTKTEMWNLKALHGRHLKELNQSHIDKSASNAWLTHGQLFPETEGFMQAIQDQVIETRNYSKHIVKRHNVIDTCRKCNKSSETIQHITGACSAIVQTEYKHRHDQVVNIVHQKLAIQYNLLKDSPTPYYKYNPKTVLENTSHKMYFDRAILTDKTVHYNRPDVVLIDKKNKTALIIDIAIPNTHNLQTTISEKISKYVELKEEIIRMWGLKKVCIVPIVISTTGVIPKSLHLSLKSINISPFTYIIIQKAVILNTCRLVRKFLQTDNLTDV

SEQ ID NO: 20742 - protein, 769 aa, Aurina azines
MQFQSITIEIFQEVLKNLHNWKAPGSDKIHNFWYKKFTYIHIFLYNHINNFIDNPQIMPEYVMQGTTYLLPKNLNDLTNPTKYRPITCLQTVYKILTTCLTHTIYKHLETYQILTEQQKGCRKFSQGCKEQLIIDSVILHQVHKNKTDLHTVYIDYAKAFDSVPHSWLLKVLEIYKIHPLIISFLQYTMSTWTTRLRLTTNDDILETEPLKVKRGIFQGDALSPLWFCLSLNALSNKLNSMDIGYVLQYCISQNESMPQNIKVNHLLYMDDLKLYASSQSDLDKLISITECFSTDIRMNFGIDKCKINSLKLGEPYQHQHELQSGELINCLQDGSAYKYLGYNQSNLIHYKNSKTVLIKEFKRRLSSILKTQLNSRNIVKSINTYTIPILTYSFGVINWTKTELLQLQRSINTMLTKHRKHHPRASFQRMTLPRVEGGRGIIDIQNLHNKQITILRHYFHNKAETSIVHKAISHNDRRLTPLNLYNRQTQKNQQIISMKQKTETWQRKSLHGRHFKDLNQPHIDKLASNAWLRYGELFPETEGFMQAIQDQIIETRNYSKHVVKRHNIIDICRKCNKSPETIQHITGACSSIVQTEYKHRHDQVVNIIHQKLAIQYSLLSEPPTPYYKYNPKTVLENASHKMYFDRAILTDKTVHYNRPDITLIDKNNKTALIIDVAIPNTHNLQNTIHEKLTKYVELKEEIMRMWGLKKVSIIPIVLSTTGVIPKTLHVSLKSIHLSPYIYIMLQKAVILNTCRIVRKFLHTDTTTHT

SEQ ID NO: 20743 - protein, 1395 aa, Zopyrion sandace
MQGSAGVDSIIPMLFTFNMENYFTQPYNLRPLRARRGTPSGNARCSRKKEISNAEDNNHVERSQKDDNISTCESDFSLFSCPTSSSSSYHSLSYPSSSISSPTNSLMQEDVAQLALSVKTTAPTTCIVKRIKWTDEMNQFILRTYLHLTKLNTETNTYLQPLHTKFIERFPHMTVSRQRVGDQRRAIIRNKYIPQETMDQIHNEVRTNLQSIQSSTQASPLIDLTNNTTATTGTRMKWTEEYNETIMRAYYKITRLETNKTDYRKQLHQEFIKTFPHLSHVSEQRISDQRRVIINNNRLTRQKLEEIKREVENQLKISVSDEIENINNIHSNDCDGTLTDTLSHVTITHDEQILNTNVRAYEVVEKIVEEGLSEEKRNKIEETFKVALEYYSQILPVKRCFIPKQTISKSFYVIINFINKVILPKYVNKDIDFSTLHTIIYCAAWTAATMNGTKLTLPPKIKEVHRKAIKSKWQTRLEKKVVDLRAKIGRLTHYINGNRTKNITKHVNCILQNYKVHTNHEEINTDLTHFLDTLKQKLAVAASRLRRYKSCTLRKTQNTKFSRNEKQFYRSLGNSITSDGVNSAPSLDSLKTFWSSVWEEPVIHNNEAPWICKESEKYSHVEPMQFEYITADVFQEVIKNLHNWKTPGSDHIHNIWYKKFTFIQPFLYKIINNFITNPSILPEFVTEGTTYLLPKDSNDLSNPSKYRPITCLQTIYKIITSCLTHTIHKHLEAHQILTEHQKGCRKFSQGCKEQLIIDSIILQQVNKHKRNLHTVYIDYAKAFDSVPHSWLLKVLEIYKIHPTIISFLQNTITTWSTRLRITTNKNTLETEPIKINRGIFQGDSLSPLWFCLALNPLSNKLNSIEKGLTLEYNPSDIEFTHKEIKVSHLLYMDDLKLYAETQHELEELIEVTECFSGDIRMNFGIEKCKINSYIAGVNHQHQHELGSGQCINSLQENDTYKYLGYNQSKLIHYKETKDTLNQEFKRRLTIVLKTQLNSRNMIKAINSYCIPILTYSFGVITWTKNELLKLQRLINTNMTKQRKHHPRACFQRMTLPRAEGGRGIIDITNLHNKQVTVLRNYFHNKSLTSHLHNAIVNNDNKFTILNLNNKNTQKNENILDNQSKIEAWGKKALHGRHLKDLNQAPIDKVASNAWLTKGELFPETEGFMQAIQDQVIETRNYNKHIVKLNNVLDVCRKCNKSSETIQHITGACSSIVQTEYKYRHDQVVNIIHQKLAIQHKLISDPATPYYKYSPKVVLENATHKMYFDRAILTDKTVHYNRPDITLVDKINKTAYIIDIAIPNTHNLQNTISGKLSKYGELKDEILRMWRLKKVSIVPVVLSTTGVIPKSIHQSLKSINLSPYTYLTLQKAVILNTCRIVRKFLQTDTNTPLHNT

SEQ ID NO: 20744 - protein, 1371 aa, Urbanus evona
MKKSTQIKNTYNLRPLPRASRITFGTNAGCGGMREIKGVNSSNHAARVVTDGELSTESNSSLFSSPISSPISYNSPLNSSSSISSTSSLIQEDVAQTTIPVELTVPTTSMNKRRKWTQEMNQFILRTYLYLTKMETETNTYLQALHSQFIKQFPNMSVSRQRVGDQRRAIIRNKYLSQEIINSIYSEVESNLKIIQSPRQQSTPNISNNIKYIPGQRMKWSQEHNETIMRAYYKITKLETNKTDYRNQLHQEFIKIFPQLSHISEQRISDQRRIIINNRRLQEERLNIIRQEVEEELKMTSNNEILRGDNNIQIDHSMNDIDKTCNIISENIELPVRVDSNVSMEQETNIFPEEICNKIHETFKLALNYYKDISPTEHTFIPKQKLTKKFYKIVNYIDKIILPKYIDNNTNFNTLHTIIYCAAWTAAKINGTNLTLQPIKPKHYSDYKKPKWQIRLEEKVADLRTKIGRLTQYIRGNRSTKITKHINTILAKYEVHTIHEEINTDLSQFLDTLKQKLTVTASRLKRYKACTLRKTQNNQFISNEKQFYRSLRSGTTCQNINISPPLDALTNFWSGIWEEPALHNNESKWIHEEIYNNSHVELMQFQSVSIEIFQEVLNNLNNWKAAGSDKIHNFWYKRLTYTQPFLYNHINKFISDPQTMPEYITQGTTFLIPKDLNDLTNPSKYRPITCLQTVYKILTACLAQTIYKHLETNHILTEQQKGCRKFSQGCKEQLVIDSVILSQVHKNKSDLYSVYIDYAKAFDSVPHSWLLKTLQIYKIHPSIISFLEKTMSTWTTRLRLTTKDDTIETEPIKIKRGIFQGDALSPLWFCLALNPLSNKLNSLNTGYILQNNALEEESMHQVLKLNHLLYMDDLKLYASSQSDLHNLINVTECFSIDICMNFGIDKCKINSLQNGLPYQHQHELQSGELINPLQDNSGYKYLGYNQSNLINYKDTKTLLTQEFKRRLASILKTQLNSRNIFKSINTYTIPILTYSFGIINWSKTELLKLQRIINTMLSKYRKHHPRACFQRMILPRTEGGRGIIDIHNLHNKQITTLRNYFYKKAETSTLHKVIAYNDRNLTPLNLHNRETQKRQEIISIQSKIETWKQKALHGRHLKDLNQTHIDRLASNAWLTRGELFPETEGFMQAIQDQVIETRNYSKHIIKRHSVIDICRKCNKSSETIQHITGACSSIVQTEYKHRHDQVVKIIHQKLAAQYHLLNDPVIPYYKYNPQTVLENSSYKMYFDRAILTDKTVHYNRPDITLIDKLNKIALIIDVAIPNTHNLQNTISEKLSKYVELKDEIMRMWGLKKVNIIPVVLSTTGVIPKALHQSLKSINISQYTYITLQKAVILNTCRIVRKFLQTDTTTIT

SEQ ID NO: 20745 - protein, 1400 aa, Eantis tosta
MLGWTVYFPCYYRGLHSKAEYGMKKSTITRKYDLRPLPRARRITPEESVRYMSRRDSNNVQSNRHVQEQISEEETEAERVSFSSASLYSCPTSTSHSLCSSPLLSRPSSSTSSPLTHMMQEDVARTAITVEKSVPTTCTYKRKKWTNEMNQFILRNYLYLTNMETETHTYLQTLHTKFLEQFPNMTVSRQRIGDQRRAIIRNKLLPQETINIIYNEVQSNLESKQLTTQVSVPNFNSTNTTGQRMKWTTEHNETIMRAYYKITELETNKTDYRKQLHQEFIRIFPHLSHISEQRISDQRRVIINNKRITIERLESIKNEVAEELNTMNNNEAEISNYTQTYPLVGNSNSINSIIDNDIELLDTTNLNTNFEQDTNNLTEKKTGEIQEHFKAALEFYSKTPPTERSFIPRQKLSKNFCRVIKYINNIILPKYVNENTDFVSLHTAIYCAAWTAAKVNGTKLVLPPTTLKQSRNNNKPNWQNRLENKITDLRAKIGRLTQYIEGKRTTNITKHVEIILKNYQIHTTHEGINTELTHFLDTLKQKLAVAASRLKRYKTCTLRKVQNGLFHKNERQFYRSLDSSTTSQTVEDSPAIDSLKKFWADVWAGPVSHNREAFWIKEETEKYLQTELMEFEAITGDVFHEVLRNLHNWKTPGSDNIHNFWYKKLTYIQPFLYKHYNLFIKNPKSLPEFVTQGVTYLLPKDLSELNNPAKYRPITCLQTVYKILTSCLTQTIYKHLENNQILTEQQKGCRKYSQGCKEQLVIDSVILQHVHKTKSNLYSAYIDYAKAFDSVPHSWLLKILEIYKIHPLIISFLQNIISTWTTRLRVRTKEDTLETEPIKIKRGIFQGDALSPLWFCLALNPLSNKLNSIDKGFLLQYNTSMSPAMKFEKTVNHLLYMDDLKLYATTEYDLQDLIRITERFTIDICMNFGIEKCKINSYEAGVHYEHQHELEDLQLINSLQEHNTYKYLGYNQSNLIQHKHTKTILTKEFNRRLTAVLKSHLNSRNMIKSINTYTIPILTYSFGVINWTKSELIKLQRSINTNLTKHRKHHPRACFQRMTLPRPEGGRGLIDINNLHNRQITILRNYFHTRAETSNLHEAIIYYDRKLTPLNLNKKHKQTNEHIIENQVKIEAWKKKVLHGRHLKELNQSHVDKTASNAWLTSGNLFPETEGFMQAIQDQVIETRNYRKHIIKLHNVTDICRKCNKSSETIQHITGACSSIVQTDYKHRHDQIVNIIHQKLAFKYNLIKDPPLPYYKYNPKIILENVSYKMYFDRAILTDKTVHYNRPDITVVDKINKTALIIDVAIPNTHNLQNTISEKLTKYTELKEEIIRMWHLKKVNIVPVVLSSTGVIPKTLHQSLKSIKISPYTYLTLQKAVILNTCRLVRKFLQTDNSVSIPAH

SEQ ID NO: 20746 - protein, 1243 aa, Ectomis octomaculata
MNKRKKWTQEMNQFILRTYLYLTNMETETHNYLQSLHSQFIARFPEMTVSRQRIGDQRRAIIRNKLLSKEMINNLHKEVQSDLKSSQIPTQPSTSNTSEITTHTSGQRIKWTQDYNETIMRAYYKITQLETNKTDYRKQLHQEFIKKFPHLHYISEQRISDQRRVIINNNRLSKERLLTIRKEVEEEIKEIGNIEIISSNNEIHAEENTIEININIEQTKKNLPEEMCNKTLELFKSALEFFKYTLPVERPFIPKQKLTRKFKNTVNYIDKIILPKYINIDSDFNSLHTVTYCAAWTAAKVNGTNLKLSPKDLKQNCNRKNPQWQIRLENKISDLRTKIGRLTQYIRGNRTVNVTKHVNIILEKHKIHTIHEDINTDLTQFLDTLKQKLAVTASRLKRYKACTLRKTQNNQFIKNEKQFYRSLRNNGITQNIDISPTIDTLTNFWAGLWEKPVFHNNEAKWIQEEINKNSNIKVMQFESITKEIFQEVLKNLHNWKAPGSDQIHNFWYKKLTYLHPFLYNHINIFINNPLTLPEFVTQGTTYLLPKNLNDPTNPAQYRPITCLQTVYKIMTACLTHTIYKHIESNKILTEQQKGCRKFTQGCKEQLIIDSVILHQVHKNKSDLHSVYIDYAKAYDSVPHSWLLKTLEVYKIHPTIISFLRKVMSTWTTKLRINTKNDTLETNSIKIKRGIFQGDALSPMWFCLALNPLSNKLNSEKPGYLLQYSNNDNGSMHDIKLNHLLYMDDLKLYTTTESDLHNLINITERFSIDVCMNFGIDKCNINSFKSGLPNKYDHEIQSGNLIKSLQDNSAYKYLGHDQSNLIHHKEMKSKLKEEFKRRLTLVLKTHLNSRNIVKSINTYVIPILTYSFGVINWSKSEVLQLQRKINTMLTKHRKHHPRACFQRMTLPRAEGGRGIIDIHNLLNRQITTLREYFYNKAETSTLHRAISHTDIKLTPLNLFDRQTQQNHQIISIKSKIDIWERKALHGRHLKDLNQPHIDKLGSNAWLTYGELFPETEGFIQAIQDQVIETRNYSKHIVKRHSVVDICRKCNKSSETIQHITGACSSLAQTEYKYRHDQVLNIVHQKLAIKYNLLEDPPMPYYKYKPKTVLENESHKLYYDRAILTDKTIHYNRPDVVVLDKKNKTALIIDVAIPNTHNVQNTISEKLTKYVELKEEIIRMWGLKKVSIIPVVISTTGVIPKSLHLSLKSINLSPYTYITLQKAVILNTCRLVRKFLQTDSNITAI

SEQ ID NO: 20747 - protein, 1198 aa, Ridens mephitis
MPTTSINKRRKWTQEMNQFILRTYLYLTKMETETKTYLQSLHSQFIKQFPEMAVSRQRIGDQRRAIIRNKLLSQEIINSIYIEVQSNFNNTQRSTSKISNNTTHIPGQRMKWTQEHNETIMRAYYKITKLETNKTDYRKQLHQEFLKTFPHLSHISEQRISDQRRVIINNSRVHNETLKIIRQEVADELKNTSSSDSDIDTDYNINNNNTCNIIDNSRADLYLNDTNNFPEHICNEILETFNFALDFYRNTTPTERAFLPKQKLSKYFYKIVNYIDKIILPKYIDLNTDFKSLQTVIYCAAWTAAKINGTNLTLQPKEPRANKKYKKPQWEIRLENKVADLRTKIGRLTQYIRGNRSTNVTKHINTILEKYKIHTIHENINTDLSQFLDTLKQKLTVTASRLKRYKACSLRKTQNSQFISNEKQFYRTLRNNTTSQNVNISPTIHSLTNFWSGIWGEPVAHNNEAKWIQEEFDNHSNVELMQFQSVTIEIFQQVLSKLHNWKAPGSDKIHNFWYKKLTYTQPFLYNYINKFISNPQSMPEYITQGTTYLLPKDSSDLTNPAKYRPITCLQTVYKILTTCLTHFIYKHLDKNQVLTEQQKGCRKFSQGCKEQLIIDSVLLHQVHKNKSDLFSVYIDYAKAFDSVPHSWLLKILEIYKIHPLIISFLQNTMSNWTTRLRLTTKDDTLESEPIKVKRGIFQGDALSPLWFCLALNPLSNKLNSITAGYLFQYCTFERESTIHRDFKLNHLLYMDDLKLYASSQSDLNNLINLTETFSTDICMNFGIDKCKINSFKAGLPHQHQHKLQCGDLIDSLQDNNTYKYLGYNQSNLIHYKDTKNILIQEFKRGLTSILKTQLNSRNIIKSINTYTIPVLTYSFGIINWSKTELKQLQRNINTMLTKYRKHHPRACFQRMTLPRAEGGRGIIDIHNLHSKQITSLRHYFYNKADVSNLHKVISYNDRKFTPLNLYNKESQKHQEIISTKSKIETWRSKALHGRHLNDLNQPHIDKVASNAWLRYGELFPETEGFMQAIQDQIIETRNYSKHIVKRHNVIDICRKCNKSPETIQHITGACSSIVQTEYKHRHDQVVNIIHQKLALKYNLLNGPSTPYYKYSPKTVLENASHKMYFDRAILTDKTVHYNRPDITLIDKNNKTAFIIDVAIPNTHNLQNTISEKITKYIELKEEIIRMWGLKKVHKLLKS

SEQ ID NO: 20748 - protein, 1365 aa, Ectomis asine
MKSFFTNRYNLRPLPRASRMTLNTHIGYSRETESISVESSNHAAEVITDDELISDDSNVSIFSSPASSPTSCTTYISPSTSSPRSSLIQEDVAQTAKSADIPVPTASINKRKKWTQEMNQFILRTYLYLTNMENETHNYLQSLHSQFIARFPEMAVSRQRVGDQRRAIIRNKLLSKEIINRIHKEVKSNLKSTQIPTKPSTSNTSENIGYTSGQRIKWTQEYNETIMRVYYKITQLETNKTDYRKQLHQEFIKTFPHLHYISEQRIADQRRIIINNNRLSKERLSSIRKNVEEEIKNTNNIEIMNHNKEIHTNYTETNFNSACGTTENDINIINLDVNIEKSKKGLPEEMCIKIIELFKSSLECFKRTLPVERPFIPKQKLSRKFMNIVNHIDKIILPKYINIDTDFNSLHTMIYCAAWTAAKVNGTKLTLPPKKLTQNCNKKKPHWQIRLENKISDLRTKIGRLTQFIRGNRTMNVTKHVNIIVEKYKIHSIHEDINTDLTQFLDTLKQKLAVTASRLKRYKACALRKIQNNKFINNQKQFYRSLKNSMTPQNIDIGPTIDTLTNFWAGLWEEPVLHNNEAEWIQEEVDKNSNVEVMQFQSVTKEIFQEVLKNLHNWKAPGSDQIHNFWYKKLTYLQPFLYNHINKFINNPLTLPEFVTQGTTYLLPKDLSDTTNPAQYRPITCLQTVYKILTSCLTHSIYKHIESNQILTEQQKGCRKFTQGCKEQLIIDSVILHKVNKNKTDLYSVYIDYAKAYDSVPHSWLLKVLEVYKIHPTIISFLRNVMSTWTTRLRLTTKNDTLETNPIKIRRGIFQGDALSPMWFCLALNPLSNKLNSAEPGYLLQYTTSENGSMHDIKLNHLLYMDDLKLYTSTQSDLYSLINITECFSIDICMNFGIDKCKINSVKSGLPYEHHHELLSGDVINSLQDNSAYKYLGYNQSNLIHYKEIKSKLKEEFKQRLTLVLKTHLNSRNIVKSINTYVIPILTYSFGVINWSKADLLQLQRKINTMLTKHRKHHPRACFQRMTLPRVEGGRGIIDLYNLHNRQVTTLRQYFYNKAETSTLHQAISQSDHKLTPLNLYNRITQNQQIITIKLKLEYWQGKALHGRHLRDLNQPHIDKLGSNAWLTCGELFPETEGFIQAIQDQVIETRNYSKHIVKRHAVIDICRKCNKSSETIQHITGACSSIVQTEYKHRHDQVVNIIHQKLAIKYNLLEDPPTPYYKYKPKTVLENESHKLYFDRAILTDKTIHFNRPDITVLDKKNKTALIIDVAIPNTHNLQNTISEKLSKYVELKEEIIRMWGLKKASIIPVVISTTGVIPKSLHLSLKSINLSPYTYITLQKAVILNTCRIVRKFLQTDSNTTTT

SEQ ID NO: 20749 - protein, 1370 aa, Telegonus anausis
MEKPTELKKYNLRPLPRASRITSGTNAGCSRMGENICVKSSNRAKKVVTEDNLSSTESNVSLFPSPISSPMSYNSLHLVSSSSVSSPTSSLIQEDVAHTTVPVELNVPTASINKRKKWTQEMNQFILRTYLYLTKMETETNTYLQTLHSQFTKQFPNMSVSRQRVGDQRRAIIRNKLLSQEIIDSIYREVQSNLKITQSSRQQSTPNISDNITYIPGQRMKWTQEHNETIMRAYYKITKLETNKTDYRRQLHQEFIKVFPQLSHITEQRISDQRRVIINNTRLQRERLNMIRQEVEEELKMTSNIEILGRDNNVQINNSINDIENTCNIIDDDVIFPVRVDSNVSTERETNLLPEDMCNKIQETFELAIDYFKDVPPTEHTFIPKQKLTKKFHKIVNYIDKIILPKYIDINTNFNRFHTVIYCAAWTAAKINGTNLTLQPLKPKQYSDDKKPKWQIRLEDKVVDLRTKIGRLTQYIRGNRSTKITKHIHTILTKYKVHTIHEEINTDLTQFLDTLKQKLTVTASRLKRYKACTLRKTQNNQFISNEKQFYRYLRNNTTCQNINVSPTIDTLTNFWSGIWEEPALHNNESKWIQEEFLNNSHVELMQFKSLSIEIFQEVLKNLNNWKAPGSDKIHNFWYKRLTYTQPFLYNHINNFINKPQTMPKYVTQGTTFLIPKDLNDLTNPTKYRPITCLQTVYKILTSCLAQTIYHHLETNHILTEQQKGCRKFSQGCKEQLIIDSVILNQVHKNKSNLYSVYIDYAKAFDSVPHSWLLKILHIYKIHPSIISFLQNTMLSWTTRLRLTTKDETIETEPIKINRGIFQGDALSPLWFCLALNPLSNKLNSMNTGYALQSNVSKEEPDLKLNHLLYMDDLKLYASTQSDLHNLIDVTESFSIDICMNFGIDKCKINSLQNGISYQHQHELQSGELINPLQDNDAYKYLGYNQSNLINYKDTKTLLTQEFKRRLASILKTHLNSRNIVKSINTYTIPILTYSFGIINWTKTELLKLQRNINTMLTKYRKHHPRACFQRMTLPRTEGGRGIIDIHNLHNKQITTLRHYFYNKTETSTLHKVIVYNDRSLTPLNLHNTDTQTRQEIVSIQSKIETWKHKALHGRHLKDLNQTHIDKLASNAWLTHGELFPETEGFMQAIQDQVIETRNYSKHIVKRHSVIDTCRKCNKSSETIQHITGACSSIVQTEYKHRHDQVVKIIHQKLATQYHLINDPIVPYYKYNAQTVLENASYKMYFDRAILTDRTVHFNRPDITLIDKNNKTALIIDIAIPNTHNLQNTISEKLTKYVELKEEIIRMWGLKKVNIIPVVLSTTGVIPKTLHQSLKSINISPYTYITLQKAVILNTCRIVRKFLQTDTTTST

SEQ ID NO: 20750 - protein, 1361 aa, Ectomis labriaris
MKSFLATNKQTNRYNLRPLPRASRMSPGTHARCSRETKSISVKSDNHAAGVVIDDELISDDSVSIFSSPTPSSISCNSSLSSIYVSPSTSSPCSSLIQEDVAQTAKSVDIPVPTTSINKRKKWTKEMNQYILRTYLYLTKLETETHNYLQTLHSQFVTRFPEMTVSRQRIGDQRRAIIRNKLLSTEIINSIHKEVQSNLKSTQIPIQSSTSNSSGNTAHTTGQRIKWTQEYNETIMRAYYKITQLETNKTDYRKQLQQEFIKTFPHLHYISEQRISDQRRIIINNNRLSNERLSIIRKEVEEELKMTANIDLMRNNKETHTDSTETNYINNTCGTIDNDINRVELNINIEQSKNDLPEKMRKEIIVVFKSALEFFKNTLPVDRPFIPKQKLSRKFKNIVNHINKIILPNYINIDTDFNSLHTATYCAAWTAAKVNGTNFSLPPKEIKQKCNKKKPQWQIRLENKISDLRTKIGRLTQYIRGNRTMNITKHVNIILEKYKTHTIHEDINTDLTQFLDTLKQKLAVTASRLKRYKACTLRKTQNNQFINNEKQFYRSLRNNTTTQNIDVSPTIDTLTNFWAGLWEEPVLHNNEAEWIQEEMYKNSNVEVMQFQSVTKEIFQEVLKNLHNWKAPGSDQIHNFWYKKLTYLHPFLYNHINKFICDPLTLPEFVTQGTTYLLPKDLSDPSNPGQYRPITCLQTIYKIMTACLTHTIYKHIELNQILTEQQKGCRKFTQGCKEQLIIDSVILHQVHKNKTDLHSVYIDYAKAYDSVPHSWLLKILEIYKIHPTIISFLRNVMSTWTTRLRLTTKKDTLETNPIKIKRGIFQGDSLSPMWFCLALNPLSNKLNSAKPGYLLKYTAENGSKHDIKLNHLLYMDDLKLYTSTQSDLYDLINITERFSIDICMNFGINKCKINSLQAGLPYKHNHALKSGDLINSLQDNSAYKYLGYDQSNLIHYKEIKIQLKEEFKRRLNLVLKTHLNSRNIVKAINTYIIPILTYSFGVINWSKSELLQLQRKINTMLTKHRKHHPRACFQRMTLPRAEGGRGIIDIYNLHNRQITTLRQYFHNKAEISTLHLAISHSDHKLTSLNLYNRQTQQNQQINSIKSKIENWERKALHGRHFKDLNQPHIDKLASNAWLTHGELFPETEGFIQAIQDQVIETRNYSKYIVKRHSVIDICRKCNKSSETIQHITGACSSIVQTEYKYRHDQVVNIIHQKLAIKYNLLKDPPTPYYKYKPKTVLENESHKLYFDRAILTDKTIHYNRPDVTVLDKKNKTALIIDVSIPNTHNLQNTISDKLTKYIELKEEIIRMWGLKNVSIIPVVISTTGVIPKSLHLSLKSINLSPHTYITLQKAVILNTCRL

SEQ ID NO: 20751 - protein, 1391 aa, Cephise aelius
MSPAVTILIMKTHRETTTKENTKEKKYNLRPRPTASRITPVSNVGCSRIGEIICEKSDTRTKRVVTDDDVSITESNVSLFSSPHSSPISYNSSPITSYPSPSTSSTCDNVIQEDVAQAATSADITVPTTCINKRKKWTLEMNQFILRTYLYLTKMETETNDYLQRLHSQFIQQFPNMIVSRQRVGDQRRAIMRNKLLPQKIISSIYSEVQKSLDITQISTHQSKSKVVRNPSHIPGKRMKWTDEHNETIMRAYYTITNLETNKTDYRKQLREEFIKTFPHLSHTSEQRVSDQRRVIIKNNRLTKDRLTIIRQEVANELQITRNSEILSTNNNIYTGYATPDSNNECNTIDDHIICSSGEDLNINAEQDTNNLPEDLCNKIQESFKLAVEFFKNTSPTSRSYIPKQKFSKCFYKIVHYIDKIILPNYININTDFNTLHTVIYCAAWTAAKINGTNLKLSPTKPTRLSIKKKPEWQVRLENKVADLRSKIGRLTHYINGNRTIKMTSHINTILAKYKVHTVHEEVNTDLSHFLDTLKQKLAVTASRLKRYKACTLRKSQNNQFVKNEKQFYRNLKHQITSQNVNTSPTIDTLRNFWSDIWEKTVLHNSEAKWIEDELNKNSHIEVMQFQSISIEVFQEVLKNLNNWKAPGSDQIHNFWYKKLTCAQPFLYNYINKFINNPQTMPEYVTQGTTYLLPKDLKDLTNPAKYRPITCLQTVYKILTSCLTRSIYEHLEKNQILTEQQKGCRKSSQGCKEQLIIDSVILHQVQKKKTDLYSAYIDYAKAFDSVPHSWLLKVLEIYKIHPVIISFLQNTMLTWATRLRLTTEDNTLEPVKIKRGIFQGDALSPLWFCLALNPLSNQLNSRDTGYLLQYSSENESFHQNIKLNHLLYMDDLKLYASSQSDLYNLINLTERFSTDIGMNFGIDKCKINSLKSGQPYQLQYELQSGEVIDFLQENSAYKYLGYNQSKLIHYKDTKIVLIQEFKRRLNSVLKTQLNSRNIIKSINTYTIPILTYSFGIIKWSKTELLQLQRNINTMLTKHRKHHPRACFQRMTLPRAEGGRGIIDINNLHNKQIALLRHYFHNKAKTSILHKTISCNDRKLTPLNLYNVEVQSNQHLISMKSKLETWKHKALHGRHLKDLNQPHIDRLASNAWLKYGELFPETEGFMQAIQDQVIETRNYSKHIVKRFSIVDICRKCSKSTETIQHITGACSSIVQSEYKHRHDQVVNIIHQKLAIQHKLLQEPSTPYYKYSPKTVLENASYKMYFDRAILTDKTVHYNRPDITLIDKNNKSALIIDVAIPNTHNLQNTISEKLTKYVELKDEIIRMWGLRKVNIIPVVLSTTGVIPKALHLSLKSINISPYTYITLQKAVILNTCRIVKKFLQTDITSMTSP

SEQ ID NO: 20752 - protein, 1041 aa, Euriphellus phraxanor
MTGRSETISTNNDIHTDYTTKDTNNTYIAINNNTIFSDKEDLNVNTDNFPDEMCNKIKELFKVATEFFRNTSPTERPFIPKQKYSKKICKIVEYINRIILPMYINMDTDFNTFHTIIYCAAWTAVKTNGTNLTLTPRKPKRYIHEKPQWQIRLEKKVEDLRTKIGRLTQYINGNKTNNIIKHINSILTKYKIHTIHEDVNTDLTHFLDTLKQKLAVTSSRLKRYKACTLRKIQNTQFSSNEKQFYRTLSNNATSQSVNISPTLESITNYWSSIWEKPVLHKIDATWIQEEIQINSHLELMQFQTVTTQIFQEVLKNLNNWKAPGSDQIHNFWYKKLTYIQPFLYNHINNFINNPQTMPGYITQGTTYLLPKDFNNLIDPSKYRPITCLQTVYKILTACLTHTIYKHLELNQILTEQQKGCRKFSQGCKEQLIIDSVILHQVHRNKTDLHTVYIDYAKAFDSVPHSWLLKVLEIYKIHPTIISFLQTTMTTWTTRLRLTTKDDTLETEAIKVKRGIFQGDALSPLWFCLALNPLSNKLNSMDTGYLLKHSSFVTDSMQQNIKLNHLLYMDDLKLYASNEFDLDNLINITEHFSRDICMNFGIDKCKINSLKAGLPHQRQYELQSGEIINSLEYNNAYKYLGYNQSNLIHYKDSKTMLIEEFKRRLTSILKTQLNSRNIVKSINTYSIPILTYSFGVISWTKTELLQLQRNINTMLTKHRKHHPRASFQRMMLPRAEGGRGIIDIHNLHNKQITTLRHYFHNKAETSILHKAISHNDRRLTALNLYNREIQKNQHIISMKSKIQAWQQKILHGRHLKDLIQPYIDKFASNAWLRFGELFPETEGFMQAIQDQVIETRNYSKHIIKRHNIIDICRKCNKSSETIQHITGACSSIVQTEYKHRHDQVVNIIHQKLAIQYCLLSDAPVAYYKYKPKAILENSSHKMYFDRAILTDKTVHYNRSDITLIEKITKYVELKEEILRLWGLKKVNIIPIGLSTTGVIPKSLIYLLSPLICHITHTLFYRKQLFLIHIVEYSENFYKLTTD

SEQ ID NO: 20753 - protein, 1261 aa, Ectomis pervivax
MTETESMNAKSYNRVATGLTDNELTSDDSNISLFSSSTPSLIMSHQSTSSPLSSITQEDVAQTANLVNITVPTNCINKRKKWTQEMNQFILRTYLYLTNIEADTNNYLQSLHSKFIEQFPEMTVSRRVGDQRRSIVRNKLLSQEIINNIYSEVQTNLNKKNHRPLSVTDYSENTTHTSRQRMKWTQEYNETIMRSYYKVTKLETNKTDYRKQLHQEFIKTFPHLSHISEQRISDQRRVIINNNRINKERLSIIRKEVEEEIKMTVNNESISDNEDIHPDNTDRDINGICNTIDNDIIHTDRIELNLNTAQHKNYFPEEICDEILESFNSALEFFKNTSPVERAFIPKQKLSKKFDNIVNYIDKIILPNYINIDTDFNTLHTVIYCAAWTAAKTNGTNLTLPIKKPNLMITLKKPRWQIRLENKVSDLRTKIGRLTQYIKGNRTKNITKHIDTILEKYKVHTIHEIVNTDLSQFLDTLKQKLAVTASRLKRYKACTLRKTQNNQFIKNEKQFYRALSTNATSQNVNISPTIDTLKQFWSGLWEEPVIHNNDAKWIQEEFDKNFNIESMQFQLVTIELFQEVLKNLHNWKAPGSDQIHNFWYKKLIYTQPFLCNHINKLINNPQTIPVFVTQGTTYLLPKDLSDPTNPSKYRPITCLQTVYKILTTCLTHIIYKHLESNKILTEQQKGCRKFSQGCKEQLIIDSVILHQVHKNKSDLFSVYIDYAKAYDSVPHSWLLKILDIYKIHPTIISFLRNIMLTWTTRLRLTTENGTLVTEPIKIKRGIFQGDALSPLWFCLALNPLSNSLNSLKLGYPLQYYTENESRHPDIKLNHLLYMDDLKLYASNQSDLCSLINITERFSTDICMNFGIDKCKINSFKLGFPHQHYHELQSGELIKSLQDNSAYKYLGIDQSNLIQYKDVKNKLKEEFKRRLTLILKTQLNSRNIIKSINSYVIPILTYSFGVIKWTKSELLQLQRKINAMLTKHRKHHPRSCFQRMTLLRAKGGRGITDIHNLHNKQITTLRHYFYNKAETSILHKAITHNDHKFTPLNLNNKEIQLNQQLISDKSKIEIWESKALHGRHLKDLNQPYIDKLASNTWLRYGELFPETEGFMQAIQDQVIETRNYSKHIVKRHTVIDLCRKCNKSSETIQHITGACSSIVQTEYKHRHDQVVNIIHQKLAIQHNLSNDPPTPYYKYKPKTVLENASHKIYFDRAILTDKTVHYNRPDVIVVDKKNKTALVIDVAIPNTHNLQNTISEQTERKK

SEQ ID NO: 20754 - protein, 1369 aa, Ectomis labriaris
MKPFLINKYNLRPIPRANRMTPDIRVGCSRKTKTMSAKSDKRVATEVTDNESTSDDCIISLFSSSTPSLIMSQPSTSTSPRSSIIQEDVAQTANSVDIPVPTTCTNKRKKWTQEMNQFILRTYLYLTNLETDTNNYLQSLHSQFIEKFPEMTVSRQRVGDQRRSIVRNKLLTQEIINNIYSEVQTNLNKKYPKPLSTTDISEKNTDTSNQRMRWTQEHNETIMRSYYKVTKLETNKTDYRKQLHQDFIKTFPHLSHISEQRISDQRRIIINNNRIKQERLSSIRKEVEEELNLVINSEIISKNEDIHTDNTDKDINNVCNIIDNDILPSERIELNLNTAQNKNYLPEEICNKILESFKSALEFFTNTSPTERVFIPKQKLSKKFDSIVNYIDKIILPKYINIDTDFITLHTVIYCAAWSAAKTNGTNLVLPHKKPKPNSNCKKPRWQIRLENKVSDLRTKIGRLTQYIRGNRTKNITKHIDTILEKYKVHTIHENVNTDLTQFLDTLKQKLAVTASRLKRYKACTLRKTQNNQFIKNEKQFYRALRTNATSQNVNISPKIDTIKQFWAGLWEKPVMHNNDAKWIQEECDKNLHIEFMPFQSVTIAILQGVLKNLHNWKAPGSDQIHNFWYKKLTYAQPFLCNHINKLINNPQTIPEFVTQGTTYLLPKDLSDLTNPSKYRPITCLQTVYKILTTCLTHIIYKHIESNQILTEQQKGCRKFSQGCKEQLIVDSVILRHVHKNKTDLFSVYIDYAKAYDSVPHSWLLKTLDIYKIHPTIISFLRNIMPTWTTRLRLMTEDGILVTDPIKIKRGIFQGDALSPLWFCLALNPLSSRLNSVKLGYSLQYFTENEFSQADIKLNHLLYMDDLKLYASNQSDLCSLINITERFSTDICMSFGIDKCKINSLKSGIPHQYYHELQSGELINSLEGNNAYKYLGYDQSNLIHCKDIKNRLKEEFKRRLTLILKTQLNSRNIVKSINSYTIPILTYSFGVIKWTKSELLQLQRRINTMLTKHRKHHPRACFQRMTLPRAKGGRGIIDIHNLHNKQVTTLRHYFYNKAETSTLHKAITYNDHRFTPLNLNNKGIQLNQQITSVKSKLEIWERKALHGRHIKDLNQPHIDKLASNAWLRYGELFPETEGFMQAIQDQVIETRNYSKHIVKRHTVIDLCRKCNKSSETIQHITGACSAIVQTEYKHRHDQVVNIIHQKLAIQNNLLNDPSTPYYKYKPKTVLENASYKMYFDRAILTDKTVHYNRPDIIVVNKKNKTAFIIDVAIPNTHNLQNTISEKPTNISLSHLSDKNIGHIFRTQITIQYFKHTHNRKNRTNPSNSNKQGEALTWQKVCLDISWCGNKSLPYHMRSSNILQCFVNFN

SEQ ID NO: 20755 - protein, 1371 aa, Quadrus cerialis
MAIMADHEMKKTATQKTYNLRPLKARQVATRVNTRYSEEEISRGEPNNNHERPTANEESFESDSISLLSYPTSSSQSHYSSPIQSFSSSSLSSSPISLVQENVARTAILVENPVPITCTNTRKKWTNEMNQFILRTYLYLTKVDTDTNSYLQPLHSKFLENFPNMTVSRQRVGDQRRAILRNKLLPQETIDSIYNEVRSNLQNTQSTTQALTVDRLTANTHITGQRMKWTNDYNETIMRIYYRITKLETNKTDYRKQLHQEFTRIFPHLSHISEQRISDQRRVIINNKRLTREQIEAIKLEITEELKATNNSEEEQYCENVANNQDRNINVNSENAYEFLNRTLHPNPGDLPEETKTKIRETFKTAFEYYIDTEPTKRSFIPRQKTTKTLYKILAYIDDEILPKYVNANTDFLSLHTAIYCGAWTAAKTNGTKLTLQPASPYQNNTPRKPKWQIRLEKRVLDLRTKIGRLTQFINGNRTTNICKHVNTILQNYKIHTNHEETNTDLAQFLDTLKQKLTVAASRLRRYKTCTLRKIQNSQFIKNEKQFYRSLNNNITIQKDDDQPSADSLKTFWSGVWGKSVQHNSEASWIEDEIEKHRNVKSMQFQCITGEVFHEVLRNLHNWKAPGSDHIHNFWYKKLKYIQPLLYNHFNNFINNPSSVPKFITQGITYLLPKNFDELCDPAKYRPITCLQTVYKIMTSCLTQTIYKHLESNHILTEQQKGCRKFSQGCKEQLVIDSVILQQAHKYKKDLYSVYIDYAKAFDSVPHSWLLKVLEIYKIHPTIISFLQNIASTWSTLLRVKTKNITIDTAPITIKRGIFQGDALSPLWFCLALNPLSNLLNSSRKGFILQSYASTVESRHQEIAINHLLYMDDLKLYAATENELQHLITITDCFSIDICMNFGIEKCKINSYRAGIQYQHQHELHNTQLIESLQQNDTYKYLGYNQSKFIHIKDTKTHLIQEFKRRLTAILKSQLNSRNMVKSINTYTIPILTYSFGVINWTKSDLIRLQRCIHTNLTKYRKHHPRACFQRMILPRNEGGRGIIDIHNLHNKQITILRNYFYEKSVNSTLHDAIVNNDRKLTPLNLNNKETQKNETITDNQTKLRQWQQKALHGRHLKDLNQPHIDKAASNAWLTCGDLFPETEGFLQAIQDQVIETRNYSKYIVKSNNVTDICRRCNKSSETIQHITGACSSIVQTEYKHRHDQVVNIIHQKLAIQHRLISDPPLAYYKYQPKTVLENTSHKIYFDRAILTDKTVHYNRPDIIIIDKINKTAFIIDIAIPNTHNLQSTISEKINKYVELKDEIIRMWRLKTVSIIPIVLSTTGVIPKILHRSLKSINMSSHTYITLQKAVILNTCRLVRKFLQTDPESPP

SEQ ID NO: 20756 - protein, 935 aa, Pyrrhopyge haemon
MCTLRKTQNNQFDKNEKEFYRSLKSNTNAKNVDVSPTIDSITNFWSSVWEKPIFHNNRSSLINTETESHSRIENMTFESITMETLQEVLKNLHNWKAPGSDHVHNFWYKKFTYIQPFILNHINNFIKNPTKLPQFLTEGITYLLPKDFDDLTNPAKYRPITCLQTMYKILTSCLSLSIYKHLENNRILTEQQKGCRKFSKGCKEQLVIDSVILQQAHKKKKDLYTVYIDYAKAFDSVPHSWLMKVLEIYKIHPTITSFFQNVSFTWTTRIRLKTKENTLETESIKIKRGIFQGDALSPLWFCLALNPLSNILNSIDKGYLLQYYTPENVSMYQKMNINHLLYMDDLKLYASTQSDLEHLIETTERFSTDICMNFGINKCKINSLKAGIHYEHQHELQTGEIINSLEENKAYKYLGYNQSKIIHYKETKNILTQEFKKRLNSILKSKLNSRNMIKAINTFTIPILTYSFGVIHWTKTEFLKLQRTINVNLGKHRKHHPRACVQRMTLPRIEGGRGIIDIYNLHNKQIANLRHYFHEQAKTSILHEVVACNDCKFTPLNLYDKETQRNEKEIENNIKIDAWEQKELHGRHKKELNQTHIDKVASNAWLTSGNLFPETEGFMQAIQDQVIKTRNYNKYIVKLKNITDICRKCNKATETIQHITGACSSIVQTDYKYRHDQVVQIIHQKLAIQYRLITDPPTPYYKYKPKNILENDTYKMYYDRAILTDKTVHYNRPDITLIDKSNKTALIIDVAIPNTHNLKKTISEKLTKYIELKDEIIRMWRLQKVSIVPIVLSSTGVVPKLLHASLKTINISHYTYLTLQKAVILNTCRIVRKFLQSDSLTYIYLNIISLCFITYTITFPIQYPSYVAHLVYAREYRKAPIYQFESRFVNIDNYNNNNNHHHHLSPLLDIGLSKERHRALSSACLTLIVLFRMLM

SEQ ID NO: 20757 - protein, 1384 aa, Jonaspyge jonas
MKKLIEKKVYNLRPRFNARRETPGINAISSQKEDTNVESNNRIERLVTDDECSKNESSGTLFSSSSNTSLTCLSSSTLSVVSSTTTSPIASHEKIPKHKANNTLRPEDVAQTAVSASLSVPTTGSSKRKKWTKEMNQFILRNYLYLTKMETETINYLQPLHTNFIERFPDMTVNRQRLGDQRRAIIRNKLLSQEIINDIYNEVQTNLQTTQTPIQSLTSDCTVNKTPIKKQRMKWSTEYNETIMRAYYRITNMEIDKTDYRKQLHQDFIKTFPYLSHVSEQRISDQRRVIINSNRIKPERLEVIKQEVADELKVSNSETTRKKEIRAYAFAESVESSDIIRVRDNKINKANGQDTTINLEKNTNCSVEISNDIQNLFKQSLDFYNNIIPTKRCFIPKQKTSKHFNIVINYINSNILPKFINQYTDFTTLHTIIYCAAWTTAKINGTKLTIPPKILSEKKVNNLNPKWQIRLEKKVADLRTKIGRLTQYIQGNKSTKNTKHVNAILENYKIHTKHEEVNTELIQFLDTLKQKLAVTASRLRRYKMCTLRKTQNNQFARNEKEFYRSLKNNTNAKNVDVSPTADSITNFWSSVWEKTILHNSRSSLINVETESHLRVEHMPFESITMEILQEVLKNLHNWKAPGSDHVHNFWYKKFTYIQPFILQHINNFIKNPTKLPQFLTEGITYLLPKDFDDLTNPAKYRPITCLQTMYKILTSCLSQSIYKHLENNSILTEQQKGCRKFSRGCKEQLVIDSVILQQAHKKKRDLYTVYIDYAKAFDSVPHSWLIKVLEIYKIHPSIISFLQNISSTWTTRIRLKTKNNTLETEPIKIKRGIFQGDALSPLWFCLALNPLSNNLNSINKGYLLQYYPPENALRYQKTNANHLFYMDDLKLYASTQSDLEHLIETTERFSTDICMNFGINKCKINSFKAGIRYDHQHELHTGEIINSLEENKAYKYLGYNQSKIIHCKQTKNILTQEFKHRLNSILKSMLNSRNMIKAINTFTIPILTYSFGVIHWTKTELLKLQRCINVSLGKHRKHHPRACVQRMTLPRVEGGRGIIDIYNLHNKQIANLRHYFHEKAKTSIMHEVVAYNDHKLTPLNLYDKEIQINEKEIDKYIKIDAWERKILHGRHKKELNQSHIDKAASNGWLTSGNLFPETEGFMQAIQDQVIKTRNYNKHIVKLKNITDTCRKCNKASETIQHITGACSSIVQTDYKYRHDQVVQIIHQKLAIKYRLITDPPTPYYKYKPKNVLENDTYKMYYDRAILTDKTVHYNRPDITLIDKNNKTALIIDVAIPNTHNLKNTISEKLTKYIELKDEIVRMWRLQKVSIVPIVLSSTGVVPKLLHASLKTINIPHYTYLTLQKAVILNTCRIVRKFLQSDFVT

SEQ ID NO: 20758 - protein, 1383 aa, Yanguna cosyra
MNKPIKKKVYNLRPRLQARRETPDINTISSQKDVTNVESNNRIERLVSDDEDSKSESNASLFSSPSHTSLTYFSSSTLSEASSATMSPITSHQKMLTHKANSSLRPEDVAQTAASANLSVPTTGSSKRKKWTKEMNQFILRNYLYLTKIETETSNYLHPLHSNFIERFPDMKVSRQRLGDQRRAIIRNKLLSQEIIDDIYDEVQTNLRTTQTPTQALNPNSTVNKTPIQNKRIKWSTEYNETIMRAYYRITKMEINKTDYRKQLHQDFIKIFPHLSHLSEQRISDQRRVIINSNRIKPERLETIKQEVAEELKLSTSEIRRKKEMQTYVCAENVESSDITLVRDININASAGPNTIHLEKNKNCSVELSNEIQNLFEQSLDFYNSITPTKRCFIPKQKISKHFNIVVNYINSNILPKFINQYTNFTKLHTVIYCAAWTAAKINGTNLTIPPKIPSEKKVNSLNPKWQIRLEKKVSDLRIKIGRLTQYIQGNKSTKITKHINIILESYKIHTKHEEVNTELNQFLDTLKQKLAVTASRLRRYKMCTLRKTQNNQFVKNEKEFYRSLKSNTNVKYVDVSPTTDSIASFWSSVWENPIFHNNRSSLINAETESHSRIENMPFETMTMETLQEVLKKLHNWKAPGSDHVHNFWYKKFTYIHPFILNHMNNFIKDPTKLPQFLTEGITYLLPKDFDDLTNPAKYRPITCLQTMYKILTSCLSLSIYKHIENNRILTEQQKGCRKFSKGCKEQLVIDSVLLQQAHKQKKDLYTVYIDYAKAFDSVPHSWLMKVLEIYKIHPIIISFLQNVSSTWTTRIRLKTKDKTLETEPIKIKRGIFQGDALSPLWFCLALNPLSNILNSIDKGYLLQYYTPENVLTYQKTNINHLLYMDDLKLYASTQFDLEHLIKTTERFSTDICMNFGINKCKINSFKAGIHYEHQHELQAGEIINSLEENKAYKYLGYNQSKIIHYKETKNILTQEFKQRLNSILKSTLNSRNMIKAINTFTIPILTYSFGVIHWTKTELLKLQRTINVNLGRHRKHHPRACVQRMTLPRIEGGRGIIDICNLHNKQIANLRYYFHEQAKTSILHEVVTYNDYKFTPLNLYDKETQRNERKIENHIKIDAWERKALHGRHKKELNQSHIDKAASNAWLTSGNLFPETEGFMQAIQDQVIKTRNYNKHIIKLKNITDICRKCNKTPETIQHITGACSSIAQTDYKYRHDQVVQIIHQKLAIQYRLITDQPTPYYKYKPKNILENDTYKMYYDRAILTDKTVHYNRPDITLIDKSNKTALIIDVAIPNTHNLKNTISEKLTKYIELKDEIIRMWRLQKVSIVPIVLSSTGVVPKSLHASLKTINISHYTYLTLQKAVILNTCRIVRKFLQSDSLT

SEQ ID NO: 20759 - protein, 1385 aa, Pyrrhopyge kelita
MKKLTEKKVYNLRPRLQARRATPGINTISSQKNNSNIESNNRFERVVSDDEESKTESSASLYSAPTDTSLASLSASTVSVASSATMSPVIASYQKMLTHKANNSLRPGDVAQTAVSANLSVPTTGSRKRKKWTIEMNQFILRDYLYLTKMETETFNYLQPLHSNFVDRFPDMTVSRQRLGDQRRAIIRNKLLSQEIIDNIYDEVQTNLRTTQITTQQLNPNSNDNIVPIQNKRIKWSTEYNETIIRAYYRITNMEINKTDYRKQLHQDFIKTFPHLSHVSEQRISDQRRIIINSNRIKPERLETIKQEVADELKLSTSEVRRKKEIQTYTCVESGKSSDITLVSVNNINESTVPDTIINLDKNNSCSVELGTEIQNLFKQSLDFYNSITPTKRCFIPKQKISKHFNIVVNYINSNILPKFINQYTNFTKLHTIIYCAAWTAAKINGTKLTIPPKIPSEKKVNSLNPKWQIRLEKKVANLRTKIGRLTQYIQGNKSTKNTKHINIILESYKIHTKHEEVNTELNQFLDTLKQKLAVTASRLRRYKMCTLRKTQNNQFVKNEKEFYRSLKNNTNAKNVDVSPTTDSIINFWSSVWEKPICHNNRSSLINTETESHSRIENMTFESITMETLQEVLKNLHNWKAPGSDHIHNYWYKKFTYIQPFILNHINNFIKNPTKLPQFLTEGITYLLPKDFDDLTNPAKYRPITCLQTMYKILTSCLSLSIYKHLENNRILTEQQKGCRKFSKGCKEQLVIDSVILQQAHKKKKDLYTVYIDYAKAFDSVPHSWLMKVLEIYKIHPSIISFLQNVSSTWTTRIRLKTKENTLETESIKIKRGIFQGDALSPLWFCLALNPLSNILNSTDKGYLLQYYTPEHESMYHKTNINHLLYMDDLKLYASTQSDLEHLIETTERFSTDICMNFGINKCKINSFKAGIHYEHQHELQAGEIINSLEENKAYKYLGYNQSKIIHYKETKNILTQEFKQRLNSILKSKLNSRNMIKAINTFTIPILTYSFGVIHWTKTELLKLQRTINVNLGKHRKHHPRACVQRMTLPRIEGGRGIIDIYNLHNKQIANLRHYFHEQAKTSILHEVVAYTDGKFTPLNLYDKETQRNEKEIENNIKIDAWERKELHGRHKKELNQSHIDKVASNAWLTFGNLFPETEGFMQAIQDQVIKTRNYNKHIVKLKNITDICRKCNKATETIQHITGACSSIVQTDYKYRHDQVVQIIHQKLAIQYRLITDPPTPYYKYKPKTILENDTYKMYYDRAILTDKTVHYNRPDITLIDKSNKTALIIDVAIPNTHNLKHTISEKLTKYIELKDEIIRMWRLQKVSIVPIVLSSTGVVPKLLHASLKTINISHYTYLSLQKAVILNTCRIVRKFLQIDSLT

SEQ ID NO: 20760 - protein, 1244 aa, Azonax typhaon
MNQFILRNYLYLTKMETETNNYLQVLHSEFVKQFPEMDTNRQRLGDQRRAIIRNKLLSEEIINNIYREVELDLQTTQIGTQKLTSNNTLSRSLQQRQRMKWTTEHNETIMRAYYRITKLETNKTDYRKQIHQDFINKFPHLNHISEQRIADQRRVIINNYRLTQERLETIKQEVAEELHAATSEIGKKNDKHAYTPVGNSINPAVTLHKDMNTSDRNINSLRNTIFSEEISNDIKNLFKKALEFNSSIMPTKRSFIPKQKTSKKFYKIVAYINNNVLPQYINDNTNFYTLHTIIYCAAWTAAKVNGTKLTLASQISTKKTANNVNPKWQLRLEEKVKDLRTKIGRLTQYIRGNKTTSITKHVNIILEKYKIHTKHEEINTNLTDFLDTLKQKLAVTASRLKRYKMCTLRKTQNNQFVKNEKKFYRSLKNNITQNLDNIPTMDSLKNFWTNIWEEPVVHNNQSELNNAESKSYLHLEHMKFEAITIEMFQNVLKHIHNWKAPGSDHIHNFWYKKFTYIQPFILNHINNFIRNPTDMPLFLTEGTTYLLPKDFKDLKNPAKYRPITCLQTMYKILTSCLTQSIYQHLESNNILTEQQKGCRKFSQGCKEQLVIDSVILQQAHKNKSDLYTVYIDYAKAFDSVPHSWLINVLEIYKIHPLIITFLQSISSTWTTRLRLNTKDNTLETEPIKIKRGIFQGDALSPLWFCLALNPLSNKLNSIDKGYTLQHHSSEFQLSSEQVKVNHLFYMDDLKLYASTELDLEHLIEATERFSIDICMNFGIEKCKINSSKAGTHYEHQHELHTGDIINSLQENKPYKYLGYNQSKTIHYKHTKTILEQEFKQRLTSILKSQLNSRNMIKSINTYTIPILTYSFGIINWSKTELLKLQRSINTNLSKQRKHHPKACVQRMTLARVEGGRGIIDIHNLHNKQITALRHYFHEKVKTSTLHEAIAYNDRKLTPLNLYDKETQRNEKVIDNKSKIEEWEQKVLHGRHKKELNQPHIDKVASNAWLTSGNLFPETEGFMQAIQDQVIKTKNYCKHILKLNNIIDMCRKCNKAPETIQHITGACSSIVQTDYKYRHDQVVHIIHQKLAIQHRLLTDLPTPYYKYKPKNVLENDSHKIYFDRAILTDKTVHYNRPDITLIDKTNKTALIIDVAIPNTHNLKNTISEKITKYIELKDEITRMWQLKNVSIVPIVLSTTGVIPKSLHASLKTLNISPYTYRTLQKAVILNTCRIVRKFMQNYSLS

SEQ ID NO: 20761 - protein, 841 aa, Pyrrhopyge sadia
MCTLRKTQNNQFVKNEKEFYRSLKNNTNAKNVDVSPTTDSIINFWSSVWEKPICHNNRSSLINTETESHSRIENMTFESITMETLQEVLKNLHNWKAPGSDHVHNFWYKKFTYIQPFILNHINNLIKNPTKLPQFLTEGITYLLPKDFDDLTNPAKYRPITCLQTMYKILTSCLSLSIYKHLENNRILTEQQKGCRKFSKGCKEQLVIDSVILQQAHKKKKDLYTVYIDYAKAFDSVPHSWLMKVLEIYKIHPTIISFLQNVSSTWTTRIRLKTKENTLETEYIKIKRGIFQGDALSPLWFCLALNPLSNILNSIDKGYLLQYYTPEHVSMYQKTNINHLLYMDDLKLYASTQSDLEHLIETTERFSTDICMNFGINKCKINSFKAGIHYEHQHELQAGEIINSLEENKAYKYLGYNQSKIIHYKETKNILTQEFKQRLNSILKSKLNSRNMIKAINTFTIPILTYSFGVIHWTKTELLKLQRTINVNLGKHRKHHPRACVQRMTLPRIEGGRGIIDIYNLHNKQIANLRHYFHEQAKTSILHEVVAYNDCKFTPLNLYDKETQRNEKEIENNIKIDAWERKELHGRHKKELNQSHIDKVASNAWLTFGNLFPETEGFMQAIQDQVIKTRNYNKHIVKLKNITDICRKCNKATETIQHITGACSSIVQTDYKYRHDQVVQIIHQKLAIQYRLITDPPTPYYKYKPKNILENDTYKMYYDRAILTDKTVHYNRPDITLIDKSNRTGLIIDVAIPNTHNLKNTISEKLTKYIELKDEIIRMWRLQKVSIVPIVLSSTGVVPKLLQSSLKTINISHYIYLSLQKPVILNTRRIVRSFLQSDSLT

SEQ ID NO: 20762 - protein, 1315 aa, Nosphistia zonara
MTCLSSSTVSVASSNTSSPVASPQKMSTHKENNTLKPEDVAQSAVSANLSVPTTGLNKRKKWTKEMNQFILRNYLYLTKMETETVNYLQPLHTNFIEHFPDMTVNQQRLGDQRRAIIRNKLLPQEIIHEIYSEVQANLRTTQTSTQTLTTNITVNKHPIQKQRMKWTTEYNETIMRAYYRVTNLEIDKTDYRKKLHQDFIKTFPHLSHVSEQRISDQRRVIVNGNRIKPERLEIIKQEVAVELKVANREIERNNEEQAYSSTKSVGSSDVILVRDNKIHNSDDSNTNTNLEKNTNCSVEISNEIQNSFKEALDFYNNISPTKRCFIPKQKTSKHLNIVVNYINSNILPKFINQFTDFTALHTIIYCAAWTAAKMNGTKLTIPPKIPSHQKVNNLKPNWQIRLEKRVADLRTKIGRLTQYIQGNKSKNNTKHVKIILDSYKIHTKHEEVNTELNQFLDTLKQKLAVTASRLRRYKTCTLRKTQNNQFIKNEKEFYRSIKNNTNPKNFNVSPSADSITNFWKSVWENPILHNSRSSLINTEFTSNLHVKDMPFESITMEILQVVLRKLHNWKAPGSDFVHNFWYKKFTYIQPFILNHINNYIKNPTKLPQFLTEGITYLLPKDLNDLTNPAKYRPITCLQTMYKILTSCLSQSIYKHLENNDILTEQQKGCRKFSKGCKEQLVIDTVILQKAHKTKNDLYTVYIDYTKAFDSVPHSWLIKVLEIYKIHPTIISFLQNISSTWRTRIRLKTKGNNSDTEPIKIKRGIFQGDALSPLWFCLALNPLSNILSSIDKGYLLQCYTPKNELLYRKTNVNHLFYMDDLKLYASTQSDLEHLIETTERFSTDICMNFGINKCKINSFKAGIHYDHQHELHTGEIIKSLEENKAYKYLGYNQSNIIHYRQTKNALTQEFKQRLNSILKSMLNSRNMIKAINTFTIPILTYSFGIIHWTKTELLKLQRSINVNLSKQRKHHPRACIQRMTLPRVEGGRGIIDICNLHNKQIASLRHYFHEKAKTSTLHEVVAYNDRKLTPLNLCDKEIQRNEAEIDMHIKIDAWEQKTLHGRHKKELNQSHIDKAASNAWLTSGNLFPETEGFMQAIQDQVIKTRNYNKYIVKWKNITDTCRKCNKASETIQHITGACSSIVQTDYKYRHDQVAQIIHQKLAIKYHLISDPPTPYYKYKPKNVLENYAYKMYYDRAILTDKTVHYNRPDITLIDKNNKTALIIDVAIPNTHNLKNTISEKLTKYIELKDEIMRMWRLQKVTIAPVVLSSTGVIPKSLHTSLKTINISHYTYLTLQKAVILNTCRLVRKFLQNDSDT

SEQ ID NO: 20763 - protein, 1374 aa, Pythonides amaryllis
MADYGLKKIKTRTQTTYNLRPLIKARQVPPRSRVTTRHSSEEEITHGESSNIRENPMQNEELFSSDSTSLFSCNTSTSGSSSSSPIKSNSSFISSSHNSQVQENVAQTAILAENSAPITCTNTRKKWTNEMNQFILRTYLHLTKLDTDTNNYLQPLHIKFIEQFPNMVVSRQRVGDQRRAIIRNKLLTQETIDSIYNEVRSNLQTTQIATQISTLDCLTVNTHITGQRMKWTTEYNEAIMRAYYRITKLETNKTDYRKQLHQEFISIFPHLSHISEQRISDQRRVIINNKRLTRERIETIKIEVADELKISTNTETENQNEEPIQNQDGNINTNSDSNIEFFNRINLQINLSDLSEDVKIKIQETFKTTLEFYKNIEPTKRCFIPRQKATKTLYKILTYIDNEILPKYINTNTDFSSLHTVIYCAAWTAAKTNGTKLTLKASSLHHNINAVKPKWQIRLEKRLHDLRTKIGRLTQFINGNRTTNIRKHVNTILQNYKVHTTHDETNTELAQFLDTLKQKLSVTASRLRRYKACSLRKTQNRQFIKNEKQFYRSLNNNATFQNKHDSPSVDSIKTFWSSIWEKSVQHNNEASWIKDEIDKHRNVNSMQFEVVTGDVFQEVLRNLHNWKTPGSDQIHNFWYKKLKYVQPLLYNHLNNFINHPTSVPKFVTQGTTYLLPKDADNLTDPAKYRPITCLQTVYKIMTSCLTQTIYKHLENNQILTEQQKGCRKFSQGCKEQLVIDSVILQQAHKKKTDLYSVYIDYAKAFDSVPHSWLLQVLEIYKIHPTIISFLKNISSTWTTFLRVITKNSTIDTEPIKIERGIFQGDALSPLWFCLALNPLSNLLNSTNKGLSLQYSTPIIGPGQQQIKVNHLLYMDDLKLYAATESHLQDLIKTTEHFSIDIHMNFGIEKCKINSHKAGIHYQHQHELQNMKVIESLQESNTYKYLGYHQSNLINYKYTKTLLIQEFKRRLTIILKSQLNSRNMIKSINTYTIPILTYSFGIINWTKSELIKIQRCIHTNLTKHRKHHPRACFQRMILPRNEGGRSIIDVYNLHNKQITTLRNYFHNKSVTSTLHKAIVDNDHKLTPLNLNNKEIQKNEKIIDNKTKIKEWQQKALHGRHLKDLNQSHIDKAASNAWLTFGELFPETEGFMQAIQDQVIETRNYSKYIVKSNNIVDICRRCNKSSETIQHITGACSSIVQTEYKHRHDQVVNIIHQKLAIKYRLISDPPVAYYKYHPKTVLENSSHKMYYDRAILTDKTVHYNRPDITIVDKINKTALIIDVAIPNTHNLQNSVSEKLNKYIELKDEISRMWRLKKVTIVPIVLSTTGVIPKTLHQSLKSINISPYTYLTLQKAVILNTCRIVRKFLQSESGAPS

SEQ ID NO: 20764 - protein, 1262 aa, Pyrrhopyge telassa
MSPIASRQKMLTHKANNSLRPEDVAQTATSANLSVPTTGSRERKKWTKEMNQFILRNYLYLTKMETETFNYLQPLHRNFIDRFPDMTVSRQRLGDQRRAIIRNKLLSQEIIDNIYDEVQTNLRTTQITTQPLIPNNNDNIAPIQNKRIKWTTEYNETIIRAYYRITNMEINKTDYRKQLHQDFIKTFPHLSHVSEQRISDQRRIIINSNRIKPERLETIKQEVADELKLSTSEVRRKKEIQTNTCVESGESSDITLVSDNNINESTVPDTIINLDKNNSCSVELSIEIQNLFKQSLDFYNSITPTKRCFIPKQKISKHFNIVVNYINSNILPKFINQYTNFTKLHTIIYCAAWTAAKINGTKLTIPPKIPSEKKVNSLNPKWQIRLEKKVANLRTKIGRLTQYIQGNKSTKNTKHINIILESYKIHTKHEEVNTELNQFLDTLKQKLAVTASRLRRYKMCTLRKTQNNQFVKNEKEFYRSLKNNTNAKNVDVSPTTDSIINFWSSVWEKPIFHNNRSSLINTETESHSHIENMTFESIRMETLQEVLKNLHNWKAPGSDHVHNFWYKKFTYIQPFILNHINNFIKNPTKLPQFLTEGVTYLLPKDFDDLTNPAKYRPITCLQTMYKILTSCLSLSIYKHLENNRILTEQQKGCRKFSKGCKEQLVIDSVILQQAHKKKKDLYTVYIDYAKAFDSVPHSWLMKVLEIYKIHPTIISFLQNVSSTWTTRIRLKTKENTLETESIKIKRGIFQGDSLSPLWFCLALNPLSNILNSIDKGYLLQYYTPEHVSMYQKTNINHLLYMDDLKLYASTQSDLEHLIETTERFSTDICMNFGINKCKINSFKAGIHYEHQHELQAGEIINSLEENKAYKYLGYNQSKIIHYKETKNILTQEFKQRLNSILKSKLNSRNMIKAINTFTIPILTYSFGVIHWTKTELLKLQRTINVNLGKHRKHHPRACVQRMTLPRIEGGRGIIDIYNLHNKQIANLRHYFHEQAKTSILHEVVAYNDCKFTPLNLYDKETQRNEKEIENNIKIDAWERKELHGRHKKELNQSHIDKVASNAWLTFGNLFPETEGFMQAIQDQVIKTRNYNKHIVKLKNITDICRKCNKATETIQHITGACSSIVQTDYKYRHDQVVQIIHQKLAIQYRLITDPPTPYYKYKPKNILENDTYKMYYDRAILTDKTVHYNRPDITLIDKSNKTALIIDVAIPNTHNLKNTISEKLTKYIELKDEIIRMWRLQKVSIVPIVLSSTGVVPKLLHA

SEQ ID NO: 20765 - protein, 1290 aa, Pyrrhopyge hadassa
MLTHKANNSLRPEDVAQTAVSANLSVPTTGSRKRKKWTKEMNQFILRDYLYLTKMETETFNYLQPLHSNFVDRFPDMTVSRQRLGDQRRAIIRNKLLSQEIIDNIYDEVQTNLRTTQITTQQLNPNSNDNIVPIQNKRIKWSTEYNETIIRAYYRITNMEINKTDYRKQLHQDFIKTFPHLSHVSEQRISDQRRIIINSNRIKPKRLETIKQEVADELKLSTNEVRRKKEIKTYTCVESGESSDITPVSDNNINESTVPDTIINLDKYNSCSVELSIEIQNLFKQSLDFYNSITPTKRCFIPKQKISKHFNIVVNYINSNILPKFINQYTNFTKLHTIIYCAAWTAAKINGTKLTIPPKIPSEKKVNSLNPKWQIRLEKKVANLRTKIGRLTQYIQGNKSTKNTKHINIILESYKIHTKHEEVNTELNQFLDTLKQKLAVTASRLRRYKMCTLRKTQNNQFVKNEKEFYRSLKNNTNAKNVDVSPTTDSIINFWSSVWEKPICHNNRSSLINTETESHSRIENMTFESITMETLQEVLKNLHNWKAPGSDHIHNYWYKKFTYIQPFILNHINNFIKNPTKLPQFLTEGITYLLPKDFDDLTNPAKYRPITCLQTMYKILTSCLSLSIYKHLENNRILTEQQKGCRKFSKGCKEQLVIDSVILQQAHKKKKDLYTVYIDYAKAFDSVPHSWLMKVLEIYKIHPSIISFLQNVSSTWTTRIRLKTKENTQETESIKIKRGIFQGDALSPLWFCLALNPLSNILNSIDKGYLLQYYTPEHESMYHKTNINHLLYMDDLKLYASTQSDLEHLIETTERFSTDICMNFGINKCKINSFKAGIHYEHQHELQAGEIINSLEENKAYKYLGYNQSKIIHYKETKNILTQEFKQRLNSILKSKLNSRNMIKAINTFTIPILTYSFGVIHWTKTELLKLQRTINVNLGKHRKHHPRACVQRMTLPRIEGGRGIIDIYNLHNKQIANLRHYFHEQAKTSILHEVVAYNDCKFTPLNLYDKETQRNEKEIENNIKIDAWERKELHGRHKKELNQSHIDKVASNAWLTFGNLFPETEGFMQAIQDQVIKTRNYNKHIVKLKNITDICRKCNKATETIQHITGACSSIVQTDYKYRHDQVVQIIHQKLAIQYRLITDPPTPYYKYKPKTILENDTYKMYYDRAILTDKTVHYNRPDITLIDKSNKTALIIDVAIPNTHNLKNTISEKLTKYIELKDEIIRMWRLQKVSIVPIVLSSTGVVPKLLQSSLKTINHSHYTYLNLHKLVILDTCRIVRKFLQTDSLA

SEQ ID NO: 20766 - protein, 1381 aa, Mysoria xanthippe
MKKSMEKKVYNLRPRLKTGHETPVVNIIYNQNNEESNNRNERLVTDDECSESELSISLFSSPSNSLMTCLSSSTLSVTSSSTTSPVASPQKTSSHKEKTTLKPEDVAQLAVSANIAVPTTGINKRKKWTQEMNQFILRNYLYLTKMETETDNYLQPLHTNFIKKFPEMTVNRQRLGDQRRAIIRNKLLSQEKIDEIFSESQANLQTTQTSTQPLPSSSTVNKNPIQKQRMKWTTEYNETIMRGYYRATKLEIDKTDYRKKLHQDFIKTFPHLSHISEQRISDQRRVIINSNRITPERLEMIKQEVAVELKAPSSEINRNNEKHAYARAKSVVSSEVSLIRDNKLNHSHGSNTNTTLEKNTNCSVEIINEITNLFKQALDFYSNISPTKRCFIPKQKISKQFNRVVNYINSNILPKFINDYTDFNTLHTIIYCAAWTSAKMNGTKLTIPPKMQSDKKVNKLKPKWQIRLEKKVADLRTKIGRLTQYIQGNKSKNITKHINIILQSYKIHTKHEEMNTDLNQFLDTLKQKLAVTASRLRRYKICSLRKTQNNQFIKNEKEFYRYLKNNTNTKIFDVSPSTDCITNFWSSVWENPILHNSRSSLINTETELNLRVKDMPFESITMEILQEVLKNLHNWKAPGSDYVHNFWYKKFTYIQPFILTHLNNFIKNPTKLPKFLTEGITYLVPKDFDDLTNPAKYRPITCLQTMYKILTSCLSQTIHKHLENNGILTEQQKGCRKFSKGCKEQLVIDSVILQQAHKKKNDLYTVYIDYAKAFDSVPHSWLIQVLEIYKIHPTIISFLQNISSTWRTRIRLKTKENNVETELIKIERGIFQGDALSPLWFCLALNPLSNILNSIDKGYLLQFHTPKNESSYRKMNVNHLFYMDDLKLYASTQSDLEHLIETTERFSTDICMNFGINKCKINSFKAGIHYDHQYELHTGEIINSLEENKAYKYLGYNQSKIIHYRQTKNILTQEFTKRLNSILKTMLNSRNLIKAINTFTIPILTYSFGIIHWTKTELLKLQRTINVKLSKQRKHHPRACVQRMTLPRVEGGRGIIDIHNLHNKQIANLRHYFHKKTETSILHEVVAYNDRKFTPLNLFDKEIQKNEEETDKHTKIDAWERKILHGRHKKELNQSHIDKAASNAWLTSGNLFPETEGFMQAIQDQVIKTRNYNKHIVKWKNITDTCRKCNKASETIQHITGACSSIVQTDYKYRHDQVVHIIHQKLAIKYHLISDPPTPYYKYKSKNVLENDTYKMYYDRAILTDKTVHYNRPDITLIDKNNKTALIIDVAIPNTHNLNNTISEKFTKYIELKDEIMRMWRLQKVSIVPVVLSSTGVIPKSLHTSLKTMNISQYTYLTLQKAVILNTCRIVRKFLQSDSDT

SEQ ID NO: 20767 - protein, 1043 aa, Ardaris minthe
MRDSEVNNSEGSNTNTNLEKNRNCSVETSNEIQNLFKQALDFYNNIIATKRCFIPKQKTSKHFNIVVDYINSNVLPKFINQCTDFTTLHTVIYCAAWTAAKMNGSKLTIPPKIVSDKKVNNSKPKWQIRLEKKVADLRTKIGRLTQYIQGNKSKNNTKHVNIILESYKIHTKHEEVNTDLNQFLDTLKQKLAVTASRLRRYKTCTLRKTQNNQFIKNEKEFYRSLKTDTNPKNCDVSPSADSITSFWSSVWENPILHNSRSSLINIETESNLRVKNMPFESITMEILQEVLKNLHNWKAPGSDYVHNFWYKKFTYIQPFILNHINIYIKNPTKLPHFLTEGITYLLPKDFDDLTNPAKYRPITCLQTMYKILTSCLSQSIYKHLENNGILTEQQKGCRKFSKGCKEQLVIDSVILQQAHKKKNDLYTVYIDYAKAFDSVPHSWLIKVLEIYKINPTIISFLQNISSTWKTRIRLKIKENNLETEPIKIKRGIFQGDALSPLWFCLALNPLSNILNSIDKGYLLQCYTPKNELLYRKTNINHLFYMDDLKLYASTQSDLENLIKTTEHFSTDICMNFGINKCKINSFKAGIHYDHQHELHTGEIINSLEENKAYKYLGYNQSKIIHYRQTKNILTQEFKQRLNSILKSMLNSRNMIKAINTFTVPILTYSFGIIHWTKTELLKLQRTINVNLGKQRKHHPRACVQRMTLPRVEGGRGIIDIYNLHNKQIASLRHYFHEKANTSILHKVVAYNDRKLTPLNLCDNETQRNEEEIDKHIKIDAWERKTLHGRHKKELNQSHIDKAASNAWLTSGNLFPETEGFMLAIQDQVIKTRNYNKHIIKWKNITDTCRKCNKASETIQHITGACSSIVQTDYKYRHDQVVQIIHQKLAIKYHLISDLPTPYYKYKPKNVLENDTCKMYYDRAILTDKTVHYNRPDITLIDKNNKTALIIDVAIPNTHNLKNSISEKLTKYIELKDEITRMWRLQKVCIVPVVLSSTGVVPKSLHTSLKTINISHYTYLTLQKAVILNTCRIVRKFLQSDSDT

SEQ ID NO: 20768 - protein, 943 aa, Pyrgus malvae
MNGTKLTVPPKITKPYKNESKPKWQIRLEKKIADLRAKIGRLTQYINGNRTVNLTKHVNAILQNYKVHTNHEEINTDLTHFLDTLKQKLAVAASRLKRYKTCTLRKIQNSNFVRNEKQFYRSLGNNVTPDTNCSPSIDSLKTFWSGVWEEPKEHNSEASWIAEEFMNYSHIEPMQFDHITIDIFQEVIKSLHNWKTPGSDHIHNFWYKKFTYIQPFLYKLLNNFIKNPTSLPEFVTEGTTYMLPKDHDDLTNPSKYRPITCLQTVYKILSSCLTHTINKHLESQQILSEEQKGCRKFSQGCKEQLVIDSVILQHKHRHKTDLHTAFIDYAKAFDSVPHSWLIKVLEIYKIHPDIVFFLQNISKTWATRLRITTKQNTLETEPIKIKRGIFQGDALSPLWFCLALNPLSNTLNSTKKGITLHHNTLDIDSMNNEIKINHLLYMDDLKLYATTTSELNELIKVTEHFSKDIHMNFGIEKCKINSYIAGVNHHHQHELSTGQIINSLQETDTYKYLGYNQSKLIHYKETKNSLSQEFKRRLNIILKTQLNSRNMIKSINTFCIPILTYSFGIINWTKKELLQLQRFINTNMTKQRKHHPRSCVQRMTLPRAEGGRGITDIYNLHNKQITVLRNYFHTKSVNSNLHNAIVHNDHKLTPLNLHSKDTQKNENIIDKQNKIETWKQKSLHGRHLNDLNQAFVDKTASNAWLTTGELFPETEGFMQAIQDQVIETRNYGKHIIKLKNVLDVCRKCNKSSETVQHITGACSSIVQTDYKYRHDQVVNIIHQKLAIQHKLISDPPTPYYKYIPKTVLENTKYKMYFDRAILTDKTVHYNRPDITLIDKINKTAHIIDVAIPNTHNLQNTISGKLSKYVELKDEIMRMWRLRKVSVVPVVLSTTGVIPKTLHQSLKSINLSPYTYITLQKAVILNTCRIVRKFLQTDTTSLST

SEQ ID NO: 20769 - protein, 1376 aa, Mysoria galgala
MKKSIGKKVYNLRPRLKTACETPAVNIIYKQNNEKSNSRMERLVTGDECSKSESSISLFSSSSNTSMTCHSPSTLSVTSSSTTSPVASPQKMSMHKEKTTLKPEDVAQLAVSANISVPTTGFNKRKKWTLEMNQFILRNYLYLTKMETETVNYLQLLHTNFIEKFPEMKVNRQRLGDQRRAIIRNKLLSQETIDKISSEVSANLRTTQTPTQPLTSSNTVNKNPIQKQRMKWTLEYNETIMRGYYRVTKLDIDKTDYRKKLHQYFIKMFPHLSHISEQRIADQRRVIINGNRIKPERLEIIRQEVANELKAPSSEIKRNNACAKSFVSSEVILVRDNKINNSDGSNTSVNLEKNMNCSDEISNVIQNLFKQSLDFYKNIIPTKRCFIPKQKISKQFNIVVNYINSNVLPKFINEYTDFTTLHTIIYCAAWTSAKMNGTKLTIPPNVQSDKIVNKLEPKWQIRLEKKVADLRTKIGRLTQYIQGNKCKNITKHINIILESYKIHTKHEQVNTDLNQFLDTLKQKLAVTASRLRRYKTCTLRKTQNNQFIKNEKEFYRSLKNNTNPKKCDISPSVESVTNYWSSVWEKPILHNSRSSLINTETELNLRVKEMPFESITMEILQKVLKNLHNWKAPGSDNIHNFWYKKFTYIQPFILTHINNYIKNPTILPQFLTEGITYLLPKDFDDLTDPTKYRPITCLQTIYKILTSCLSQSIHNHLEINGILTEQQKGCRKFSKGCKEQLVIDSVILQQAHKKKNDLFTVYIDYAKAFDSVPHSWLIQVLEIYKIHPTIISFLHNISSTWRTRIRYKTKENNLETKPIKIGRGIFQGDALSPLWFCLALNPLSNILNSIDKGYLVQFHTPKNELLYRKTSVNHLFYMDDLKLYASTQSDLEHLIETTERYSTDICMNFGINKCKINSFKAGLHYDHKYKLPTGELINSLEENKAYKYLGYNQSNIIHYKQTKNILTQEFIQRLNSVLKSMLNARNMIKAINTFTIPIFTYSFGIIHWTKTELLKLQRTINVKLGKQRKHHPRACVQRMTLPRVEGGRGIIDIYNLHNKQITNLRHYFHEKAKISILHEAIAYNDRKYTPLNLYDKERQRNEEEIDKHIKLDAWERKILHGRHKKELNQSHIDKAASNAWLTSGNLFPETEGFMQAIQDQVIKTRNYNKHIVKWKNITDTCRKCNKASETIQHITGACSSIVQTDYKYRHDQVVQIIHQKLAIRYHLISDPPTLYYKYKPKNVLENDAYKMYYDRAILTDKTVHYNRPDITLIDKNNKTALIIDVAVPNTHNLNHAISEKITKYIELRDEIIRMWRLQKVSIVPVVLSSTGVIPKSLHTSLKTINIPHYTYLMLQKAVILNTCRIVRKFLQSDSDT

SEQ ID NO: 20770 - protein, 1376 aa, Pyrrhopyge aziza
MKKLIEKKVYNLRPRLQARRATPGINTISSQKDNTNIESNNRFERVVSDDEESKTESSASLYSAPTDTSLASLSASTVSVASSATMSPIIASCQKMLTHKANNSLRPGDVAQTAVSANLSVPTTGSTKRKKWTIEMNQFILRDYLYLTKMETETFNYLQPLHSNFVDRFPDMTVSRQRLGDQRRAIIRNKLLSQEIIDNIYDEVQTNLRTTQTTTQPLNPNSNDNKAPIQNKRIKWSTEYNETIIRAYYRITNMEINKTDYRKQLHQDFIKTFPHLSHVSEQRISDQRRIIINSNRIKPERLETIKQEVADELKLSTSEVRRKKEIQTYTCVESGENSDITLVSDNNINESTVPDTIINSDKNNSCSVELSTEIQNLFKQSLDFYNSITPTKRCFIPKQKISKHFNIVVNYINSNILPKFINQYTNFTQLHTIIYCAAWTAAKINGTKLTIPPKIPSEKKVNSLNPKWQIRLEKKVANLRTKIGRLTQYIQGNKSTKNTKHINIILESYKIHTKHEEVNTELNQFLDTLKQKLAVTASRLRRYKMCTLRKTQNNQFVKNEKEFYRSLKNNTNAKNVDVSPTTDSIINFWSSVWEKPICHNNRSSLINTETESHSRIENMTFESITMETLQEVLKNLHNWKAPGSDHVHNFWYKKFTYIQPFILNHINNFIKNPTILPQFLTEGITYLLPKDFDDLTNPAKYRPITCLQTMYKILTSCLSLSIYKHLENNRILTEQQKGCRKFSKGCKEQLVIDSVILQQAHKKKKDLYTVYIDYAKAFDSVPHSWLMKVLEIYKIHPTIISFLQNVSSTWTTRIRLKTKENTLETESIKIKRGIFQGDALSPLWFCLALNPLSNILNSIDKGYLLQYYTPEHVSMYHKTNINHLLYMDDLKLYASTQSDLEHLIETTERFSTDICMNFGINKCKINSFKAGIHYEHQHELQAGEIINSLEENKAYKYLGYNQSKIIHHKETKNILTQEFKQRLNSILKSKLNSKNMIKAINTFTIPILTYSFGVIHWTKTELLKLQRTINVNLGKHRKHHPRACVQRMTLPRIEGGRGIIDIYNLHNKQIANLRHYFHEQAKTSILHEVVAYNDCKFTPLNLYDKETQRNEKEIENNIKIDAWERKELHGRHKKELNQSHIDKVASNAWLTFGNLFPETEGFMQAIQDQVIKTRNYNKHIVKLKNITDICRKCNKATETIQHITGACSSIVQTDYKYRHDQVVQIIHQKLAIQYRLITDPPTPYYKYKPKTILENDTYKMYYDRAILTDKTVHYNRPDITLIDKSNKTALIIDVAIPNTHNLKHTISEKLTKYIELKDEIIRMWRLQKVSIVPIVLSSTGVVPKLLHASLKTINISHYTYLTLQKAVILNTCRIVR

SEQ ID NO: 20771 - protein, 1368 aa, Morvina fissimacula
MEKSSTVKRYNLRPLSRARCSVPTVTVRHSSRKKNIVESNNHDRMIVDDISVIETIDSLVSSPTSTSSSFCPSPTQSHSSSSSLTCSIIQEDVAQTAITVEKPVPTSCINKRKKWSNEMNQFILRNYLYLTKMDTDTNNYLQTLHSQFLQQFPNMTVSRQRVGDQRRAIIRRKLLPQETINKIYNDVRSKLQSTQPVTQSSPSNYSASNTNTHVTGQRMKWSKEHNEAIMRAYYKVTNLETDYTDYRKRLHQEFINIFPLLNHVSEQRISDQRRVIINNNRLTHERLESLKQEVANVLKNANHCDTENNSDNRTYSPVRNTSDINPENDVNLDRMHLDTNSEKNFSNLTEKNKTDIQETFKEALEFFSCTSPINRCFIPKQRVSKFFYRVINYIDKNILPNYIKLNTDFSSFHTAIYCAAWTAAKINGTKLTLSHLIQKQNRSSVEPKWQMRLKKRVTDLRAKIGRLTQYIDGNRTKNVTKHVNNILQNYKIHTVHEEINTDLMHFLDTLKQKLAVTASRLRRYKTCTLRKNQNSQFVKNEKQFYRSLNNKNIAQDTDERPTVECLKTFWSNVWDECGSYNNEAVWIKEETEKHSHVKSMEFESITGDVFHEVLRNLHNWKTPGSDHIHNFWYKKLTHTHQFLYNHINNFIKTPTSLPKFVAQGTTYLLPKDLDDLTDPAKYRPITCLQTFYKILTSCLTHTIYKHLETNQILTEQQKGCRKLSQGCKEQLIIDSVILQQVKKNKSDLYSVYIDYVKAFDSVPHSWLVKVLEIYKIHPLIISFLQKTSHFWTTRLRITTKDEFLETEPIRIRRGIFQGDALSPLWFCLALNPLSNKLNSIDKGISLAWDTTKTKATSKTIKINHLLYMDDLKLYASDERDLQNLIETTEQFSTDICMNFGIEKCKINSYKAGVGYQYQHVLHNLQVINSLQENNAYKYLGYDQSNIIHQKDTKTKLIQEFKRRLTIILKSQLNSRNMIKSINTYTIPILTYSFGVINWTKSELIKFQRIVNTSLTKHRKHHPRACFQRMTLPRSEGGRGIIDIYNLHNKQITVLRNYFYSKATTSTIHNAIIHNDHKLTPLNLNNKETQKNESIIDKQAKLKAWRQKALHGRHLKDLEQPYIDKAASNAWLTSGHLFPETEGFMQAIQDQVIETRNYSKHIIKLYNTIDICRKCNTSSETIQHITGACSSIVQTEYRHRHDQVVNIIHQKLAIQYHLINDPPMPYYKYTPKTVLENASYKMYFDRAILTDKSVHYNRPDITVIDKTNKTALIIDVAIPNTHNLQSTISEKITKYTELKDEITRMWRLQKVKIIPIVLSATGVVPKLLHQSLKSIDISPYTYLTLQKAVILNTCRIVRKFLQTDTNLPT

SEQ ID NO: 20772 - protein, 1381 aa, Mimoniades ocyalus
MKKSIEKNVYNLRPRLKTGRETPRVNIICSQKEVTNAEFNNRVEGLVTDDECSKSELTVSLFSSPSNTSMTCPSSSTVSVASSATTSPVASPQKTSTRKENNILKPEDVAQSAVSANLSVPTTGFNKRKKWTKEMNQFILRNYLYLTKMETETVNYLQPLHTNFIQHFPDMTVNRQRLGDQRRAIVRNKLLSQEVIDEIFSEVQANLQTTQTSTQRLTSNSTVNKNSIQKQRMKWTTEYNEAIMRGYYRVTKLEIDKTDYRKKLHQDFIKTFPHLSHLSEQRISDQRRVIINSNRIKPERLEVIKQEVADELKVPSSEIKRNNDKQAYACAKSVVNLEVILVRDNNINNSGATNTNIEKNSNCSVEISNEIQRLFKQALDFYKDIIPTKRCFIPKQKSSKHFNIVVNYINGNVLPKFINQCTDFTTLHTIIYCAAWTSAKMNGTKLTIPPKMPTDKKSYNLKPKWQIRLEKKVKDLRTKIGRLTQYIQGNKSKNITKHVNIILESYKIHTKHEEVNTDLNQFLDTLKQKLVVTASRLRRYKTCTLRKTQNNQFIKNEKEFYRSIKHNTNPKNCDVSPSADSITNFWSSVWENPILHNSRSSVINTETELNLGVKDMLFESITMEILQEVLKNLHNWKAPGSDHVHNFWYKKFTYIQPFILTHINNYIKDPTKVPTFLTEGITYLLPKDIDDLANPAKYRPITCLQTMYKILTSCVSQSIYKHLENNSILTEQQKGCRKFSKGCKEQLVIDSVILQQAHKKKNDLYTVYIDYAKAFDSVPHSWLIKVLEIYKIHPMIISFLQNILSTWRTRIRLKTKQNNLETEPIKIKRGIFQGDALSPLWFCLALNPLSNILNAIDKGYLLQCHTPKNKLLYRKTNINHLLYMDDLKLYASTQSDLEHLIDTTERFSIDICMNFGINKCKINSFKAGIHHDHQYELHTGEIINSLEENKAYKYLGYNQSKIIHYRQTKNTLTQEFQERLNSILKSMLNSRNMIKAINTFTIPILTYSFGIIHWTKTELLKLQRTINVNLGKQRKHHPRACIQRMTLPRVEGGRGIIDIYNLHNKQIASLRNYFHDKAKTSILHEVVAYNDRKLTPLNLCDKEIQRNEEEIHKQIKIDAWERKILHGRHKKELNQSHIDKAASNAWLTFGNLFPETEGFMQAIQDQVIKTRNYKKHIVKWKNITDICRKCNKASETIQHITGACSYIVQTEYKYRHDQVVQIIHQKLAIKYHLISDKPAPYYKYKPKNVLDNNAYKMYYDRAILTDKTVHYNRPDITLIDKNNKTALIIDVAIPNTHNLNNTISEKLTKYIELKDEIMRMWRLQKVTIVPVVLSSTGVIPKSLHTSLKTINISHYTYLTLQKAVILNTCRIVRKFLQSDSD

SEQ ID NO: 20773 - protein, 811 aa, Tagiades gana
MTHTSSDNDVGNLKKFWANIWEEPVLHNSEAGWIKEECEKNSHLDGMQFESITIETFHEVIKNLHNWKAPGSDHIHNFWYKKLTFIQPFLYKHLNDFIKNPSNTPKFITEGITYMLPKDLNDLTNPAKFRPITCLQTVYKILTSCLTQTIYKHLESNQLLTEQQKGCRKFSQGCKEQLIIDSVVLHQVHKLKRDLYTVYIDYSKAFDSVPHSWLLKVLKIYKINPLIISFLEKIISTWTTRLRLNTTHSTIETESIRIKRGIFQGDALRPLWFCLALNPLSNKLNSTNKGYLLQYNCSEGDSVPNKVILNHLLYMDDLKLYASTKSDLEFLIDTTERFSLDINMEFGIEKCKINSFKEAQPFQHQHYLNSGKLILSLHENNAYRYLGYNQTNLINYKDTKSELIQEFKRRLNSILKTQLNSRNTIKSINTFTIPVLTYSFGIVHWTKTELIQLQRSINTTLTKFRKHHPRACVQRMTLPRTEGGRGIIDIINLHNRQITNLRKYFYNKTEQSKLHNAICQNDKKYTPLNLNNKETQKNEYIIDNQTKIETWVQKSLHGRHRKELHQPHINKIASNAWLTSGNLFPETEGFMQAIQDQVIETRNYTKHIVKRNIIDTCRKCNKCSETIQHITGACSAIAQTDYKHRHDQVVKIIHQKLAIKHRLINDAPTPYYKYDPKNVLENSSYKMYFDRAILTDKTVHYNRPDITLIDKNTKSALIIDIAIPNSHNLQNTISEKLSKYIELKDEITRMWRLQKVKIVPIVISTTGVIPKLLHQSLDLINISSNTYYTIQKAVILNTCRIVRKFLNSDST

SEQ ID NO: 20774 - protein, 1191 aa, Microceris scylla
MVRDKPKNTSRPEDVAQTAVSANLSVPTTGPSKRKKWSNEMNKFILRNYLYLTKMETDTLNYLQPLHTNFIEHFPNMVVNRQRLGDQRRAIVRNKLLSKEIINEIYNEVQTKLQSTQTSTQQLTPDSTVNKTPIQNSKRMKWTTQYNETIIRAYYRITLLETDKTDYRKQLHQHFIKTFPHLSHVSEQRISDQRRVIINNNRITPERLKFIKQEVADELKNPNREIKEKNIHVNVHSKSIERSVMIPRKDNKTNKLKNSNTNPTEEKDTDCPVEISNEIQKLFKQSLDFYSNITPTKRCFIPKQKTSKHFNIVINYINSNILPKFSNEYTDFTTLHTVIYCAAWTAAKINGTKLTIPPKIQNEKKVNNLSPKWQIRLEKKVTDLRTKIGRLTQYIQGNKSRSITKHVNIILESYKIHSKHEEVNTHLNQFLDTLKQKLAVTASRLRRYKTCTLRKTQNNTFANNEKQFYRSLKHSTNEKNCDKSPTVDSVTNFWSSIWEEPKFHNSRSSLINIETELNSHVDHMPFESITMEILQEVLKNLHNWKAPGSDHVHNFWYKKLTYIQPFILNHINNFIKNPTKLPQFLTEGTTYLLPKDFDDSTNPAKYRPITCLQTMYKILTSCLSKNIYKHLENNHILTEQQKGCRKFSKGCKEQLVIDSVILQQANKKKNDLYTVYIDYAKAFDSVPHSWLIKVLEIYKIHPSIISFLQNISSTWTTRIRLKTKESMLETEPIRIKRGIFQGDALSPLWFCLALNPLSNKLNSLNKGYLLHYYTPKTEPSHQETKVNHLFYMDDLKLYASTQSDLEHLIEITERFSTDICMNFGINKCKISSFQAGIHYEHQHVLHTGEIINSLEENRAYKYLGFNQSKIIHNKQTKDRLTQEFKQRLNSILKSKLNSKNMIKAINTFSIPILTYSFGIIHWTKTELIKLQRSINILLSKHRKHHPRSCVQRMTLPRAEGGRGIIDIYNLHSKQISNLRHYFHEKAKTSILHDVVTHNDHKLTPLNLCDKEIQRNEREIPKQDKIDAWERKALHGRHKNELNQPHIDKAASNAWLTSGNLFPETEGFMQAIQDQIIQTRNYSKHIVKLNNITDTCRKCNKTSETIQHITGACSSIVQTDYKHRHDQVVQIIHQKLAIQYRLITDSPTPYYKYKPKTVLENDAYKMYYDRAILTDKTVHYNRPDITLIDKNN

SEQ ID NO: 20775 - protein, 1374 aa, Oechydrus chersis
MAEYGMKKENKTNKKYNLRPLPRAHRITSGANTRCSNKKEMSSIELKNQFERLIVDDELSATDSTPSLFSYPLSTSPSYKSDSNPSSYVSSPTSSLIQEDVAQTASTVENLVPATCIKKRKKWTNEMNEFILRNYLYLTKMETDTDTYLQPLHSKFTDQFPDMLVSRQRIGDQRRAIIRNNYLSPKAVTEIYTEVQAKLQNTQNSTQPPLLCSTSSASAPGTRMKWTQEHNESIMRAYYRITHLESNKTEYRKQLHQEFTKMFPHLSHLSEQRIADQRRVIINNNRLTKERLEIIKQEIADELKIINIREIESNSSTSTQSPIINIDERDDFVNNNENIVNFTTRPDNDKTNLAEDKKIIIQELFESIFQFYRETSPTKRCYIPKQKPSKEFYRIVNYIDSAILPKYLNVNTDFSSLHTVIYCAAWTAAKMNGTNLTLEPKTAEVCITNLKPKWQIRLENRVTDLRAKIGRLTHYIRGNRTTKITKHIDAIIKNYKIHTTFDKINTDLAHFLDTLKQKLAVTSSRLRRYKTCTLRKAQNNQFIRNEKQYYRSLKNNITSQNTKTSPSVDSLKTLWSSIWEEPVLHNCEADWIREEEQKHMHIESMQFESITIDVYQEVIKKLHNWKTPGSDHIHNFWFKKLTSIQPFLYKHLNKFIKNPANMPHFVTQGTTYLLPKDLNDLTNPAKYRPITCLQTVYKILTSCISLIICKHLETNHILTEQQKGCRKFSQGCKEQLVIDSVILQQAHKNKSDLYTVYIDYAKAFDSVPHSWLLKVLEIYKIHPLIISFLQESSSSWATRLRLKTIDNTFETEPIKIKRGIFQGDALSPLWFCLALNPLSNILNSTDKGYSLSDGLSKIKSTREVVKINHLLYMDDLKLYATDNNDLDNLIRLTERFSTDICMNFGIEKCKINSYKSGVHHHHQYELHNRQHIHSLQQNNPYKYLGYNQTNLIQYKETKASLTQEFKRRLTTILKSQLNSRNLIKAINTYTIPILTYSFGVIKWTKTELINLQRSIHTNLTKHRKHHPRACLQRMTLPRHEGGRGIIDIYNLHNRQITALRNYFHIKMESSPLHAAIVYNDYNLTPLNLHSRDTQRNENLIDNQTKLEAWRQKALHGRHLKDLNLPHVDKTASNAWLTSGELFPETEGFMQAIQDQVIETRNYSKHIIKLNNIVDLCRKCNKPSETIQHITGACSSIVQTEYKHRHDQVVNILHQKLAIQHRLITNQPTPYYKYNPQTVLENNSYKMYYDRAILTDKTVHYNRPDITLVDKINKTALIIDIAIPNSHNLQSTISEIITKYLELKDEITRMWRLEKVSIIPVVLSSTGVIPKVLHQSLKSMNVSPYTYITLQKAVILNTCRIVRKFLQSDTYPLST

SEQ ID NO: 20776 - protein, 1040 aa, Trichogramma evanescens
MNNGRSTDRALPSDDQPENPIADINNNDADFVCQAPGCSRSFPTKKGLGVHQSAKHRDWTDTQNLAAKRSRGGGKDRWADEEVMLVAKREAELIFQAQCSNTRVPNINQLLLAENSKRTLEAIKGQRKTNADYKMKVADYLARLTESANEHEQTLDSTPSHEPEDLSRPPAETGRGPGLLEYFCGLQPVGSASPGVARLNALCARVAASEGDIPTPDLLTDLTLLLREMLPRKPKRQNQKPNEPRQYLSNKQRRRAEYSKIQNLWRKSPSQCVDRILSDQLDQDEPVPMTTMEPYWRRIMTETPGSDLAIRPSATEKCGIWYPIKSKEILAALPPNNSAPGPDGLTVATLKSISPEILSRIMNLFMFAEDVPAYLKESRTILIPKIKGTKDPSKFRPITVLSVLLRTYHKVLADRLKSLELDARQRAFIEADGCADNTSLLDMLLKYHQSKIKTLFLVMLDMQKAFDSVAHESITTIMRAKGISQPFIRYYQKMCEDSTTTIQHGDWISRPIRPSCGVKQGDPLSPVIFNCLIDEMLRRVPDEIGTVMEGMKVNVMAFADDLNLIASTKRGMQALIDIVVDFLGKCGLKANAGKCSSVAIIALGKEKKTAVDAECGFTVEGRRIQSLKRTDTWKYLGIEYNANGRLKLSARENLSDLLTKITKAPLKPQQRLWALRTKIIPKIIYPLVLGYAKMGYLRSIDRKIRASLRDWLRLPHDCPNAYFHAKVADGGLGIPSVRWQAPLERRSRLTNLRNSEYLTGGAFKEYLEDNIKTTEQLLTNGTTVMRTPADLRKFWAEQLYVRFDGAGLRLSGKINGQNNWISDGTRFLSGRDFVECIRTRINALPTRSRTGRGRAADRSCRGGCNKVETLNHISQNCHRTHDTRLKRHDAVGNYIQNILEKDGYQVAIEPKFQTSSGLRKPDYCATKEDSTLTIDIQIRSDSGDLDRNNRDKVRYYEENQELQSKIKERFGTSVIKTIAITLNWRGIWSPKSAEEAIALGVIRRKDLKILSTRTLIGTIFCWRTFNKRTDLPRRGRTGIG

SEQ ID NO: 20777 - protein, 906 aa, Trichogramma brassicae
MKVADYLARLTESANEHEQTLDSTPSHEPEDLSRPPAETGRGPGLLEYFCGLQPVGSASPGVARLNALCARVAASEGDIPTPDLLTDLTLLLREMLPRKPKRQNQKPNEPRQYLSNKQRRRAEYSKIQNLWRKSPSQCVDRILSDQLDQDEPVPMTTMEPYWRRIMTETPGSDLAIRPSATEKCGIWYPIKSKEILAALPPNNSAPGPDGLTVATLKSISPEILSRIMNLFMFAEDVPAYLKESRTILIPKIKGTKDPSKFRPITVLSVLLRTYHKVLADRLKSLELDARQRAFIEADGCADNTSLLDMLLKYHQSKIKTLFLVMLDMQKAFDSVAHESITTIMRAKGISQPFIRYYQKMCEDSTTTIQHGDWISRPIRPSCGVKQGDPLSPVIFNCLIDEMLRRVPDEIGTVMEGMKVNVMAFADDLNLIASTKRGMQALIDIVVDFLGKCGLKANAGKCSSVAIIALGKEKKTAVDAECGFTVEGRRIQSLKRTDTWKYLGIEYNANGRLKLSARENLSDLLTKITKAPLKPQQRLWALRTKIIPKIIYPLVLGYAKMGYLRSIDRKIRASLRDWLRLPHDCPNAYFHAKVADGGLGIPSVRWQAPLERRSRLTNLRNSEYLTGGAFKEYLEDNIKTTEQLLTNGTTVMRTPADLRKFWAEQLYVRFDGAGLRLSGKINGQNNWISDGTRFLSGRDFVECIRTRINALPTRSRTGRGRAADRSCRGGCNKVETLNHISQNCHRTHDTRLKRHDAVGNYIQNILEKDGYQVAIEPKFQTSSGLRKPDYCATKEDSTLTIDIQIRSDSGDLDRNNRDKVRYYEENQELQSKIKERFGTSVIKTIAITLNWRGIWSPKSAEEAIALGVIRRKDLKILSTRTLIGTIFCWRTFNKRTDLPRRGRTGIG

SEQ ID NO: 20778 - protein, 983 aa, Phalangium opilio
MHLYLFMYVCMYACMTWKHSELENMAELEIKACKDHTVKFINQYLHERLHGRTLHAIRCARKSVRYQRIREDLERRLGINTSLNLTLESDNSTSSGENSSSESDSESEGSCVDEPETLDHWRARFLDIGSDLLIPDDMRLRLNEERMCDDLYSNFLSFYFTQDDSENKNKSKRSTRKKKNLPVRPKRAVENRKQRKVRIYAEFQRLFSMSPKRALNRIENGEKENSTVTLENLHHVFDPIFEAESLCPEPGSNVDTLPTTAYEGITPFAINEVRAALKTIPKSSAPGVDGIVKEDLLKIPPQALMALFNNWLKFGAIPSCLKQLRTVFIPKTQSPTKGGDYRPLTMASMIYRVFSKIITRRLSTMFPLCRWQAGFTDDASTSTNTLLLQSIMRVQKVSRRSLYMCSLDISKAFDSISHKSITDALSKRNCPLGYLTLIEDLYFDCKTTYSLLGETDSKPVALNRGIKQGDPLSPLLFNLVFDELVTELSNMTGVSLSPGTSVSVLAYADDLFLLADTYSALDRLTRTVIQFLDRHHLNLNEEKSKYFGFHHAGKLKKFKYDLKKIKLKNTYLESVPPNHAIRYLGLNFYCNKLPTIDLNSFKEIWNRIKKSPLRTKQKYQLLASNVIPRYTYVLSCLLNPFISSLQADKMFRKVVKELYHLPVGFPTVLLRLPWKEGGLGLLDVEQQVLGTYCKSFGRLLRRHDPAIIELLERSAIKDIYSKAFTRVGLEYISSNNKEIERTIKTNKSMRLDNQLENLCCKDIQAFRRSPKSNSWLSPLNNYLSPRDTIRALRLRAGLSTTRSLTNKASGCLGSRQCRHGCNELETAFHICQTCPLVQGARMRRHNIIVQKVTKYISDKIPHSRVELEKLRLDGDGTRLRPDGVVLSPDTNYIVEVAVPWDCNEAALNKVYQQKLDTYESLRRKMNSEKPTQLIPVVIGARGLLFSKTVRHLKELGITDFQQRFLSNDALVGSLCVLTKFMAI

SEQ ID NO: 20779 - protein, 1013 aa, Ampulex compressa
MTLNIGEPTGSTDPATRNYGGEYSRSPQSTPPETYKCEVPTCGKIFQTARGRGVHYSKAHKDWLDANTQTTHKKAPWTEEEMSLMARKEAAMTKQGVKFMNQALIEQFPNRTLEGIKGKRKDLKYKRLVATYLEEETHEQIPQNNGTNPGHSEGPRDRLICFLRELDTVSEPKYKTNILNRICEKLEQWSDCRILEEITIYLQDIIPPKRQTPRKEPANPRATTKRELRRKDYARTQELWKRSPGKCLRSILKDVGTSQAPPTDQLFRFWEVTMTRESIARPTSQGAYRPIEDLWSPITVGEIKKAFPVNATAPGPDGLSPKELKLIPPGILVRIFNIFMICGRVPGYLLESRTTLIPKKENAGSPEEFRPITVSSVLIRTFHKVLATRLMSRLKLDSRQRAFCKADGCAENVFKLDMALNFHRKHFRHLHMASLDVAKAFDSVAHEAIMEALYESQAPQELIAYVKYVYNNSSTKLLFGHDQSGTIRPTCGVKQGDPMSPILFNCIIDRLIKRIPDEIGVRIPGGPHINVLAFADDIILMASTEAGLQKTIDLTTEFLELRGLRINTNKSVTVSLKNAPHRKKAVVDAGVTFKCAGSTLKPLKRTDQWKYLGVQFTPEGRLRVNMIGELRQQLEKLTKAPLKPQQRLYALRTTVVPSLYYNFVLGEVRCSALIRSDKLVRAYSRKWLNLPHDVPVAYFHTAIVDGGLGIPSLRWSIPLMRAERLIRLRRVLSNALPEQGSGNTYLDGEIRRAKERLAEHGTTYEKSTDLKNRWKRILYSSVDGASLADSSMTPGQHTWVGDGTKFLTGKDFINMIKLRINALPVRARTTRGGRVERLCRAGCYGSETLNHVLQQCHRTHDIRIKRHDAIVSYLQRNLMNQEYETYLEPRFSTDEGERKPDLIARLGQTAVVIDAQVVSEQTNLGRAHKAKVEKYTPLEQKIKERYGVRNVIFTSATLTWRGIWSATSFNQLHALGYLKKKEAKVISTRVLLGGYIAFRTFNGRTNIRRTGIG

SEQ ID NO: 20780 - protein, 974 aa, Paramacrobiotus metropolitanus
METNTVSPSSSATTASRRNQPVKQPVACPDCGELFTRLDLHRNKSTCLKTQASKERNILPTTKSAIPATVLCENQAQTLAKLRAATPLAPRVPRALRISVANDLCTLLNECCTGNTPAAWTKLSTFAFEIFRLPAEKTELSVTAALRLNLITRDAPPVPHIRPRQAAGNPEEAIARRVNSKFQDCAISAAVKALCSTDNVIRPSPESALVLQEKHPRACAHATPVDKPQAQFLISDVTTDEILDAVRSFPHGSSGGLFGMRPQHMKDLIGYGTNEHEKRLCSALAGAVTKMISGDLPDEILPSLYGATLTGLQKPNGGIRPIAVGNTIRRIASKIICRRVKDRMVEKLFPYQVGFGVKGGAEAAIHATRMFVSQEGECRVLVKLDFANAFNCVYRHKILETVKTEMPEYFPFFHQCYGKPTSLAFGEHIIQSEEGLHQGDPSAPLLYSLVTLPISKALKSTLKVSFLDDVTFGGEFDVVCEDIDTVRAMSAEVGLQLNEDKCEYYICGGNPEQRAQTEAAFVQRYPSMKRLTEQDVILLGAGITRESVGPLLEEKVDMVNKMISRLPLLPSHQALFLLKNCLSVPKLMHILRTSEAFSFPEILTKFDSTVRKSLERIVNVSITDEIWEQASLPVRVGGLGIRRTERLAASAFLASVNSVRSLVPYMTDLYSEAYATCAEKAWKSMGPAEFPDENLRASQRAWDIPVVLYQKEAVLRQTDSVNQKARLLAVSQPESGLWLNAVPVASLGTMLSNTEVRISIAQRIGAPVCVEHRCKCGSTVDKWGYHGLGCKHLKAKISRHNEIRDVIHRACGSASIPSVLEPPGLYRDTQKRPDGMTSVPFSQGKSWVWDVTCTDTMATSYIAKTSQEAGAAATMAEAKKNHKHGYLRDNFNFSALVFETMGVWGKESKCKMSILGKMLFERTQEKRSTQFLKQRISVALMRGNAACVQETFCIGLKSGETAFPEGTYCTYIEQ

SEQ ID NO: 20781 - protein, 978 aa, Riptortus pedestris
MNNSVDIQHLSNSNNTASDLVECHLCQKVLTKRGINRHLSRSHKGNEDKNVIKCGICGKECKNVQIHVSKAHPDAYRISQINPSHENHNANFSNDETDGINLQNCLQNWEYNFINLLKNDRNDSAFNDAINDFTNFLHGEQMSGKAPVHPATKYYEARKRRKNNLDGYTYRKERDPIKKRKRESERRRNRYNFELAQHYYYYRRKKVVQKIFDNPEESTTFNLDSLDIKNHFEHIFGSENNCQLDDYKECLDITEDIDFNENDLEAATKGISLDSAPGPDGIFVRTIRDLKCYKVMAHITNYMLKWSFVPDSFKLGRTILIFKSGDKHDVSNYRPITIYSILRRVIVRAIDRKLKPHVELSTHQRGFVACPGTFVNSSIINACIQNAKQGKKDCCIVFLDVSKAFDNVGHAHIKRTLSTYPIPIKMKKLVTSLLEGNRITCSLPKNKKTEPIPMMKGVGQGDPLSPFLFNMAIDFVFQELSEKDVCNAYGYQVIENLPNLSCCGFADDVALIAKDKASAEHLIEQAIDCFQKIGLKVNAKKSTAIIIDKGKLVKQEITTMDGQQIFSIGQNDKIKYLGVTFQQEICLDTEKLTSTLVEKLNKLSSSSLLKPDQKLNILNQYIWPIMIYPLQCAPIKDLKPSFLSKIDKIIRSCAKEILSLPSDTPNCMFYTSRKVRGLGLFNAYWEAFLQHINVCMALIKDMNPYVLQTRDLTSESSDCLKALDITIEKTVNINVRNLRQELRHKSFSEWCSLPAKGKGVETFNDWQAWMSDKKGLSSSEWTTAVKMNVNLVPVRSVPGRNLGNTHCRHCSEIETLPHVLGSCQWGEQMRNSRHHKVRTHIAHLLKKKHPDWDIFEEVACNSSDGTPRRADIVAIMKNEKKGLILDPTVRFEMHKNQADEVDQEKKSIYEPCCPYFSKKYQIQDWAVMGLLFGSRGVLHQKTVKTLIDHGLTKDDLKELSTLILKSSIRIVNHHLYKK

SEQ ID NO: 20782 - protein, 977 aa, Riptortus pedestris
MNNSVDIQHLSNSNNTASDLVECHLCQKVLTKRGINRHLSRSHKGNEDKIVIKCGICGKECKNVQIHVSKAHPDAYRISHINPSPENHNANFSDDETDGINLQNWEYNFINLLINDRNDTAFNDAINDFTNFLHGEQMSGKAPVHPATKYYEARKRGKNNLDGYTYRRERDPIKKRKRESERRRNRYNFELAQHYYYYRRKKVVQKIFDNPEESTTSNLDSLDIKNHFEHIFGSENNCQLDDYKECLDVTEDIDFNENDLEAATKGISLDSAPGPDGIFVRTIRDLKCYKVMAHITNYMLKWSFVPDSFKLGRTILIFKSGDKHDVSNYRPITIYSILRRVIVRAIDRKLKPHVELSTHQRGFVACPGTFVNSSLINACIQNAKQSKKDCCVIFLDVSKAFDNVGHAHIKRTLSTYPIPIKVKKLVTSLLEGNQITFSLPKNKKTDPIPMMKGVGQGDPLSPFLFNMAIDFVFQELGEKDICNAYGYQLIDNLPNLSCCGFADDVALIAKDKTSAEHLIEQAIDCFQKIGLKVNAKKSTAIIIEKGKLVQREITTMDGQTIFSIGQNDKIKYLGVTFQQEICLDTEKLTSTLVEKLNKLSSSSLLKPDQKLNILNQYIWPIMIYPLQCAPIKDLKPPFLSKIDKIIRSCVKEILSLPSDTPNSMFYSSRKVRGLGLFKSYWEAFLQHINVCMAIIKDMNPYVLQTRDCTTEISDCLKALDITKEKNEYLSVRNLRKDLRQRSFSEWCSLPAKGKGVETFNDWQASNSWISDKKGLSSSEWTTAVKMNVNLVPVRSVPGRNLGNAHCRHCSEIETLPHVLGSCQWGEQMRNSRHHKVRAQIAQLLEKKHPNWDIFEEVTCNSADGTPRRADIVVIMKNEKKGLILDPTVRFETSQNQADEVDQEKKGIYEPCCLYFSEKYHIQDWTVMGLLFGSRGVLHQKTVKTLIEYGLNKDDLKDLSTLILKSSIKIVNHHLYKK

SEQ ID NO: 20783 - protein, 867 aa, Riptortus pedestris
MTINERNDSAFNEAVIEFIQFLQNEQRSGKAPIHPATKYYERSKKQTGNLDGFTFKKARDPVKKSKREAERRRNKYDFDLAQHYYYYRRKKIVQQVFNDYEENILCDTDVSQVMAHFEQLFGTENHHQLENYHKCPNSSESDIILNETDLETATRGISLDSAAGPDGIFVRTIRDVKCYKIIANIANYMLNWSVVPDIFRNGRTILIFKSGDKNNVSNYRPITIFSILRRIIERAIDKKLKQYVELSTHQRGFVACPGTFVNSSLINVCIQNSKQAKKDCCIVFLDVSKAFDSVGHEHLRKTLSTYEIPLKLQNMVDSLLTGNQISISLAKRKKIEPILIKKGVAQGAPTSPFLFNMGIDFIFQELSEPDITNAFGYRLIENLPSLSCCGFADDIALIAKDKESAEHLVELVIDNFQKIRLMVNAEKSKAIQIKKGKLISTKLRTMDGQIIHSIGPDERIRYLGVSFKEEIWLDKDKLMNTLVEKLNKLASSFLLKPDQKLNILNQYVWPILIHPLQCAPLKDLQPSFLKKIDKVVRSCAKEILNIPSDTPDSMFYSSRNVRGLGMFNAYWEAFLQRLNVCSALKRDGNPYVLLTRNISSEITDCLSALKLRADENNNYSVKSFRQELRQSSFNEWCGLPVKGKGVETFDEWKKSNSWMCDKQGLSSSEWTTAIKMNTNLVPVRSVPGRNLGTTRCRHCSETETLPHVLGSCPWGEQMRISRHHKVRTQIAQLLKKKHPDWDIFEEVACNSSDGTPRRADIIAIRKNEKRGLILDPTVRFEINKKQADEVDQEKKSIYEPCCPYFIKKYEIQDWTVMGLLFGSRGVLHQKTVKILIEQGLTNDDLKNLSSLVLKSSIRIVHHHLYKK

SEQ ID NO: 20784 - protein, 981 aa, Riptortus pedestris
MNNSVDIQHLSNSNNTASDLVECHLCQKVLTKRGINRHLSRSHKGNEDKIVIKCGICGKECKNVQIHVSKAHPDAYRISHINPSPENHNANFSDDETDGINLQNCLQNWEYNFINLLINDRNDTAFNDAINDFTNFLHGEQMSGKAPVHPATKYYEARKRGKNNLDGYTYRRERDPIKKRKRESERRRNRYNFELAQHYYYYRRKKVVQKIFDNPEESTTSNLDSLDIKNHFEHIFGSENNCQLDDYKECLDVTEDIDFNENDLEAATKGISLDSAPGPDGIFVRTIRDLKCYKVMAHITNYMLKWSFVPDSFKLGRTILIFKSGDKHDVSNYRPITIYSILRRVIVRAIDRKLKPHVELSTHQRGFVACPGTFVNSSLINACIQNAKQSKKDCCVIFLDVSKAFDNVGHAHIKRTLSTYPIPIKVKKLVTSLLEGNQITFSLPKNKKTEPIPMMKGVGQGDPLSPFLFNMAIDFVFQELGEKDICNAYGYQLIDNLPNLSCCGFADDVALIAKDKTSAEHLIEQAIDCFQKIGLKVNAKKSTAIIIEKGKLVQREITTMDGQTIFSIGQNDKIKYLGVTFQQEICLDTEKLTSTLVEELNKLSSSSLLKPDQKLNILNQYIWPIMIYPLQCAPIKDLKPPFLSKIDKIIRSCVKEILSLPSDTPNSMFYSSRKVRGLGLFKSYWEAFLQHINVCMAIIKDMNPYVLQTRDCTTEISDCLKALNITKEKNEYLSVRNLRKDLRQRSFSEWCSLPAKGKGVETFNDWQASNSWISDKKGLSSSEWTTAVKMNVNLVPVRSVPGRNLGNAHCRHCSEIETLPHVLGSCQWGDQMRNSRHHKVRAQIAQLLEKKHPNWDIFEEVTCNSADGTPRRADIVVIMKNEKKGLILDPTVRFETNQNQADEVDQEKKGIYEPCCLYFSEKYHIQDWTVMGLLFGSRGVLHQKTVKTLIEYGLNKDDLKDLSTLILKSSIKIVNHHLYKK

SEQ ID NO: 20785 - protein, 981 aa, Riptortus pedestris
MNNSVDIQHLSNSNNTASDLVKCHLCQKVLTKRGINRHLSRSHKGNEDKIVIKCGICGKECKNVQIHVSKAHPDAYRISHINPSPENHNANFSDDETDGINLQNCLQNWEYNFNNLLINDRNDTAFNDAINDFTNFLHGEQMSGKAPVHPATKYYEARKRGKNNLDGYTYRRERDPIKKRKRESERRRNRYNFELAQHYYYYRRKKVVQKIFDNPEESTTSNLDSLDIKNHFEHIFGSENNCQLDDYKECLDVTEDIDFNENDLEAATKGISLDSAPGPDGIFVRTIRDLKCYKVMAHITNYMLKWSFVPDSFKLGRTILIFKSGDKHDVSNYRPITIYSILRRVIVRAIDRKLKPHVELSTHQRGFVACPGTFVNSSLINACIQNAKQSKKDCCVIFLDVSKAFDNVGHAHIKRTLSTYPIPIKVKKLVTSLLEGNQITFSLPKNKKTEPIPMMKGVGQGDPLSPFLFNMAIDFVFQELSEKDICNAYGYQLIDNLPNLSCCGFADDVALIAKDKTSAEHLIEQAIDCFQKIGLKVNAKKSTAIIIEKGKLVQREITTMDGQTIFSIGQNEKIKYLGVTFQQEICLDTEKLTSTLVEKLNKLSSSSLLKPDQKLNILNQYIWPIMIYPLQCAPIKDLKPPFLSKIDKIIRSCVKEILSLPSDTPNSMFYSSRKVRGLGLFKSYWEAFLQHINVCMAIIKDMNPYVLQTRDCTTEISDCLKALDITKEKNEYLSVRNLRKDLRQRSFSEWCSLPAKGKGVETFNDWQASNSWISDKKGLSSSEWTTAVKMNVNLVPVRSVPGRNLGNAHCRHCSEIETLPHVLGSCQWGEQMRNSRHHKVRAQIAQLLEKKHPNWDIFEEVTCNSADGTPRRADIVAILKNEKKGLILDPTVRFETSQNQADEVDQEKKGIYEPCCLYFSEKYHIQDWTVMGLLFGSRGVLHQKTVKTLIEYGLNKDDLKDLSTLILKSSIKIVNHHLYKK

SEQ ID NO: 20786 - protein, 981 aa, Riptortus pedestris
MNNSVDIQHRSNSNNTASDLVECHQCQKVLTKRGINRHLSRSHKGNEDKNVLKCGICGKECKNVQIHMSKAHPDAYRISHINPSPENHNVNFSDDETDGINLQNCLQNWEYNFINLLKNDRNDSAFNDAINDFTNFLHGEQMSGKAPVHPATKYYEARKRRKNNLDGYTYRKERDPIKKRKRESERRRNRYNFELAQHYYYYRRKKVVQKIFENPEESTTFNLDSLDIKNHFEHIFGSENNCQLDDYKECLDVTEDIDFNENDLEAATKGISLDSAPGPDGIFVRTIRDLKCYKVMAHITNYMLKWSFVPDSFKLGRTILIFKSGDKHDVSNYRPITIYSILRRVIVRAIDRKLKPHVELSTHQRGFVACPGTFVNSSIINACIQNAKQGKKDCCIVFLDVSKAFDNVGHAHIKRTLSTYPIPIKMKKLVTSLLEGNRITCSLPKNKKTEPIPMMKGVGQGDPLSPFLFNMAIDFVFQELSEKDVCNAYGYQVIDNLPNLSCCGFADDVALIAKDKASAEHLIEQAIDCFQKIGLKVNAKKSTAIIIDKGKLVKQEITTMDGQQIFSIGQNDKIKYLGVTFQQEICLDTEKLTSTLVEKLNKLSSSSLIKPDQKLNILNQYIWPIMIYPLQCAPIKDLKPSFLSKIDKIIRSCAKEILSLPSDTPNCMFYTSRKVRGLGLFNAYWEAFLQHINVCMALIKDMNPYVLQTRDLTSESSDCLKALDITIEKTVNINVRNLRQELRHKSFSEWCSLPAKGKGVETFNDWQAGNAWMSDKKGLSSSEWTTAVKMNVNLVPVRSVPGRNLGNTHCRHCSEIETLPHVLGSCQWGEQLRNSRHHKVRTHIAHLLKKKHPDWDIFEEVTCNSSDGTPRRADIVAIMKNEKKGLILDPTVRFEMHKNQADEVDQEKKSIYEPCCPYFSKKYQIQDWAVMGLLFGSRGVLHQKTVKTLIDHGLTKDDLKELSTLILKSSIRIVNHHLYKK

SEQ ID NO: 20787 - protein, 981 aa, Riptortus pedestris
MNNSVDIQHLSNSNNTASDLVECHLCQKVLTKRGINRHLSRSHKGNEDKIVIKCGICGKECKNVQIHVSKAHPDAYRISHINPSPENHNANFSDDETDGINLQNCLQNWEYNFNNLLINDRNDTAFNDAINDFTNFLHGEQMSGKAPVHPTTKYYEARKRGKNNLDRYTYRRERDPIKKRKRESERRRNRYNFELAQHYYYYRRKKVVQKIFDNPEESTTSNLDSLDIKNHFEHIFGSKNNCQLDDYKECLDITEDIDFNENDLEAATKGISLDSAPGPDGIFVRTIRDLKCYKVMAHITNYMLKWSFVPDSFKLGRTILIFKSGDKHDVSNYRPITIYSILRRVIVRAIDRKLKPHVELSTHQRGFVACPGTFVNSSLINACIQNAKQSKKDCCVIFLDVSKAFDNVGHAHIKRTLSTYPIPIKVKKLVTSLLEGNQITFSLPKNKKTEPIPMMKGVGQGDPLSPFLFNMAIDFVFQELSEKDICNAYGYQLIDNLPNLSCCGFADDVALIAKDKTSAEHLIEQAIDCFQKIGLKVNAKKSTAIIIEKGKLVQREITTMDGQTIFSIGQNEKIKYLGVTFQQEICLDTEKLTSTLVEKLNKLSSSSLLKPDQKLNILNQYIWPIMIYPLQCAPIKDLKPPFLSKIDKIIRSCVKEILSLPSDTPNSMFYSSRKVRGLGLFKSYWEAFLQHINVCMAIIKDMNPYVLQTRDCTTEISDCLKALDITKEKNEYLNVRNLRKDLRQRSFSEWCSLPAKGKGVETFNDWQASNSWISDKKGLSSSEWTTAVKMNVNLVPVRSVPGRNLGNAHCRHCSEIETLPHVLGSCQWGEQMRNSRHHKVRAQIAQLLEKKHPNWDIFEEVTCNSADGTPRRADIVAILKNEKKGLILDPTVRFETSQNQADEVDQEKKGIYEPCCLYFSEKYHIQDWTVMGLLFGSRGVLHQKTVKTLIEYGLNKDDLKDLSTLILKSSIKIVNHHLYKK

SEQ ID NO: 20788 - protein, 981 aa, Riptortus pedestris
MNNSVDIQHLSNSNNTASDLVECHLCQKVLTKRGINRHLSRSHKGNEDKIVVKCGICGKECKNVQIHVSKAHPDAYRISHINPSPENHNANFSDDETDGINLQNCLQNWEYNFNNLLINDRNDTAFNDAINDFTNFLHGEQMSGKAPVHPATKYYEARKRGKNNLDGYTYRRERDPIKKRKRESERRRNRYNFELAQHYYYYRRKKVVQKIFDNPEESTTSNLDSLDIKNHFEHIFGSENNCQLDNYKECLDVTEDIDFNENDLEAATKGISLDSAPGPDGIFVRTIRDLKCYKVMAHITNYMLKWSFVPDSFKLGRTILIFKSGDKHDVSNYRPITIYSILRRVIVRAIDRKLKPHVELSTHQRGFVACPGTFINSSLINACIQNAKQSKKDCCVIFLDVSKAFDNVGHAHIKRTLSTYPIPIKVKKLVTSLLEGNQITFSLPKNKKTEPIPMMKGVGQGDPLSPFLFNMAIDFVFQELSEKDICNAYGYQLIDNLPNLSCCGFADDVALIAKDKTSAEHLIEQAIDCFQKIGLKVNAKKSTGIIIEKGKLVQREITTMDGQTIFSIGQNEKIKYLGVSFQQEICLDTEKLTSTLVEKLNKLSSSSLLKPDQKLNILNQYIWPIMIYPLQCAPIKDLKPPFLSKIDKIIRSCVKEILSLPSDTPNSMFYSSRKVRGLGLFKSYWEAFLQHINVCMAIIKDMNPYVLQTRDCTTEISDCLKALDITKEKNEYLSVRNLRKDLRQRSFSEWCSLPAKGKGVETFNDWQASNSWISDKKGLSSSEWTTAVKMNVNLVPVRSVPGRNLGNAHCRHCSEIETLPHVLGSCQWGEQMRNSRHHKVRAQIAQLLKKKHPNWDIFEEVTCNSADGTPRRADIVAILKNEKKGLILDPTVRFETSQNQADEVDQEKKGIYEPCCLYFSEKYHIQDWTVMGLLFGSRGVLHQKTVKTLIEYGLNKDDLKDLSTLILKSSIKIVNHHLYKK

SEQ ID NO: 20789 - protein, 981 aa, Riptortus pedestris
MNNSVDIQHLSNSNNTASDLVECHLCQKVLTKRGINRHLSRSHKGNEDKIVIKCGICGKECKNVQIHVSKAHPDAYRISHINPSPENHNANFSDDETDGINLQNCLQNWEYNFNNLLINDRNDTAFNDAINDFTNFLHGEQMSGKAPVHPATKYYEARKRGKNNLDGYTYRRERDPIKKRKRESERRRNRYNFELAQHYYYYRRKKVVQKIFDNPEESKTSNLNSLDIKNHFEHIFGSENNCQLDDYKECLDVTEDIDFNENDLKAATKGISLDSAPGQDGIFVRTIRDLKCYKVMAHITNYMLKWSFVPDSFKLGRTILIFKSGDKHDVSNYRPITIYSILRRVIVRAIDRKLKPHVELSTHQRGFVACPGTFVNSSLINACIQNAKQSKKDCCVIFLDVSKAFDNVGHAHIKRTLSTYPIPIKVKKLVTSLLEGNQITFSLPKNKKTEPIPMMKGVGQGDPLSPFLFNMAIDFVFQELSEKDICNAYGYQLIDNLPNLSCCGFADDVVLIAKDKTSAEHLIEQAIDCFQKIGLKVNAKKSTAIIIEKGKLVQREITTMDGQTIFSIGQNEKIKYLGVTFQQEICLDTEKLTSTLVEKLNKLSSSSLLKPDQKLNILNQYIWPIMIYPLQCAPIKDLKPPFLSKINKIIRSCVKEILSLPSDTPNSMFYSSRKVRGLGLFKSYWEAFLQHINVCMAIIKDMNPYVLQTRDCTTEISDCLKALDITKEKNEYLSVRNLRKDLRQRSFSEWCSLPAKGKGVETFNDWQASNSWISDKKGLSSSEWTTAVKMNVNLVPVRSVPGRNLGNAHCRHCSEIETLPHVLGSCQWGEQMRNSRHHKIRAQIAQLLEKKHPNWDIFEEVTCNSADGTPRRADIVAILKNEKKGLILDPTVRFETSQNQADEVDQEKKGIYEPCCLYFSEKYHIQDWTVMGLLFGSRGVLHQKTVKTLIEYGLNKDDLKDLSTLILKSSIKIVNHHLYKK

SEQ ID NO: 20790 - protein, 1015 aa, Myxocyprinus asiaticus
MLRKEHLRKLHLILPHRSTEAIKKRLQTLKWTPPLLEEQHRQSPLSEVTPISPPLEVSTSPEKSEKRGARGKIWDAKEDKDLLEYADKTWEDGMLKKDLARSLSERMKGRSVEAIKKRLQTLGWKPLDTTEGIRQEHQAHIITPPTISQVTATSDQERESVWRGRMLNKALEMLEDPEMGSDMLKEITNELLEGRINIAQGAAKLNEHVQHLFPIKWKPHKPKKIQDQLITSNKRIRRARYAYIQRLYRLKKKDAAHTILQGHWREAYRGLNRTIDGLEEYWAEVYKATTTSTKCNKNTGNGDVKWELIDPIEAVEVTEALRTMGRSAPGMDKLTLLQLLRWHQPSVAGLLNLFLVTDALPTTLSSARVTFIPKVEHSLTPGDYRPIAISSVLARALHKILAKRMREHLTFSPLQYAFLQKDGCLEASALLHAIIRCIHEETRPMTALFLDLAKAFDMVARAAILQSAEGAGMPPPLLKYLSHLYSHSEVHLGELKTTCGRGVRQGDPISPILFILTMGDIVQQVTPQIGLEMGEQTVAAIAYANDLILLAEHPQQLQEKLDCLGEALENAGLSLNIKKSAAMTIIKDGRWKHMVLLPYSYSTKDGVVPPLNIADKQKYLGIEFGWKGKITPKQTLDLERMLTEVTAVPLKPYQQLEILKTFLVPKLTHELVIGCAHRNTLAKMDGMIRREVRKWLRLPTDTPLAFLYAPLNTGALGIPHLGSTIPLLQKARFQKLLSNNNIFEKALTGQPSFKTILRRVNIPCKIGQEVVCNTKEAKEEWVQLLKASVDGRDLLMAEVDKACFNCLERPDNVFPRLHLRGIQLRGGLLHTKAWAARGRGKDSDETRCRGACHEKETLNHILQICDVTHDARCARHNRVVKLISKLLKDKTDMTWIEPVIPTRTSFIKPDIMVVKDSHITIMDVSIVAGYRMEESYSLKTSKYGSPDNTVAIIEWIATKTPITHWPIIISSRGLIYGPLGRALRSLKLSSCDLSDISLLSILGSLKCYDHYKRGN

SEQ ID NO: 20791 - protein, 1148 aa, Myxocyprinus asiaticus
MGQPPIWGNLLVTDKKNDKEKPGPSGSRVYSRSVALARAGTSTQRTPPRTSFTCKDCDASFPSLRSLGMHRYHRHPEELNEERIHLLTTKRRMWSTLEDEHLIKVANEEWRESMLRKQHLRILHLILPQRSTEAIKKRLQTLKWTPPLLEEQLRQSPFSEVTPINPLPDEEHRQSPLSEVTPISPPQEVSISQKKNEKRGVRGKIWDAKEDKDLLEYADKMWVDGMLKKDLARCLFERMKGRSVEAIKKRLQTLGWKPLDTAEGTRQEHPSITSPMLCQETATSGQEKELVWRGRMLHKALGMLEDPQMGSEMLKVIANDLLEGRINIAQGAAKLNAHVQHLFPIKWKLHQSKKVKDQPLTSNKRIRRARYAYIQRLYRLKKKDAAHTILQGHWRDAYRGLNRTIDGLEEYWEKVYKATTTSTPCNKTSVTGDMKWELIAPIEATEVTEALRTMGRSAPGMDKVTSLQLLKWHQPSVAGLLNLFLVTEALPTTLSCARVTFIPKVEHPLTPGDYRPIAISSVLARALHKILAKRMREYLTFSPLQYAFLQRDGCLEASALLNAIIRRAHEETRPMTALFLDLAKAFDTVAHAAILRSAEGAGMPPPLLKYISHLYSHSEVQLGKRKTTCGRGVRQGDPISPILFILTMGDIIQQVTPQIGLEIGEQTVAAIAYADDLILLAEHPQQLQEKLDCLGVALEDAGLSLNIKKSVAMTIIKDGRRKHMVLLPHYYSTRDGVVPPLNIADKQKYLGIEFGWKGKITPKQTVDLERMLTEVTAAPLKPYQRLEILKTFLVPKLTHELVIGCAHRNTLAKMDGMIRREVRKWLRIPTDTPLAFLYAPINTGALGIPHLGSTIPLYQKVRFQKLLSNDNIFNKALTGQPAFKTLLRRINIPCRIGQEIICNTNDVKEKWVELLKVSVDGRDLLQAEVDMASFNWLERPDNVFPRLHLWGIQLRGGLLHTKSRAARGRGKDSEEIRCRGACHERETLNHILQICEVTHDARCARHNRVVKLLSKLLKGKTDMTLIEPVIPTRTSFIKPDIMVIKDSRITIMDVSIVAGYRMEESYRLKTSKYGSPDNIAAITDWTATKTPITQRPIIISSRGLIYGPSGRALRSLKLSSRDLSDISLLTILGSLKCYDLYKRGTSNI

SEQ ID NO: 20792 - protein, 1704 aa, Trichonephila clavipes
MRVLARASPPTIFIMPKKIKSFSQTPSSTPRRHSRGSPIAHRLRSRIATQQAVQQSICKVCHKQLFNQNELWYHLLKKHEHSPRGIEQMNAFPLPFLALARDPSAISFTEYCVSLRAFMRLKKEMDRKSTAPYGIAQTTRSCESSPTSMGPSAGCLKRSESCPNFSSPLPFEVSPTSQCPDSMLVGPPHNSVDRSPPAAHTSNPNTSPPPSQHQTTLLSTPSAQGKIQMESPTPKAVTPPRQTSTPPSPSVLDIVLRGDISLPPSPEVAELEATWKPVLTGSPPIPAFSPPTFSQVLQRKPPLRQRLSLLSCTKCNQSFYTQSGLAVHTCRVEGQLDSTPLAVEMKSRPASHKSSQEDVADVNSQPASTTPQKEVASCPDSRQPGIEEDAIFTSHPPSPSPPPLSKTGPDLADAENPPTQQSVRHRCNFCEKPLKTQKGLEQHLRAIHKRRLNQPDATPQAGKPKRKSIPFSSKQGRWCTNCANYVNDGLSPQDHRQQVHGNIRVHIQSEGDIHKCPKCPFETSSKKGLMYHDKEEHSAPNVSYTVSASQPSTSVAQAVFKDKLPAQPPVDKAALPTDKANVEDLTHAPLPNTASNISKVCLPDVTHQDSDITLAFPIHTLLECPVAGCSFQTKTKNWYTSSGSMKKHFVTYHRMQSVNIFFYCKLCKQRFTKKPSAHPCFKSTPFVIERPFSSEWECGECGVCFTSKTGLDNHVLAHKKAKIHESDIPIKVPPPSSVKKKNRRRKVKHLSEGEPGTTPLAVPPPPSTTIPVLQDQPVESPLIDVEECKVLCSFKEPLLHFLQHDDLPGATHDFFALVEDMVSVVREHFHLGSPPLEQGATPRRTRELDLQDPQAVQKCYAWNRRKLIRQLTSSNSTRCLISRDRLTEHFSSIWQAPNDPLDLPDIDPPERTQVCQILTPKFVAQCLQSAENSAPGPDGIMYKHWREVDPGSKILCQVFNACLKIKDIPPSWKKSSTILIHKDGEVDSVSNWRPIALSNTLYKLFTKCLARKLAEWCESHSVLSPAQKGFTPYDGVLEHNFLLAQHLEQAKCSKNDSLLAWLDVSNAFGSVPHEAILHALRAEGVDEEFLQLVTNIYVGASSAILTEEGPSDPLPILRGVKQGCPLSGILFNVVLNNTIKTVQGNTDEEKRILAFADDIVLLSHSTDQLQDLLNQTEQSLRRVALSLNPSKCATLHLSGSSPVGSRPSVFTVCGAPIKTLSDGDFYKYLGKPVGFSIRKDGTNINDAIIDGHKIATSQLAPWQKLDALKSFFFPSLNFAMRTGQFQKTDWIRVEESITKEVKEILALPLKASCSYLFGDSKQGACGVPEISRDSDSYLIDTAFKLLTSKDEEVSVKALAHLLCTVRQRLKREPTNADLASFLSGSMEGEFHSTTNAYHNHWTWARSASRRQCVTWSFVEDAPSLHFNGHTITTSGRRKLLKTLHSSQRLQHTEALIRLKSQGKAIECAAAHPASTHFLHTGRYTRFADWRFVHKARLNLLPVNGAKQWINAAARMCRRCGYSNETLPHVLNHCGVTSAGWQRRHNAILDRIKKAVAFRGKILSFNQKVGDSRLRPDIVALIDGKIFIVDVTTPFDNRLSSFDEARKAKIHKYKTLVPFFESLGYKEICIAPIVVGSLGAWDVNNDQFLRLICAPSYLKLLRKLCVSDCIHWSRDIYVEHISGHRQFSNDGTSVEDDCQDDPTTL

SEQ ID NO: 20793 - protein, 998 aa, unidentified
MALPAVRSGPASTWTLLITLVIVAAKGTDGFMSFKLPLLSTDTWSGYNNDVKTLLGPIHHELATNEMSPKLAGEGFSDIMCDFMASKPEFSHTTEESHSEGYISHEPQSLAQVKRLKNKLRKKAFRADATPEDRKAFRDAIKTYSFMKRQQKRKEMSKSAAHQEKEYHKNFWKFAGKCAKGQLDIPPVKPAFSLNYANEYYHNKYSTPTPIDFSKLFWFPHLPVEDQAPDNPFNMSPVRPKDIKAVLSKRCATSAPGPDGIMYGHLKRLPACHLFLSTLFSKLLESGDPPTSWSSCTVALLHKDGSPEDPGNFRMICLTSCVSKIFHQILSERWTKYMTDNNLIDPETQKAFLTGINGCVEHIQVIRELLAHAKKNRRTVHITWFDLADAFGSVEHNLIYYQMTRNKFPPIIMEYVKNLYSRLEGKVKGPGWESNPFSFGKGVFQGDNLSPIIFLTVFQPLLQDLKALEQQHGYNLNGQRYITLPFADDFCLITTNKKQHQKLINDISSNTKSMNLSLKPRKCKSMSITSGKPTETTFTIDGNAVKTTKDAPEKFLGGYITFSGKTKETYDIVAKTIQTTVENINQSAIRNEYKLRVYMEYAFPSWRYLLMVHDLTDTQLQKLDAIHTKAIKSWLKVQASATNAILYNTVGLNYKTISDLYLEAHTLAYSRSVLKADDKVKHALQAKLDRESQWTRKMKRWGLGKCHSIHQQAMNATTDTGWSSVRKQIKHQVTNMRHETWSEHQKNLQQQGHMLQLIEEEKCDLTWKSVMYDLPKGILSFAVRASIDALPTFCNLATWGKRTNDKCKLCGNRETPHHVLNNCGVSLQQGRYTFRHNSILKHIVFQENIDHSQIDARVYADLQGYTTNGGTIPVQTIPTAQKPDLVIFLPRENTIHIQELTVPFEQNIKASHERKVNKYTPLVSDLRNAGISVTLTCFEVGSRGLITPDNKDRIRTLFRSVKAKAPKKLFRDISRMSLLSSYAIWKARHEPHWDCAIE

SEQ ID NO: 20794 - protein, 935 aa, Branchiostoma lanceolatum
MSPKQAGEGFSDIMGDFMSSKPEFGQNREEHHSEGYISHEPKSLEQVKRLKNKLRKKAFRDNATPEDRKAFRDAIKTYSFMKRQQKRKETAKSAAHQEKEYHKNFWKFAAKCAKGQLDIPPIKPAFSVDYANQYYNNKYSNPTRVDFNKLFWFPHLPVEDQTPGNPFDMSPIRPKDIREVLSKRCSTSAPGPDGIMYGHLKHLPACHLFLSTLFTKLLSSGDPPASWSSCNVSLIHKDGSPEVGENFRMICLTSCVSKIYHQILAERWAKYMTLNDLIDPETQKAFLTGINGCVEHIQVMREIIAHARKNRRTVHITWFDLADAFGSVEHELIYYQMERNGFPPIIISYIKNLYSRLKGKVKGPGWETDPFPFGRGVFQGDNLSPIIFLTVFQPILQHLKGVEQQYGYNLNDKHYVTLPFADDFCLISTHKRQHQKLINEISTNTKSMNLSLKPRKCKSMSIVSGKPSDISFLIDGDPVKTTKDAPEKFLGGYITFLGKTRETYDILAKTIETTIENINKSTIRNEYKLRVYMEYAFPSWRYMLMVHDLTDTQLQKLDAIHTKAIKTWLKMQPGATNAILYNTRGLNYRTISDLYLEAHTLAYSRSTLKGDEKVKHAVQAKLDRESQWTRKMQKCGIKTSHTIHQQATHAAKDSEWSSVRKHIKQQVTDMRHNVWSEHQKTLLQQGRMLQLLEEEKCDLTWRSIIYNLPKGVLSFAVRASIDALPTFCNLIIWGKRNSDRCKLCGNRETLHHVLNHCSVSLQQGRYTFRHNAILKYIMDSIQEAIDLPQTNATVYADIQGHTINGGTVPAHILPTTQKPDLVTYLPEQRTIHIHELTVAFEQNINASHERKVNKYSALATELRAAGTTATLTCFEVGSRGLITPANKNRLRTMFKVVQAKVPKNLFRDISRIAILSSYAIWSARHEPHWEADTLL

SEQ ID NO: 20795 - protein, 920 aa, Branchiostoma lanceolatum
MSPKQAGEGFSDIMGDFMSSKPEFGQNREEHHSEGYISHEPKSLEQVKRLKNKLRKKAFRDNATPEDRKAFRDAIKTYSFMKRQQKRKETAKSAAHQEKEYHKNFWKFAAKCAKGQLDIPPIKPAFSVDYANQYYNNKYSNPTRVDFNKLFWFPHLPVEDQTPGNPFDMSPIRPKDIREVLSKRCSTSAPGPDGIMYGHLKHLPACHLFLSTLFTKLLSSGDPPASWSSCNVSLIHKDGSPEVGENFRMICLTSCVSKIYHQILAERWAKYMTRNDLIDPETQKAFLTGINGCVEHIQVMREIIAHARKNRRTVHITWFDLADAFGSVEHELIYYQMERNGFPPIIISYIKNLYSRLKGKVKGPGWETDPFPFGRGVFQGDNLSPIIFLTVFQPILQHLKGVEQQYGYNLNDKHYVTLPFADDFCLISTHKRQHQKLINEISTNTKSMNLSLKPRKCKSMSIVSGKPSDISFLIDGDPVKTTKDAPEKFLGGYITFLGKTRETYDILAKTIETTIENINKSTIRNEYKLRVYMEYAFPSWRYMLMVHDLTDTQLQKLDAIHTKAIKTWLKMQPGATNAILYNTRGLNYRTISDLYLEAHTLVYSRSTLKGDEKVKHAVQAKLDRESQWTRKMQKCGIKTSHTIHQQATHAAKDSEWSSVRKHIKQQVTDMRHNVWSEHQKTLLQQGRMLQLLEEEKCDLTWRSIIYNPPKGVLSFAVRASIDALPTFCNLIIWGKRNSDRCKLCGNRETLHHVLNHCNVSLQQGRYTFRHNAILKYIMDSIQEAIDLPQTNATVYADIQGHTINGGTVPAHILPTTQKPDLVTYLPEQLTIHIHELTVAFEQNINASHERKVNKYSALATELRAAGTTATLTCFEVGSRGLITPANKNRLRTMFKVVQAKVPKNLFRDISRIAILSSYAI

SEQ ID NO: 20796 - protein, 1001 aa, unidentified
MALPAVRSGPASTWTLLITLVIVAAKGTDGFMSFKLPLLSTDTWSGYNNDVKTLLGPLHHELATNEMSPKLAGEGFSDIMCDFMASKPEFSHTTEESHSEGYISHEPQSLAQVKRLKNKLRKKAFRADATPEDRKAFRDAIKTYSFMKRQQKRKETTKSAAHQEKEYHKNFWKFAGKCAKGQLDIPPVKPAFSVYYANEYYKNKYSHPTRVDFNKLLWFPHLPVEEQLPANSFDMSPVRPKDIKAVLSKRCATSAPGPDGIMYGHLKHLPACHLFLSTLFSKLLESGDPPTSWSSGNVSLIHKDGSPEAAENFRMICLTSCVSKIFHQILSERWAKYMTCNDLIDPETQKAFLTGINGCVEHVQVMREILAHAKKNRRTVHITWFDLADAFGSVEHELIYYQMERNGFPPIITTYIKNLYSRLKGKVKGPGWESDPFPFGRGVFQGNNLSPIIFLTVFQPILQHLKGVEQQHGYNLNDKHYVTLPFADDFCLITTNKRQHQKLITQISSNTKSMNLKLKPRKCKSMSIVSGKPSDISFMIDGDPVKTTKDAPEKFLGGYITFLSKTKETYDILAKTIETTVENINKSAIRNEYKLRVYMEYAFPSWRYMLMVHDLTDTQLQKLDSIHTKAIKTWLRMQPSATNAILYNTRGLNFKSISDLYLEAHALAYSRSVLKADEKVKHALQAKLDRESQWTRKMQKWGIGKCHTIHQQAIHAAKDSEWTSIRKHVKQQVTDMRHDVWSEHQKNLLQQGQMLQLLEEEKCDLTWRSAMYNLPRGILSFAVRASIDALPTLCNLTTWGKRNTDKCKLCGNRETLHHVLNHCGVALQQGRYTFRHNSVLKHITDTIIESIDTSRINATIYADIQGYTTNGGTIPVHTIPTTQKPDLIIYLPEQKTLHIHELTVPFEKNIKTSHDRKVNKYSTLAADLETAGISATLTCFEVGSRGLVTPENKTRLRTLFKIVKAKPPKTLFTDISRIAMLSSYAIWNSRHEPYWESETLL

SEQ ID NO: 20797 - protein, 978 aa, Branchiostoma floridae
MKSDQHQGQVAPSMHRGAGVPKNMAAVSRNIWVFTTRFVASEDVLHPVWTVSSVRFFSDAFVIVLGAPVSVGESHSEGYISHEPQSLAQVKRLKNKLRKKAFRADATPEDRKAFRDAIKTYSFMKRQQKRKETTKSAAHQEKEYHKNFWKFAGKCAKGQLDIPPVKPAFSVYYANEYYKNKYSHPTRVDFNKLLWFPHLPVEEQLPANSFDMSPVRPKDIKAVLSKRCATSAPGPDGIMYGHLKHLPACHLFLSTLFSKLLESGDPPTSWSSGNVSLIHKDGSPEAAENFRMICLTSCVSKIFHQILSERWAKYMTCNDLIDPETQKAFLTGINGCVEHVQVMREILAHAKKNRRTVHITWFDLADAFGSVEHELIYYQMERNGFPPIITTYIKNLYSRLKGKVKGPGWESDPFPFGRGVFQGDNLSPIIFLTVFQPILQHLKGVEQQHGYNLNDKHYVTLPFADDFCLITTNKRQHQKLITQISSNTKSMNLKLKPRKCKSMSIVSGKPSDISFMIDGDPVKTTKDAPEKFLGGYITFLSKTKETYDILAKTIETTVENINKSAIRNEYKLRVYMEYAFPSWRYMLMVHDLTDTQLQKLDSIHTKVIKTWLRMQPSATNAILYNTRGLNFKSISDLYLEAHALAYSRSVLKADEKVKHALQAKLDRESQWTRKMQKWGIGKCHTIHQQAIHAAKDSEWTSIRKHVKQQVTDMRHDVWSKHQENLLQQGQMLQLLEEEKCDLTWRSAMYNLPRGILSFAVRASIDALPTLCNLTTWGKRNTDKCKLCGNRETLHHVLNHCGVALQQGRYTFRHNSVLKHITDTIIESIDTSRTNATIYADIQGYTTNGGTIPVHTIPTTQKPDLIIYLPEQKTLHIHELTVPFEKNIKTSHDRKVNKYSTLAADLETAGISATLTCFEVGSRGLVTPENKTRLRTLFKIVKAKPPKTLFTDISRIAMLSSYAIWNSRHEPYWESETLL

SEQ ID NO: 20798 - protein, 948 aa, Branchiostoma floridae
MLGPLHHALSTNEISPKLAGEGFSDTMSDFMASKPEFYHDKEEGHSSGYVSHEPSSLTQVKRLKNKLRKKAFQANATSEDRKAFRDAIKTYSFMKRQQKRKEMSKSAAHQEKEYHKNFWKFAGKCAKGQLDIPPVKPAFSLNYANEYYHNKYSTPTPIDFNKLFWFPHLPVEDHAPDNPFNMSPVRPKDIKAVLSKRCATSAPGPDGIMYGHLKRLPACHLFLSTLFSKLLESGDPPTSWSSCTVALLHKEGSPEDPGNFRMICLTSCVSKIFHQILSERWTKYMTDNNLIDPETQKAFLTGINGCVEHIQVMREILAHAKKNRRTVHITWFDLADAFGSVEHNLIYYQMSRNKFPPIIMEYVKNLYSRLEGKVKGPGWESNPFSFGRGVFQGDNLSPIIFLTVFQPLLQDLKAVEQQYGYDLNGQRYITLPFADDFCLITTNKKQHQKLISEISSNTKSMNLSLKPRKCKSMSITSGRPTETTFTIDGKPVKTTKDAPEKFLGGYITFSGKTKETYDIVAKTIQTAVENINKSAIRNEYKLRVYMEHAFPSWRYLLMVHDLTDTQLQKLDAIHTKAIKSWLKVQASATNAILYNTVGLNYKTISDLYLEAHTLAYSRSALKADDKVKHALQAKLDRESQWTRKMKRWGLGKCHSIHQQAMNATTDTCWPSVRKQIKHQVTNMRHETWSEHQKNLQQQGHMLQLIEEEKCDLTWKSVMYDLPKGILSFAVRASIDALPTFCNLATWGKRTNDKCKLCGNRETLHHVLNNCGVSLQQGRYTFRHNSILKLIVDTLQENIDHSQIDVRVYADLQGYTTDGGTIPVQTIPTAQKPDLVIFLPRENTIHIQELTVPFEQNIKASHERKVNKYTSLVSDLSKTGISVTLTCVEVGSRGLITPDNKNRLRTLFKTVKAKVPKKLFRDISRMSLLSSYAIWRARHEPHWEYCAIE

SEQ ID NO: 20799 - protein, 1001 aa, Branchiostoma lanceolatum
MALRVHSAGALNTWTLLLLLTSVVTTGTNAFLSFKLPLLPTDTWTGYNNDVKALLGPLHHELATNEMSPKQAGEGFSDIMGDFMSSKPEFGQNREEHHSEGYISHEPKSLEQVKRLKNKLRKKAFRDNATPEDRKAFRDAIKTYSFMKRQQKRKETAKSAAHQEKEYHKNFWKFAAKCAKGQLDIPPIKPAFSVDYANQYYNNKYSNPTRVDFNKLFWFPHLPVEDQTPGNPFDMTPIRPKDIREVLSKRCSTSAPGPDGIMYGHLKHLPACHLFLSTLFTKLLSSGDPPASWSSCNVSLIHKDGSPEVGENFRMICLTSCVSKIYHQILAERWAKYMTRNDLIDPETQKAFLTGINGCVEHIQVMREIIAHARKNRRTVHITWFDLADAFGSVEHELIYYQMERNGFPPIIISYIKNLYSRLKGKVKGPGWETDPFPFGRGVFQGDNLSPIIFLTVFQPILQHLKGVEQQYGYNLNDKHYVTLPFADDFCLISTHKRQHQKLINEISTNTKSMNLSLKPRKCKSMSIVSGKPSDISFLIDGDPVKTTKDAPEKFLGGYITFLGKTRETYDILAKTIETTIENINKSTIRNEYKLRVYMEYAFPSWRYMLMVHDLTDTQLQKLDAIHTKAIKTWLKMQPGATNAILYNTRGLNYRTISDLYLEAHTLAYSRSTLKGDEKVKHAVQAKLDRESQWTRKMQKCGIKTSHTIHQQATHAAKDSEWSSVRKHIKQQVTDMRHNVWSEHQKTLLQQGRMLQLLEEEKCDLTWRSIIYNLPKGVLSFAVRASIDALPTFCNLITWGKRNSDRCKLCGNRETLHHVLNHCNVSLQQGRYTFRHNAILKYIMDSIQEAIDLPQTNATVYADIQGHTINGGTVPAHILPTTQKPDLVTYLPEQRTIHIHELTVAFEQNINASHERKVNKYSALATELRAAGTTATLTCFEVGSRGLITPENKNRLRTMFKVVQAKVPKNLFRDISRIAILSSYAIWSARHEPHWEADTLL

SEQ ID NO: 20800 - protein, 1003 aa, Branchiostoma floridae
MALPAVRSGPASTWTLLITLVIVAAKGTDGFMSFKLPLLSTDTWSGYNNDVKTLLGPLHHELATNEMSPKLAGEGFSDIMCDFMASKPEFSHTTEESHSEGYISHEPQSLTQVKRLKNKLRKKAFRADATPEDRKAFRDAIKTYSFMKRQQKRKETTKSAAHQEKEYHKNFWKFAGKCAKGQLDIPPVKPAFSVYYANEYYKNKYTHPTRVDFNKLLWFPHLPVEEQLPANSFDMSPVRPKDIKAVLSKRCATSAPGPDGIMYGHLKHLPACHLFLSTLFSKLLESGDPPTSWSSGNVSLLHKDGSPEAAENFRMICLTSCVSKIFHQILSERWAKYMTCNNLIDPEMQKAFLTGINGCVEHVQVMREILAHAKKNRRTVHVTWFDLADAFGSVEHELIYYQMERNGFPPIITTYIKNLYSRLKGKVKGPGWESDPFPFGRGVFQGDNLSPIIFLTVFQPILQHLKGVEQQHGYNLNDKYYITLPFADDFCLITTNKRQHQKLITQISSNTKSMNLQLKPRKCKSMSIVSGKPSDVSFTIDGDPVKTTKDAPEKFLGGYITFLSKTKETYDILAKTIETTIENINKSAIRNEYKLRVYMEYAFPSWRYMLMVHDLTDTQLQKLDSIHTKAIKTWLRMQPSATNAILYNTRGLNFKSISDLYLEAHALAYSRSVLKADEKVKHALQAKLDRESQWTRKMQKRGIGKCHTIHQQAIHAAKESEWTSVRRHVKQQVTDMRHDVWSEHQKNLLQQGQMLQLLEEEKCDLTWRSAMYNLPRGILSFAVRASIDALPTLCNLTTWGKRNTDKCKLCGNRETLHHVLNHCGVALQQGRYTFRHNSVLKHITDTIIESIDPSRINATIYADIQGYTTNGGTIPVHTIPTTQKPDLIIYLPEQKTLHIHELTVPFEKNIKASHDRKVNKYSALAADLKTAGISATLTCFEVGSRGLVTPENKTRLRTLFKIVKAKPPKTLFTDISRIAMLSSYAIWNSRHEPYWESETLLYM

SEQ ID NO: 20801 - protein, 1000 aa, Branchiostoma floridae
MAFRVHSDPCNTWTLLILLTLISTTGTEAFLSFKLPSLPSDIWTEHNNDVKAMLGPLHHALSTNEISPKLAGEGFSDTMSDFMASKPEFYHDKEEGHSSGYVSHEPSSLTQVKRLKNKLRKKAFQANATSEDRKAFRDAIKTYSFMKRQQKRKEMSKSAAHQEKEYHKNFWKFAGKCAKGQLDTPPVKPAFSLNYANEYYHNKYSTPTPIDFNKLFWFPHLPVEDHAPDNPFNMSPVRPKDIKAVLSKRCATSAPGPDGIMYGHLKRLPACHLFLSTLFSKLLESGDPPTSWSSCTVALLHKEGSPEDPGNFRMICLTSCVSKIFHQILSERWTKYMTDNKLIDPETQKAFLTGINGCVEHIQVMREILAHAKKNRRTVHITWFDLADAFGSVEHNLIYYQMSRNKFPPIIMEYVKNLYSRLEGKVKGPGWESNPFSFGRGVFQGDNLSPIIFLTVFQPLLQDLKAVEQQYGYDLNGQRYITLPFADDFCLITTNKKQHQKLISEISSNTKSMNLSLKPRKCKSMSITSGKPTETTFTIDGKPVKTTKDAPEKFLGGYITFSGKTKETYDIVAKTIQTAVENINKSAIRNEYKLRVYMEHAFPSWRYLLMVHDLTDTQLQKLDAIHTKAIKSWLKVQASATNAILYNTVGLNYKTISDLYLEAHTLAYSRSAVKADDKVKHALQAKLDRESQWSRKMKRWGLGKCHSIHQQAMNATTDTCWPSVRKQIKHQVTNMRHETWSEHQKNLQQQGHMLQLIEEEKCDLTWKSVMYDLPKGILSFAVRASIDALPTFCNLATWGKRTNDKCKLCGNRETLHHVLNNCGVSLQQGRYTFRHNSILKHIVDTLQENIDHSQIDVRVYADLQGYTTDGGTIPVQTIPTAQKPDLVIFLPRENTIHIQELTVPFEQNIKASHERKVNKYTSLVSDLSKTGISVTLTCVEVGSRGLITPDNKNRLRTLFKTVKAKVPKKLFRDISRMSLLSSYAIWRARHEPHWEYCAIE

SEQ ID NO: 20802 - protein, 935 aa, Branchiostoma floridae
MSPKLAGEGFSDIMCDFMASKPEFSHTTEESHSEGYISHEPQSLAQVKRLKNKLRKKAFRADATPEDRKAFRDAIKTYSFMKRQQKRRETTKSAAHQEKEYHKNFWKFAGKCAKGQLDIPPVKPAFSVYYANEYYKNKYSHPTRVDFNKLLWFPHLPVEEQLPANSFDMSPVRPKDIKAVLSKRCATSAPGPDGIMYGHLKHLPACHLFLSTLFSKLLESGDPPTSWSSGNVSLIHKDGSPEAAENFRMICLTSCVSKIFHQILSERWAKYMTCNDLIDPETQKAFLTGINGCVEHVQVMREILAHAKKNRRTVHITWFDLADAFGSVEHELIYYQMERNGFPPIITTYIKNLYSRLKGKVKGPGWESDPFPFGRGVFQGDNLSPIIFLTVFQPILQHLKGVEQQHGYNLNDKHYVTLPFADDFCLITTNKRQHQKLITQISSNTKSMNLKLKPRKCKSMSIVSGKPSDISFTIDGDPVKTTKDAPEKFLGGYITFLSKTKETYDILAKTIETTVENINKSAIRNEYKLRVYMEYAFPSWRYMLMVHDLTDTQLQKLDSIHTKAIKTWLRMQPSATNAILYNTRGLNFKSISDLYLEAHALAYSRSVLKADEKVKHALQAKLDRESQWTRKMQKWGIGKCHTIHQQAIHVAKDSEWTSVRKHVKQQVTDMRHDVWTKHQENLLQQGQMLQLLEEEKCDLTWRSAMYNLPRGILSFAVRASIDALPTLCNLTTWGKRNTDKCKLCGNRETLHHVLNHCGVALQQGRYTFRHNSVLKHITDTIIESMDPSRINATIYADIQGYTTNGGTIPVHTIPTTQKPDLVIYLPEQKTLHIHELTVPFEKNIKTSHGRKVNKYSTLAADLETAGISVTLTCFEVGSRGLVTPENKTRLRTLFKIVKAKPPKTLFTDISRIAMLSSYAIWNSRHEPYWESETLL

SEQ ID NO: 20803 - protein, 970 aa, Pogonognathellus flavescens
MNNITNRFSDIVQSLPHENPKIRNLRSTCTNKVVKSGGNVPITNDSDKHENTTQFIPDLSPILRNIRNNRSRNGDETRPNNDSIIISTSQDKPCPECHEYFKGDRGVSIHFAKKHGKQYRNTITSKYDTTNNENPTPTEERSEIEKINEKLQKYNYKFQSLLNANECNENEFDTLFNEYIKELFHSQDFLPAPIHPAKRYYNMRKNKTLFIENPNNTTYQQTTNPQRNDKKRRQRNNHHYQSQMIQHYYYFNRKKCVDNLMNTDEKKNCTASLQDIYNSFSNRWSIPNDHTRIQYDEPPTNIEQEYLNNQNTTDISKDEVEECLKKINTDSSPGQDRIYVKTLKTLDCCKTLSLIFSYMYTWNLFPECLKLARTVLIYKNGEISNPNNFRPISICSTIRRLFERILTKKLERFYETSEFQKGSSNCPGTYINTSILDGCLKRAKMKKEDLMIIFLDIKQAYDMIGHKHLSNVLNNLHIPTFLRSMLLNLTQGNATQIEINGKKTEKILFNKGILQGSPLSSLLFNISIDHVIKEISEIEVASSFGYQIEEKLSNISILNFMDDTSLFANSKTSGVFLYNMSKRLFNEIGLQFNINKTQSILLNKGKLEETTIHFNEEESVSTLKTGETIKYLGINYNNEITLDKGKFLSKLTSNLNLLASTPLLFPQQKISILNIYIWPRFIYTLQSSNLSLLPKSFLENTDKILRNTVKEMCHLPSDYPNSSLYSSTKKKGLGIIRTTWEAPLQIFNISMQLLRNNNKYVKMLRDLNGDIDKCLQRMNIENEYNNLDTNKLKNREITKTLRDILRNKEYNQWCKLQCHGRGAILYEQCESINNKLFFKQGLSSSEWITYLKMIPNVTASRSNPGRSQDGFHCRRCSEQNETLAHILGFCPFGLLHRNSRHHLIRTIIADELRKSGFEVEEEIHTIGSNDSNRRLDILAIDRNNKKGYILDPTIRFESTLEQDAAVDEEK

SEQ ID NO: 20804 - protein, 1038 aa, Dicyrtomina minuta
MFLPWSSATHPRSPSPPSSILDGSFNFDQFTDMVNNLDQNDGNMEPAPIEIPLQHSPPPNTTTVRNAPPPANTLHASQEDLQHHPHLSDGEDDDDPQHLNPHPLPLPPNNRPSTEQELDLINADDQTAIHDFTEELTRIYNEPCSLESWNAFEALLEDLILCAQAEVHLPEAPIERSSSSTPDPSNPEQIQKLYRRNRRKAIRLITGNGGDYCSIAKEPISEFFTESYTAKPCDPAFYDEVPRAPDEIVLLEFTGEVVTNHLKRCENTAPGGDRLTYHHWRSLDPSGKLLALICNICRIYQQIPKTWKASKTILIHKKGDKDVISNWRPIAISTTLYKIYTGLVADCLRSWMTTNNILHPSQKGFTPHDGVFEHNFLLQELMEVAKLDGSDLCGALLDYSNAFGSIPHQAIFLSLEHYGAGEEVINIIKDIYNEATTCVMTNGSETAPIPIRNGVKQGCKLSSWLFNLAINPILERLHSRFQNPTAPPSPHATAYADDLMPLDTSIHPVTNLQKKINFVNTESKRISLHLNPTKCISFHLSGKTPVGMRPTQFTINNNPIPSLRDGEATKFLGKPIGFQIVSDYSELNDHINFGFQILRSQLTPWQKLDALKTFFFSSLTFGMRTTQFKKEEWQAIDDALRPEIKQNIFVPKRASNEYIYGSTDAGALGIPNAADDSEIFAIDSAFKLLTSRDDVIQTLAKKSLSRTVALRMKKATATWPEITAFLSGSNSGSLNNNEGGNRHSNIWTRARSASSRLKIKWDFFEDKFKLSRYDVTLKIKDRHKVARVIRDQIRGTRNSRLLSFRSQGKALECVSKDPASRHFLNTGRYTRFADWRFIHKARLDLCPVNGASWKQESDQRCRVCGYDQETLPHVLNSCPSFSQLWMQRHNAVVDRIKKAATGLHKLDLFSENQPVGNSTLRPDLIFVDPRTRKAFIVDVTIPFENRGASMEAARKKKDEKYAALCNQFKSQHSYNSVTFHAVIVGSLGSWDPKNDKFLKRICAKSYLSMLKRLCVSDVISKSRDLYVKFMATANRNTV

SEQ ID NO: 20805 - protein, 898 aa, Frankliniella occidentalis
MVPTQEPPTGPYIRLTPVDAPFGLIKEPDICLALRELREVVSPEVQHLIDLAESSQDPHILAERMDSYILQIPRNESPKKPKRGKKKTYRNKLKGNRSKRRAKEFAQYQHLFQQNPGQVAANLINGTDLEVNVTPSEEDIHKFFESTYSKTQVPWQPRPPAEQAVVNLRQPITRTELVAALRRMNESAAGPDGITRADLRAINQNDLLALINIIWGAHLLSPVLKLNRTALLPKSGDLTNPKNWRPITIASKLLRLLQQIVSQRLEKSIPLHFSQRGFTPQDGVLMNNTILQAVLKTYRAAGKPLTVLSLDLAKAFDRVTIESIVDALRKARVDEATIRYVQANYEDITTILQCHGIATSPIPLKRGTKQGDPMSGFLFNLIIDALLYLLHEYPGVDLNGTPVKAMAFADDIILFANSPDEMTEMISCAMAFFTHHRLDVNVEKCSALQLLRVPNTKRTCVFTKPLLKIDGHNVPTISVDEQFKYLGHKYAHYGVKTPTLSKLDAVLLRIKSAPLRPHQKLLILQRYLVPALYHGLQQTNITAGKLKTYNVKIRSFVKSVLHLPRTTPDICIHAPLRFGGLAIPDLKIQVAATLERRLAKISLCPDLDVQAALTTATVKTLKDRLSRITRALNGNSAQNVKNYYRAQIQGTALMKGFSAVRVPSQWIYAPPDFWRFGDYIRAVHLRFGLLPTTSTPWRQAECRNPSCAEQENLYHVTQRCPVTHFSRINRHDAINKQLVTAIKRKEYNVLDTPTIHGTAVDGDSSWAGQCFKPDNIVVTSNTAYVIDTTIAYESYEQSVNAAYAHKILKYNAPAFIQGVKKLTRAKEVKNLPFVLGARGTWHPENDRILAIFGLHPATRDQMATSVLQWGSTIHKIFNATVWRMSPPLHRKACKKKTT

SEQ ID NO: 20806 - protein, 1108 aa, Steganacarus magnus
MTTTINENPSASNPCICENGNLINIDLRNDIPQTNNVSDCSFPTQSVVTRNSSLEILVSGEKTKFSCPVTDCSVTFPFMIHLETHLNAVHSLVPAFKCEKCGVGCRSYRAGRLHYKWCINVNPVTSRRVEPVLSQVETVSAGRRGRNQSWTEAEKSILALAIQNNRENLNLNAVARDLEHLFPDRTWNQLRCQLQRMKASGSLETLPAELCPEPEMVEQRDPSAAIVNRQFLRREIERHCDVLSMLGKFSVFTDKVMKFLHRSEILSKHEVDVLFDSYLTLLPSTKTDKKKAHRRNLNGVNEKQSGKSGKRQKVADFSRAQLLWKKSKKDLYREVMNGQSGRVKLDPVKTFEFWSGTFEREKLDDNERVKQFGQVPDNVWRAICEREVQLALTKMKNKANGDDNISQESLARVPVELNCCMLNVIMLSRHVPTRMEGSRTVLIPKTAPASEQPSDYRPISMSNMLQRLFHKILAKRLSGNVKLHSSQRGFVKADGCLENVVLLDHIIRNQRRIHKSLYFACIDVKKAFDSVKHASILRACRNFGLPEDMIEYLQNVYANGTTRLDIPGMPRRINLSSGVRQGCPLSPIIFNMVVDELLRELEKANLGVLVGNKSVSSLGFADDLTLISGSERGLQQLVNICEKFYEQRGLALNPSKSVAVGILSDGKKKRCVTLDKFSLRIGGSEPKFVKTSEAFTYLGVDFNPNGKMKPNTDALKKNLGLLLKARLKPNQKLYLLKNFLIPSFLHKLVLGRFTMGLLNEFDSILRTFVKNITGVATSTANMFFYTKIRNGGVGLPYLRYSIPLMLYGRLKSIHRSRDTTLQAFCKTQDCEDQMKKLEKFLTTDGDSIKSKSRLVRHVVKLSKKTRVGRSLECFSQEKKTNEWLSGCYPSVHGETFNRFIQLRTESLPCRSNAHTGFAYVPCRFGCRTQSGSVCNESLPHILQKCRISKDNIIRRHHEMRDLVRDDLRKAGHRVIAEKSVRVQLPGLTKVYRPDLICITDEGIHVLDTAVTYEKDAAQLEQMYKLKSSQYVLESDSFEAALRKEIGCGSLPIHFNGLVFGSRGAVSRETAKVLESLSVSKRRLKYYSLRVTSLSIRVWKGFNQSCKSC

SEQ ID NO: 20807 - protein, 1325 aa, Microplitis demolitor
MSIMESERNTNVQRRAYPPVLFSPRVVLFRLSNEQLTGHGVHHRNINEAGSDTPPMPVRVPRCLSKRQRIGHQQHHGECLQPPIIGRNLTRNNVYKNSNYGERADITISPSSENISLNSDNINTFTSNSTLNSIHDCNPGPDEAIMPPTEDPVPNDEYFCPYCEKTFSTVRGLGVHKRSKHPAQTNEEIDLTRRKYRWLDEDLRRFAYKEAQASASTININQYLYENVKIDPPRTVSAVSSLRRTKKYRDLVIKYRQEASSRIENLEETQNSQVEVGSTDQDQQDCNAECEALNENRNLDIDPVGNQYVDEMTQDAGTGNNGTHHSPLRRNRKPRWTEESIRDYALVEASILEMPSNINNYLFRKVKNDGSRTYSALCNLRRRKKYKDLVQKLKDAINAGEIGNAEINSIIVDENQGEKQSRTREQVSEQDEQPNNLFNIRDTGTDSQAEDIGKKKERESWFRAAKLYLSAQKCNVSGKNHLIMAIDLVSRGEDPSASLEEWFYSQFPELKASRIRKRRQNVVEHMKVSKKRKRRREYAEIQSLWMKNRSKAAKKIIDGDTDKYRHPNLESQVRFWKPIMEQTHDMRLGREPERSEENIARTFEFLLSPVNTTEVKKHRPDAGTAPGPDRLEASNWLRQVPDRVKATVMNVVMAWGHVPRMWRDSRTILIPKKADSMDPSTYRPLSISSIVLRHYHKILAARLARIPLFGEQQRAYIKADGVAENVNVLASILNDAWINRKQLHIGSIDVRKAFDTVKHPSISKCMIERNVPEEFAKYIDDLNAQAHTVIEVDGEYSEPIHPGQGIRQGDPLSGFCFNTVWDEVVKSVPEAIGYVLEGVSVNSMAFADDFLIIASSKEGLQEALDKAVSQMRIHGLSPMPTKCSCISMVPSGWNKKVKLLTTSQFEIDGNPIAQVGIEDIWKHLGVEFSFKGPISPQVQIEEMLSRITKGPLKPQQRMMILRTFLIPRFLHSLVLGKPTHRLLRQLDKLIRKFVRIWIRLPNDTPIAYIHAPIREGGLGIPAFQTKIPELTLRRLDSLANSTFPAAVAASRSQYSQARRRWCTKVKIQNSEWPKRLHNAVDGWELRETRNTNFSYGWVEDPSVNIPSHDWINYIRTRINALPSRMRTTRGPRRQVNDYMCRAGCQRTETTAHIIQNCHRTHGGRMLRHDALTKVVAATLVRKNYDVRREKVYEIMERHRKPDLVITREGRTVILDAQVVSANKGLQSAHELKRNKYLRNSSLMCEVSRLTGTPIPRIEVATLTISWRGVWAKASNDIMRSLGVSRATCIGLTTRVLMGSFLNFRRFNQMTTMASPRNWSRRSENG

SEQ ID NO: 20808 - protein, 782 aa, Strigomonas galati
MEIGAVGRAARTVYSSDMRHATREEVEQQMPGLHPAEAPHGLQPPEPTRIAFVEVAQVRAALMKRLGKGAAPGLDGLTRELLVPVMEDTQPTELQGELTELVHDIVLGRVHPDYRERLVASVVHPLVKPNGKLRPITPESALLKVASHVVLEAVRADTVRLFAGYQYGVGGDVSVAANHIKAVYRQPGTEVLVALDATNAYNSISRRAIMEACYGTPSMQPAWPLVDLLLGQPGRLGVYLDGTRVMDMQSTCGIRQGMVLGPLLFALAMHKALAPCLPVLKRMGVQVVAYLDDVHLLGTVERVTEAVPIVCEALSAVNLTINKAKSVFMCKDATVTDVGGITKREVEMRVLGAGLRFDGSSVAAWLMKQVQEHDSYFAKLRGSELPLHTVFILLRASVIPRMNFLLRTHTPEELRDAVRYFDAQVLRTVESMAYQERLPDAALLLTKLPMSDGGLGLRSQEELAAFTSECVGNASLQRSRTRAVDTRHLEALNLLLHSEPASLQVLRSNCSGGARRAFADPAMRIEDASFRLALLQRLMIRVLPVGVSCVCGADATNHHVNTCARNAAARTYRHNTVLDALELWCQQIGYSTSKELMRGDGSQRRIDLVINSMTAHFATDVGVCYPGQRHAKALQRMAGDKVNDWQAWATLTGKAFAPFIVGTTGEIWGNTVRFVQQVTVNRPNPYSAYTSRNELVGTVVRSVLYGNTLVFATVDRSWQRWASSRDTIDRREATGTGIGGAGATIPTAREAPRREHIGGTTHHAQQVSAHAPGYSSSNSNMP

SEQ ID NO: 20809 - protein, 2348 aa, Autochton oryx
MPSNPHQALTGSNSSSAGKAAESAAPAAAAAAPAKQQQPPPPPKRTEAPPRNKTAVQKPAPQAAPQAAPAAAAPARRQRDPLTTEKRRELIQRGFMHQVHGKWMFRPKLPPNPDEECYRCGQLGHYAYLCRAPKEQETFRWQMSVLDEQRELWGDNEPPTGVAQARDRARPVATGKQGVLQEPGSGSGNNANNSTATAGAARYPPLPPQPPRNTDGKPYMQALLHSKHGRGAQQQQQQQHQQQQARDRQRADRQTLERLAWEDDPSHDPPTDELVAAAEEMSADQFERMRLLNAHAQSAVDLMEAEFVARMQIYEQAARCTMRLQQCPYCEWAGIAPAFGKHMMDRHFAPARMSLGAELLRRAQEQQAALLAQRDAELQQLHGLLRTEGQAAGFRAECREEMQRLQAHKQQAWTEAAAELQATQQQQQQAAPPQSTPSKKQQQEKEKERGGARRTDRVDEEEEDDDVTAPPPAPPNTQGATEAHPACGVPTLGPGSDPNPPPPTPTNHPPPPPPPPPLPPHPSQQVHSGGGDGGAAAPAHLYASETSQDWDSRRGGGSGTAGSRSGVKRSTTVDDDARRRARQARKQRVTAQDEAKAGVRGGEPSSDSGDEPAQWEEPANSPRTVADHTEPHAQQPGEEVTAAGAHQPQQQQQQQQQQQQREAEAERAFVLGMTQPSTQEEAMEPQTPSPVPPSPAPTTPGIPATTAHSTIDVDATPSSAPATAATTATPDAVWPSHFTLDVSRAPTADTQQSAYAVRTVGTARERDGTCALAAVLDGISLACPDMEAERDSGAGHSFYEEMRLLANVQRGIPHSAVHVAAALHAAHARWAPAVVGGLRGSSVTAYEAPAERPHNAHLWGRSGGPRTLPPYFRTVHNQEDRQVWQDYTLVGAVKFDPAQQHLFFTFETEPLDHAEHMAVLGWYERVGYDESIDPTTPEAVDVSTLPPLRTLQRQDAQDDLCKGCGHRRRGGGGKRSHRATATSSSSSERSQATPPQPQLALGEREGSSRGGATPQRHGEAPPCAERTPGADKETEPPPPSLFPTADSLATTPESPRTKQPRRRRSQTGRHRTRPALEEDGDEEDERLPRELTLRAGVAPMGPTLVQTLRPGDAGTVPLELEDEEAAPATPPPAPYDDQEDLVWHEETTATTAAVTPTTASTTPPPPPPPQSDCALHAVVDQQAALMQQYEQEQDAPCSPAPPPPEECVEQEAPMPREDNNDTTTGHEPVGESSYDHHPHTHSNSPDDPLAAMATADEEEELEAEEEEPACPAATHPAPADVPQFLHTENKCRARKLEWPCPVPGCVQTFKRVQMVNDHLATAMHTRGQVAALDAARLKALDYTRCLWCGRLLAATAQTRTMHMHSCAFRSQDAAQQRYVAPQPAVGAPHHAPADAATTMPEAAPPHTGGGVGVTFYDLEHPPPPDPALTTYLPPETSTEDWLRELPQTYRKLHKKDWPPWIRCLSCILIGYKNSNKAERGRRQLQLSELTRKYRKTQRARRPVSSDAPVNEEEEATGGNGAGSLPCSPEDEEGDDTHTHTHTHTHSDSSSTPHERRIPVAKVASLMEIGAVGRAARTVYSSDMRHATRAEVEQQMPGLHPQEAPHGLAPPEPVRIAFVEVAQVRAALLRRVGKGAAPGLDGLTRELLVPVMEDAQPTALQEELTELVHDLVLGDVHPDYRERLVASVVHPLVKPNGKLRPITPESVLLKVASHVVLEAVRGDTVKRFAHYQYGVGGDVSVAANRIKALYAARETEVLVALDATNAYNSISRRAILAACYGAPSMQPAWPLVDLLLGQPARLGVYLDGERAMDLRSTCGIRQGMVLGPLLFALAMHEALAPLLPRLAAMGVQVVAYLDDVHLLGGVAAVREAVPLVCAALARVNLHINVAKSVFMSKDAAVRDVGGIATRMEEMRVLGAGLRYDGAPVTDWLLAQVRQHDGYFAKLRGSELPLHTVFVLLRASVIPRMNFLLRTHAPAELGPAVRYFDAQVRRTLEAMTYQSALPAAAALLARVPMADGGLGLRSQEELAAFTSECVGDAALQRSRTRAVDTRHLEALNQLLAEDAASQRVLRSNCSGGARRAFADPAMRIADAPFRLALLQRLMIRVIPRGVPCLCGADATNHHVNTCGKVSAARTYRHNAVLDALELWSQQIGYSTAKEVMRGDGSQRRIDLLVNSMTAHFATDVGVCYPGQAHGQALQRMADEKLTDWRAWSALTGKVFVPFVVSTTGEMWGNTVRFIQQVTASRPNPHSAYTSRSELVGAVVREVLFGNTLVFATVDKTWQRWAGSRDSVERREAPAAAGGGAGSGGTGRRPAPPRREHVSGSSAADEDCATASSMSHQPLATKQ

SEQ ID NO: 20810 - protein, 784 aa, Strigomonas culicis
MEIGAVGRAARTVYSSDMRHATREEVAAQMPGLHPWEAPHGLAPPEPVRIAFVEVAQVRAALMRRIGKGAAPGLDGLTRELLVPVMEDAQPTALQEELTELVHDLVLGDVHPDYRERLVASVVHPLVKPNGKLRPITPESVLLKVASHVVLEAVRGESVKPFAHYQYGVGGDVGVAANRIKALYRRPATEVLVALDATNAYNSISRHAILAACYATPAMQPAWPLVDLLLGQPARLGVYDGAAGGGDGARVLDMLSTRGIRQGMVLGPLLFALAMHGALAPLLPRLAAMGVDVVAYLDDVHLLGGEASVRAAVPLVCDALRGVGLVINTAKSVFMSKRAGTADVGGITQRVEQMRVLGAGLAADGVTSVGPWLLEQVRQHDAYFAKLRGSELPLHTVFVLLRASVLPRMTFLLRTHTPEELREAVRYFDAQVQRTLEAMAYQRALPPVAQLLAKIPMADGGLGLRSQEEMAAFTSACVGDSALQRSRTRAVDTQHLEALRQLLSQDTASQRVLRSNCSGGARRAFADPAMRVPDVPFRLALLQRLMIRVLPSDARCVCGEPATNHHVNTCARLGAARIYRHNAVLDALELWCRQIGYSTAKEVLRGDGSQRRIDLLVNSMTAHYATDVGVCYPGRRRATNPLQQMAEEKLSDWRDWSALTGKVFAPLVVSTTGELWGNTVRFIQQVTATRPNPYSAYTSRSELVGAIVREVLFGNTLLFATVDWTWQRWAGSRDSVPEARPGATGRGRAVPPPQPRRAHGSDLVGASAMADALEGFPIEAVGVC

SEQ ID NO: 20811 - protein, 1145 aa, Trichuris muris
MTSTTNNTQQNDPVRTAGSEGAQLCIATYPGPFQCSICGFITVTGYNFVEHANRHGVRSVFSCSKCSRHFPTINSVAAHFKRWCRGSPASPPSEQPGPATSSSEASWPCQDCGRTFTTKTGCKLHRRNAHPAEHVLDQPRERRPRWSNFEILALAEIEASLPANTPNFRDTLIAELFNRHGIRRNLEMVKGQRRKASYKALVERLKLQLAADNDLGMNRHLSHITEEDLSTGSTPADNLSPMVPAVNQLHEALSAEELSSELVVELTGLAERAVSGESILDLTAEVVLRALNIPPARVRSGNRSRGAPRNARQKKQERFRQLKKLYNSNRQRLAEVLFDGAASSDHAIPLAECFQYFKSIFGRKSLPDTERFVMKASGPQFDLSAPISLQEIEIALKKMPKRSSPGPDRATVAMLSGLPRCALYILFNIWLYYKDVPKTFKLCRTVLIPKKQPPQSPKDFRPITIASVFYRLFTKIISVRLASCVQLNPRQKAFMPGVNGCGENAFLLHTALIHSRRQGKELSLATLDVAKAFDSVSHSSIQRALRRHGAHENSIVLVSNLLADSFTRIEHTEGKSDLIPMTCGVKQGDPLSPLLFSLVMDELLDQLNDLDGGFHFTDEHQLNCLAFADDILLMSSSKAGLQSLLLHSYRFFKLRHLRLNVDKCFTLRLYRIPKARSVCVDVLSEFYLDPVEPTTVLPRFTPSDYLSYLGVDFNPYGKRCKILERVESMLQCVARAELKPQQKIQMIRAHLIPRLLYSFCNGNPTAGTAASADRLIRQKIKALLHLPQSTMSDHYFYLPMKEGGLGLLSLSESVDFSMLTLYRKLAASRDPVVRAATGLWFNVYRCSRLARRHNLEDISERSILQAKTAALERHRTKFAATYQGSGHREFVEACSNLWIEGERMTGRSFIASIKARTSLVPTRLQTLRGRAEPGDQRVLCRRCGHISGSPESLAHISQNCTFTHGLIVRRHDVIVKKLASLAEASGFTVTVEPTLRHEDQAFKPDLIAVKGDKAWALDVAIPFETTDALARRHVEKCRKYACLGGPVLKLTGAKVYKTGSIVIGARGAWCSKNNGTLNDMDWALPEKIKALLCTMTLERTNQLISWFMRTTPNLAFHTTFRTRGLEGHESVRPTNFGSNAHHTAE

SEQ ID NO: 20812 - protein, 1088 aa, Nerophis ophidion
MLKVDSPVTQQTEKREPGRKGTIKWPRASDVKTWQKLDSDLSLLLENALRGNVDKKLNLLGNILYEECKSRFGSLTKMQSKLHPRKGRREAEIDALVQDRRQLRRRWRKATAEEKEGLKVLWDEVRQKLGSMRRAERIRRRKKRKEKERASFMRNPFKHARQLLEEKRNGKLEATKEELEQYIRGQYSDSKRNDPLGSPGYVPPPPPPTTQFDSCPPRLSEVRAVVKKARSASAPGPNGIPYKLYKNCPQVLKCLWKLMSTAWKKLLIPSEWQRAVAVFIPKEQESHNINQFRSIALLNVEGKIFFAVMAKRLTSYLTANGYIDTSCQKAGVPGFPGCVEHSSMIWAQIQRAKQEKNDLHVVWLDLANAYGSVPHKLIQFALEFFHVPVSIINLVTSYFRDFQMCFSLQDFTTGWQRLEVGIAMGCSISPVLFVAAFEIILRGARQTVGGMRLQTGQRLPPLRSYMDDVTVVLQTAPCMRRCLKRLDELVTWARMKIKPSKSRSLSLRKGTRNDKTIFVAGGEQIPLLVNHSIQSLGRQYNADLSDKHAGKAARKQLSEGLASINKSQLPGKYKLWCYNFTLYQRVMWPLKMCEIPSSTANGLDRVANSYIRKWLGLPRCFSDTGLFGATLLHLPIQSIALGYKQEKARLVLELEESSDPTVRNAQVPIRTGRKWQAGPEVAKAIGRLQHQEIVGRVQVGRAGLGWGDSPRLWSKATKRERRAMVVEEVSRANQEQYTIKAVSQGRQGRWTTWEGTISRPISWADLWKMPLARLSFLLRATYDTLPCPRKLHQWFGQEESCPLCGPPNASLQHLLSGCKIALTQGRFRWRHDQVLMKLAEILESSRQEANSQPIAKQRSVMFVRPGEGKGDTSRRGSLAKDWSMRADIGKQVQYPREITTISLRPDIVLWSAVTKSAMPIELTIPWEAGIQAAYERKAAKYADLAAECREAGWSTTIYPVEVGCRGFVGTSTIRLLRDVGSTGAKLQRETKSLAEETEKGSFWLWLRRRDKYWGSRQAGTSPCHRSVTMRHSRVKESDTPMSGGPRLMTLQLIQGAVGGASGILAHQKQHHICTINMKLLNKKKVLAH

SEQ ID NO: 20813 - protein, 1022 aa, Nerophis ophidion
MLKVDSPVTQQTEKREPGRKGTIKWPRASDVKTWQKLDSDLSLLLENALRGNVDKKLNLLGNILYEECKSRFGSLTKMQSKLHPRKGRREAEIDALVQDRRQLRRRWRKATAEEKEGLKVLWDEVRQKLGSMRRAERIRRRKKRKEKERASFMRNPFKHARQLLEEKRNGKLEATKEELEQYIRGQYSDSKRNDPLGSPGYVPPPPPPTTQFDSCPPRLSEVRAVVKKARSASAPGPNGIPYKLYKNCPQVLKCLWKLMSTAWKKLLIPSEWQRAVAVFIPKEQESHNINQFRSIALLNVEGKIFFAVMAKRLTSYLTANGYIDTSCQKAGVPGFPGCVEHSSMIWAQIQRAKQEKNDLHVVWLDLANAYGSVPHKLIQFALEFFHVPVSIINLVTSYFRDFQMCFSLQDFTTGWQRLEVGIAMGCSISPVLFVAAFEIILRGARQTVGGMRLQTGQRLPPLRSYMDDVTVVLQTAPCMRRCLKRLDELVTWARMKIKPSKSRSLSLRKGTRNDKTIFVAGGEQIPLLVNHSIQSLGRQYNADLSDKHAGKAARKQLSEGLASINKSQLPGKYKLWCYNFTLYQRVMWPLKMCEIPSSTANGLDRVANSYIRKWLGLPRCFSDTGLFGATLLHLPIQSIALGYKQEKARLVLELEESSDPTVRNAQVPIRTGRKWQAGPEVAKAIGRLQHQEIVGRVQVGRAGLGWGDSPRLWSKATKRERRAMVVEEVSRANQEQYTIKAVSQGRQGRWTTWEGTLSRPISWADLWKMPQARLSFLLRATYDTLPCPRNLHQWYGQEESCPLCGAPNASLQHLLSGCKIGLTQGRFRWRHDQVLMKLAEIRESSRREANSQPIAKQRSVMFVRPGEGKGDTSRRGPRSVLSLARDWSMRADIGKQLQFPREITTTSLRPDIVLWSAVTKSAMLVELTIPWEEGIQAAYERKAAKYADLAAECREAGWSTTIYPVEVGCRGFVGTYTIRLLRDVGLTGAKLRRETKALAEEAEKGSFWLWLRRRDKYWGSKQ

SEQ ID NO: 20814 - protein, 939 aa, Nerophis ophidion
MLKVDSPVTQQTEKREPGRKGTIKWPRASDVKTWQKLDSDLSLLLENALRGNVDKKLNLLGNILYEECKSRFGSLTKMQSKLHPRKGRREAEIDALVQDRRQLRRRWRKATAEEKEGLKVLWDEVRQKLGSMRRAERIRRRKKRKEKERASFMRNPFKHARQLLEEKRNGKLEATKEELEQYIRGQYSDSKRNDPLGSPGYVPPPPPPTTQFDSCPPRLSEVRAVVKKARSASAPGPNGIPYKLYKNCPQVLKCLWKLMSTAWKKLLIPSEWQRAVAVFIPKEQESHNINQFRSIALLNVEGKIFFAVMAKRLTSYLTANGYIDTSCQKAGVPGFPGCVEHSSMIWAQIQRAKQEKNDLHVVWLDLANAYGSVPHKLIQFALEFFHVPVSIINLVTSYFRDFQMCFSLQDFTTGWQRLEVGIAMGCSISPVLFVAAFEIILRGARQTVGGMRLQTGQRLPPLRSYMDDVTVVLQTAPCMRRCLKRLDELVTWARMKIKPSKSRSLSLRKGTRNDKTIFVAGGEQIPLLVNHSIQSLGRQYNADLSDKHAGKAARKQLSEGLASINKSQLPGKYKLWCYNFTLYQRVMWPLKMCEIPSSTANGLDRVANSYIRKWLGLPRCFSDTGLFGATLLHLPIQSIALGYKQEKARLVLELEESSDPTVRNAQVPIRTGRKWQAGPEVAKAIGRLQHQEIVGRVQVGRAGLGWGDSPRLWSKATKRERRAMVVEEVSRANQEQYTIKAVSQGRQGRWTTWEGTLSRPISWADLWKMPQARLSFLLRATYDTLPCPRNLHQWYGQEESCPLCGAPNASLQHLLSGCKIGLTQGRFRWRHDQVLMKLAEILESSRREANSQPIAKQRSVMFVRPGEGKGDTSRRGPCSVLSLARDWSMRADIGKQLQFPREITTTSLHPDIVLWSAVTKSAMLVELTIPWEEGIQAAY

SEQ ID NO: 20815 - protein, 1135 aa, Argyrosomus japonicus
MKDGPNRTDNSVTTATETDNETNTRTPGNEEKIPRKCRCGWEKVTTFKGLRIHQGKRKCGQKGQQQPCTAAAGETRGTKSQVENHRADGPDVAEGKDSTEEESPPVEDEPPREHQDPANSHRTEPKVETKNPTRRSKLKWPKSSEEEAWRTLDSDLVKTLEESLRGGVETKLNQIGDILYQVCKDRFGEVTSKQRTTQGEKGRREKEIDQLVRRRRQLRKNWRKATQAEKEGLKTLWEEVRQRLSRLRRAERIRKRSKRKQKERASFFKDPFKHARQLLEEKKSGKLETTREQLEQHVKEQYSDPARNVPLGTPGHVPRPAPPTAEFSTTPPKLSEVRQVVRKARSASAPGPNGVPYKLYKNCPKVLEVLWCLMRTAWKKQLIPSEWQRAVAVFIPKEANSKDISQFRNIALLNVEGKIFFSVLAKRMTTYLLENGYIDTNCQKAGVPGFPGCVEHSTMIWDQIQKAKQAKTDLHVVWLDLANAYGSVPHQLINYAMEFFHMPSCIKNMVVSYFNDLQMCFALQDFTTGWQQLEVGIAMGCAISPILFVAAFEVILVGARQMVGGIKLPAGQRLPPLRTYMDDVTSLLQTAACTSRLLKRMDELTSWARMRIKPSKSRSLSLRKGVRNDSTIFVVGGERIPLLSEQPIKSLGRQYTAELSDKQMGRTVMKQLSEGLAKIDQSQLPGKYKVWCYQFTLYRRVLWPLKMSDIPSSAASKMDGKANSFIRKWLGLPRCLSETGLFGRNTLQLPLQSISLGYKQEKTRLVLELRESTDLTVRNADIKVPTGRKWNAQTEVDQAISRLQHQEIVGRVQAGRAGLGWGEAPRFWSKANRKERKEMVVAEVRRMEEERYKIKAVSQGPQGSWTTWEGVVNRNISWTDFWKIPQARLSFLIRSTYDTLPCPRNLHQWFGSEECCTLCNTPNANLQHILSSCKIALSQGRYRWRHDQVLRKLAEVLERRVQGSKGVPPAENHSFVMEGGGRINIRPKETSRPFSPDQEWNMRVDLDRQLRFPVEITTTSLRPDIVAWSPKAKSVLLIELTIPAEEGIEAAYERKKAKYSELAAECRMAGWKTTIYPVEVGCRGYVGLSTTRLLRDAGVTGGNLKKATKELAEEAEKGSFWLWLRRKDKFWGKSN

SEQ ID NO: 20816 - protein, 1133 aa, Trachurus trachurus
MEDGPNRTDYTETNGTDIDNEMKTFRLCRCGWGKVTTYRGLRIHQGRKKKESEKKGIQHPCTAPADKTSRTPSRGENHRAEGPNVVDGVEKEEEEPPVTSSAPLACEQAEVRPSSPPATQQTEKREPGRRSTIKWPKASEVTTWQKLDSDLSLVLEHSLRGGVDKKLNLLGDILYEECKARFGTLTKKQHNAPPRKGRREAEIDALVQNRRQLRRRWRKAPEEERQGLKALWNEVRGKLACMRRAERIRKRRKRKEKERASFMRNPFKHARQLLEEKRSGRLEATKEEIEQHIRGQYSDPKRNVPLGSPGYVPPPPPPTTQFDSSPPRLSEVRAVVKKARSASAPGPNGIPYKLYKNCPQVLKCLWKLMSAAWKNQLIPSEWQRAVAVFIPKEQESRNIEQFRSIALLNVEGKVFFGVMARRLTTYLTENGYIDTSCQKAGVPGFPGCVEHSSMIWGQIQRAKQEKSDLHVVWLDLANAYGSVPHKLIQFALEFFHVPESINNLVTSYFRDFQMCFSLQDLTTGWQRLEVGIAMGCSISPVLFVAAFEIILHGARQTVGGIRLQSGQRLPPLRSYMDDVTMVLQTAPCTRRCLKRLDELVTWARMKIKPSKSRSLSLRKGNRNDSTIFVAGGEPIPLLANHSIQSLGRQYNADLSDRHAGKAARKQLSEGLASINKSQLPGKYKLWCYNFTLYQRVMWPLKMCEIPSSTVNGLDRLANSYIRKWLGLPRGFSDTGLFGATSLQLPIQSITLGYKQEKARLVLELKESSDPAVRNALVPTRTGRKWQAGPEVARAIGRLQHQEIVGRTQVGRDAGHLPIPAPRLWSKATKRERKAMVVEEVSRANQEQYTIKAVSQGRQGRWTTWEGTIKRPLSWADLWKMPQARISFLLRATYDTLPCPRNLHQWFGKEESCPLCSAPNASLQHLLSGCKAALTQGRYRWRHDQVLTKLAEVLESCRQDANNQPTAKRLPVRFVRPGESSGDTSRRGPRSVLSQARDWSMRADIGRQLQFPREITTTTLRPDIVLWSAATKAAMLIELTIPWEEGIQAAYERKAAKYADLAAECREAGWSATIYPVEVGCRGYVSTSTTRLLRDVGTTGAKLRRETKALAEEAEKGSFWLWLRRRDKNWGSRQ

SEQ ID NO: 20817 - protein, 1549 aa, Sitophilus oryzae
MSTRPTLHKDTKASPSHKMASTTVGGATNTTSSLLPSNQNGGKPNHTERERHTFNAPKGPVRTTETPTSGAQHSSNNTNTEPYRSEHRTRLSNTPECPARESKTSTSATQQFGKSARKTNRTNDTKRISPNTPIGKSDETTTQTAKSRILPEPDNAKNSINNRRSPSQYTGMSPPNNIGTSEQAELNAKPNNAIGPKNENSGNPKALINQTSSRPDNTKSQSQKHSCDTCEAAFVSAAQLKTHIQSRTCGDRTKCKYCGKGYDSFKKVRQHERRSHPVECENESNKINSKTEPEYLEILAGIEARTLKTVSIKEMMSATGLTQAQVRHRRESQIYKKYLERAKAKLHSKPAKATTIFKAFGRPKIDSLLNKNKTAADSHDQAIDDFSTPKSSKPPNGRHHTEPNQEQDPIMLTQTPGKRRRSPTNLTPTEETPAKTFKPTRDMNKMAPHRAQKPLTEAPASTTLMEGWHIKTFDQIVDKANVNNVHKIPTNISLAEERPVETSKLIIDKDNVNNVHKTKECSIIITKMTPHKTNEPVIVTPTTTPSPKTTETQMAPTTQPGTSSAYHANRLLGPPITTPSPARVESQATYATPLERGSALHSINNSIYFTPLNETMNTPTNQDPNIIDLTESGKTTNYTNQEASPRLNDSWAATSNDKIPSNEEFREFFCHSRGQLGQDSAQLKRVIDCALLGSNTALVSAMDLWLSNSTSNSKRPATSITTTTNKPPARNYGLQRGGRGQRASEYKKAQDLYRKDKSSLADIILSGRAIYEEPVMPKIDDIEAFYGGIFEGASELDDAEPHGPKTAAITFKPITAKEVEDAAANWRPSAPGPDGMTVQCAKNIKPLHWAILMSAVYFRNAHPTSWKKLRTVLVPKDGDRTAPGNWRPITIGSAGQRLFHRVLSLRIKKSITLNPAQRGFTQIDGTLANVLLLDHFIASRSSEGKAYTMISLDISKAFDTVSHSSVARALRRMGIDEGTREYLMGSLEGNSTRIKIGKDTTRPIKIQRGVKQGDPLSPLLFNIVVDEILDLMTERYHGGTIMAEGGRSSPIMAFADDIVLMEDDLKIMPLLLEDTVEFFKCRGMQMNGKKCTSMSGVPHHGNKCTSIVTRPIYSIDGIKIPANNNLATFRYLGHLYGTTGAKKPSLCNLQTWIGRLHRAPLKPDQKLCLLKQHLIPKLLYGLQSTHITGGTLKEADKIIKSAVKKIVHLHIHTPDAFLHTKQRDGGIGIPELRCTIPAQLLERMQRLLNRTDDPAVSCMLQTNRFTAIFTRLQNLAGNTPPEQKWREAANNGPLTAGITQAADDPSSRKWLNGRPRGWSGRDYVRAVQLRANALPTRGIPSNPQDQRLCRGGCNRSESLSHVLQGCPVVHFERIRRHNEISHKVAEFCRHKHLEVEEEPHIRHPDGTLFKPDLAIHLGADTTIISDVQVSWETADSLPIAWERKKSIYNNGKFIEAAGRRWPGRSLVFDPIIVGARGIWPRCNRPTEDALGLSNQLKESCVHSALKWGSSIHASFMRYTWRNEGREQGHINNEHHHYHQRRPARQLPPN

SEQ ID NO: 20818 - protein, 1717 aa, Ectemnius continuus
MGSDGEPRGQESNDQSPGANGKKRRRQRYVTCKIRARRSESKKTRERESEAREKMSERIESEGASVEVRSERSPEKECKESRKERGVEEREVRENESRVSEEDGSKEECQEKRSEKNEVRKRMLRSARIKNPTPKASKKAERGGKTTTKRKTTVGKNKSTTEVGTSLTKVVKNNEQISQRETRQAVRERSESERQAQEEARREAEKVTGSAQNITTKCELGSACLSARSEESKESEQVRVSSAERHHCREESEGKERVSGESAVRERDSAGSAERNRESAVRGKVSEQKVVREKSSEEERERDSQNNNIQVSQRGERARRRGKERRVEMSEAESEGESEGEIGDDPDWTVEESEIKTPNVTKRHSLANQARKVLGETTSEESESEEDNNEREIEESETAELGEMRENRQKTPTTTTTITPITTTTASQNKVGQSTQMSSQSSQGSSQSRKSEFRIYLEKLSEHLSERAWMRKVIEVVQVRYNGRIPRGGLEEMAEMLRRVKGVSRSEKELKTMYHYVKRIPVDTDKDAERAEEARGVQKGRKKSPEREKETAERDYEEIDNSEQNSDRAGERFLIVNPKLFSQAREALKTSIAKYCVEREEKGHTPKVARDQVNSLLVEYLNELVKREGEKVESLSDLNDLYFAVQSAYHQVAQGTGKKEPSKWKENIQRKVDKFKEQLASAREWNGKGKPPKHIKIACSENGVHSNSDKLTEVVAGLEEKVSMYEKKLRLAEGRKEMRRTNRMFECYRPRFYRQLEGGVSEINEKLDRDETREFWQNLWKRDEREKEFSFLIERIEECERTPEWSEEVLAARIERELRYTPNWKAPGPDGVHFFFIKRMTHLWPRLIQLVSEAIRDPSKIGEELYQGVTYLIPKVDNAMKPEQLRPITCLSVLYKLVSKVMTGMMREVVEVNGVLSVNQFGTRRQVQGAKEMFLINRALGEAHDFELKSAWLDVRKAYDSVDHRYILELLGKLSMPRNMICFVERILDKQITSLRVNGKEIGQAKIEKGILQGDSMSPLLFVLSMEAMSRVLNERSEMVEVGELARNHLIFIDDVKLIAKTEKELEHLGRTARECLGGMGLELNLAKTANNIGTPEAVGDLVGPGGYKYLGIWEDKEGRTSARNKEVVTEKVIDRVRKLVDTSLSSKNLFSAINEFALAASNYQIGILDFNLQDFEKIDCDVRRILGEKKVVRAAANVERLYLPRKKQGRGLGSLEARAETLLTVLHDTFHQEGERKEIGRMEEKAHSILSAIRQIVSKKYEMEEGYEVRELKAAQEEKLMGKIRNKNMHKIIFERDENNQIDLKSSAAWLKQAYLSPKEEGSLSKLQDRNVYSKVKNCQRCGGKKRWTVDHVATHCGALLHVDYVRRHNEIIRYLHHQIAKRYGLAGKRLKGHRVQGVIQNERVKIRTDLPVVSDAQVEFNRPDLIIQDKVAKVMWVVEVGVTNRAALPKTEVTKSRKYELLAGELRSQHPDYTVTIVPVVLAWDGTVTKHCLRHLKVLHMEERDLARLQVIVLKRTLDMVRGDLFESEVWKDATKEGGVEERCDESGAKGNERRDESGEQGSERRDESKTRGAEGGSLEPTASSSLSARIEERYQRYTHPPKATTSAEGGTDLTTSNPEPVYAETKTDNSKSNAAQRMEETKNNEDGGQPSPNEDDGDKTEDGEQPGPNEDDGDKTEDGGQPGPNEDDVVNGNGGQRTKSLGVIRNRPPVLPRS

SEQ ID NO: 20819 - protein, 1744 aa, Ectemnius continuus
MGSDGEPRSQESNDQRPGADGKKRRRQRYVTCKIRARRSESKKTRERESEAREKMSERRESEGASDEVRSVRSPEKECKESRKERGVEGREVRENESRVSEEDGSKEECQEKRSEKSEVRKRMLRSARIKNPTPKASKKAERGGKTTTKRKTTVGKNKSTTEVGTSLTKVVKNNEQISQRETRQAVRERSESERQAQEEARREAEKVTGSAQNITTKCELGSACLSARSEESKESEQVRVSSAERHHCREESEGKERVSGESAVRERDSAGSAERNRESAVRGKVSEQKVVREKSSEEERERDSQNNNIQVSQRGERARRRGKERRVEMSEAESEGESEGEIGDDPDWTVEESEIKTPNVTKRHSLANQARKVLGETTSEESESEEDNNEREIEESETAELGEMRENRQKTPTTTTTITPITTTTASQNKVGQSTQMSSQSSQGSSQSRKSEFRIYLEKLSEHLSERAWMRKVIEVVQVRYNGRIPRGGLEEMAEMLRRVKGVSRSEKELKTMYHYVKRIPVDTDKDAERAEEARGVQKGRKKSPEREKETAERDYEEIDNSEQNSDRAGERFLIVNPKLFSQAREALKTSIAKYCVEREEKGHTPKVARDQVNSLLVEYLNELVKREGEKVESLSDLNDLYFAVQSAYHQVAQGTGKKEPSKWKENIQRKVDKYKEQLASAREWNGKGKPPKHIKIACSENGVHSNSDKLTEVVAGLEEKVSMYEKKLRLAEGRKEMRRTNRMFECYRPRFYRQLEGGVSEINEKLDRDETREFWQNLWKRDEREKEFSFLIERIEECERTPEWSEEVLAARIERELRYTPNWKAPGPDGVHFFFIKRMTHLWPRLIQLVSEAIRDPSKIGEELYQGVTYLIPKVDNATKPEQLRPITCLSVLYKLVSKVMTGMMREVVEVNGVLSVNQFGTRRQVQGAKEMFLINRALGEAHDFELKSAWLDVRKAYDSVDHRYILELLGKLSMPRNMICFVERILDKQITSLRVNGKEIGQAKIEKGILQGDSMSPLLFVLSMEAMSRVLNERSEMVEVGELARNHLIFIDDVKLIAKTEKELEHLGRTARECLEGMGLELNLAKTANNIGTPEALGDLVGPGGYKYLGIWEDREGRTSARNKEVVTEKVIDRVRKLVDTSLSSKNLFSAINEFALAASNYQIGILDFNLQDFEKIDCDVRRILGEKKVVRAAANVERLYLPRKKQGRGLGSLEARAETLLTVLHDTFHQEGERKEIGRMEEKAHSILSAIRQIVSKKYEMEEGYEVRELKAAQENKLMGKIMSKNMHKIIFERDENNQIDLKSSAAWLKQAYLSPKEEGSLSKLQDRNVYSKVKNCQRCGGKKRWTVDHVATHCGALLHVDYVRRHNEIIRYLHHQIAKRYGLAGKRLKGHRVQGVIQNERVKIRTDLPVVSDAQVEFNRPDLIIQDKVAKVMWVVEVGVTNRAALPKTEVTKSRKYELLAGELRSQHPDYTVTIVPVVLAWDGTVTKHCLRHLRVLHMEERDLARLQVIVLKRTLDMVRGDLFESEVWKDATKEGGVEEGCDESGAKGNERRDESGVRGRERRDESGEPGSERREESKTKGAEGGSLEPTASSSLSARIEERYQRYTHPPKATTSAEGGTDLTTSNPEPVYAETKTDNSKSNAAQRMEETKNNEEGEQPSPNEDDEDKTEDGGQPSPNEDDGDKTEDGEQPGPNEDDGDKTEDGGQPGPNEDDVVNGNGGQRTKSLGVIRNRPPVLPRS

SEQ ID NO: 20820 - protein, 1109 aa, Adalia bipunctata
MRWTRRDNLDLMRAYFLVSDGERNLTNYRARLHREWNLHRPDIPRNAQQLADQVRSVKNRKALSEAEISALKEETRVELEREVNQDSEVPIPEVRRRSTIYEIPPEQVNEEIMARLEEMLAGYSGMQVDDRPAIPKIRYCSKALETVREMNNCIGRKVGEIRSLEDTCELVYCAAIATADLLGHEITKPRHTADNRKIDPPWRARLQQKIGKIRGDIGVIHNYLQKDDNTNKLRRKIRAICKRNKIKYNENDIKKKLETHLNLLKQKVAALGCRIRRYNKRVERYRQNNMFKFNQKNFYRGLNKPQEDVEKDLRPPNPEVMQTFWADLWSNPVKHDQNAYWISGIRDQARALEPMQRISIQTEHISHALRKIGNWNAPGRDKIQAYWWKNFTKIHSKVAAHFNSIIAKPEDTPEYFTKGITYLLPKNANIQEPKNFRPITCLPAIYKILTAVLSNEIKSHLKLKNILAREQNGCRSRARGSKELLIIDTVVTNHAKIKKRNLSMAWIDYRKAFDSVPHSWLVECLKLYKVDPGAVQFLENMMGKWETELAVKVAGVSYTTPAVQVRRGIFQGDSLSPLWFCVALNPLSKLIQTSGYGYVVSRRPDVKIHHLLYMDDIKLYATNPEQLRGLLELVKSFSASISMEFGVEKCAFVHVKGGSIQETRNITLSDNSEISQLSLEEEYKYLGIHQTNTVNNSVVKKQTENNMFKRLKKILKTELYSRAKIEAINTWVLPIITYTFGILKWTKTDVDRIDRQIRTTLTKNRLHHPNSSISRLYLPRSRAGRGLTNLKQAHAKQIEKLHTYVRNVRYQLHEAIVTIDKNLSPLNLSVALPPFKENKDYYKELEQEWKGKELHGRFAGVLASDEIDIELTTLYLREGQIMGETEGFIGAIQDQVISTKNYRKYIMKQNIPDDRCRLCKSGPETIQHISSSCGYLAPKDHKIRHDNVAQILHQEICRIHKIIEDPIPHYKYRPAETCEKEGVTIFWDTPIITDHEVTHNRPDIVVINRTRKMAQIIDITVPLDHNIREARNTKIQKYIDLSHEIKAIYQLRTVSIHPIIITSNGLVDKTLKGELQNLGIPEPQKMISAAQKAVILGTCRCVRRVLTKE

SEQ ID NO: 20821 - protein, 1282 aa, Tenthredo notha
MAAWKRQELAIAGKYLDDNVGVLKEADFENVRAQIPHRSIAAVKKKLIELRKARQGIQGRPRQLAPAIWTAEEVRRLAVAYADAEGQSKIERLRSIVADFPGRSEKALGTKLRTELPDIYYFVAQPPDIWRQAPNHDLDNDDYPNIAGGNSSGEEEGIHQEDENNNNQVVRTAGEAANRGELEGVRLRVGPVEPAAEHDVPAAVVPTAGEAPTTDNLPAADNPPPADNPPAAENPPAADNTLGDNSVPAAGERPARDPRLQKKFRALWRQTTKKKPRLKKFPKYIDPAVIRKVDDILSDAIREVEGSRGTETRKRSKIKDAIYVAGVVLEKEARTKTAAPPPVFVVTQRKAERLRKHIARAKELRSWNDGGRLPKELKRQAKEIRSLKLTPSQYIKASEERLQALERRVETLRSRAEAMGVRARFKERPSMRTIAPQPERLSPGLEDAESYFRKTFAPVAPEDHQLSTRFNDWLDRMRHYRANRNFDHQITPNRIAGEAQKAISATAPWKAAGEDGIPSAVYKTLPAAKEYMVRHITKLLRGEGKITEEDVRGRIILIHKSGAADDPSNYRPISLLNTDYKILTSVITSLLTDGLASWMIPKEQLARKEVWGTVHGLLWDKACTQGARLSRRPNYSSWYDFKKAYDSIHHHQLRRLVQALPTHQEIRKTVTAMMPLWSVSVEVGKERTRPIYVRRGLYQGDSMSPMLFILLTAFIVDAVKSDTEITKAARGKQEVAAFMDDIKTHAPSRKAADLISKVLRAAACEVGLELNQRKCATYSREEEEADSEEGPPVETDIPFLPNIREGYKYLGIYQVERDTALNADLVKGKTLAKAREIFESKLAPSQKAQLFNSSLVTAAVYVMGNLYPDESRGTTLKRCREVDTEVRKLLVAMKQRGRTTSRPTVYLPPSTYGGMGLKSLEEEAEVQLVRKGVYAREHPDMTTTRAAYDRLARAQWRNPLSDEEAVLRKYGVEIPVRLAEESVAVYVRRVAALVAAEQQRRWVLDWRAASRYARVATDPATKTTYPAATALTAESWVLAIARSAAEDQVQGLGAHPEPRRRCRRGCNADETPYHVIGTCLAPEITARHDEAVYRVLQTILEATNAPSEVQAALKYGIPALYAEYSWQGRELKFRTGGKIVTDPMLFHNRPDIVIHLSNPDEILMLEVAVSNLQNMALQERIKRVRYTKNSTVQVTAENVETVGRNYNLADALARLHRCPVRFGALVVGTLGEICETDELKKTMSILRKVGVKEGRARNMIQRIAGAATKASASIIMRRINQE

SEQ ID NO: 20822 - protein, 1401 aa, Mimas tiliae
MDRTIKKYNLRPLLGGRRGVSGAGARYHSMRTIGDVELNRRAPVEEFATAESLPPSSPSSLFSSLPSSPQSISSIPSNQNMNLSYQSCNNSRSPSVPQTSADVVQKANAVQSAPTVDETRARLKWSDEMNRFIWRTYLVLTNMERSTRGYLGRLHEEFIQKFPHMDVSRQRVGDQRRAIIRRKLIPTTIVEEIKADAALQLSLVNRELENTPKTLETLYTTQPKCTQQLHPTQPKQKQSNNMRWTNDLNETLIKCYYEVTELETNLTAYRSKLRNKFIDYCPHLAHLTEQRVADQRRSIISNKYIKDNRLLQIRKEVEHSLSNKVPNSRNIQHMLYTPHTPHQNFTDSDTQLSPSPVNNPYNSDEVHIPSMLEHNHSQHNSIYNNTALDTDNIKQQFQDTFVQFQFTDPITRPCIPKQKSSKKLAQIVNYIDTQIIPNYITAEPDFMTTQTIVYCAAYTAAICNGSRIRTVASNTKKITPKWQKRLISKIQALRKDIGRMTQYISGNRNRKLVKHVNKIKEKYLIHTQHEKPNISDEEFLDTLKQKLTLIASRFSRYTKCTERKQQNTQFINNEKQFYRKLATTSQNTCQHNNSRPPPPEEVHRFWSNVWAVPVQHNQNAEWIKTNNLNALPQMEFEQIPIDIFIKVLKRTHNWKAPGSDKIHNYWYKKFTHLHPILYNHINTFIKFPHSTPDYMTQGITYMIPKDIDYQNPAKYRPITCLQTFYKLLTGCIAELTYQHITDNNILAEEQKGCRKLSQGCKEQLIIDCVAMKHAKATRSDISTMYIDYRKAFDSVPHSWLIHVLHLYKIHPTIISFLEQTMNQWKTQLKINNNIHTENIPIRRGIFQGDSLSPLWFCLALNPLSTMLNQSNNGYSIITGIDHVKFTHLLYMDDIKLYSNSTSSLHALADIIQTFSCDIQMQFGIDKCKTFTIQSGKIVQNSYILNTGEIIEGLDKNSSYKYLGFEQSELIHHKNKSDLKDKFKRRVNNILKTQLSSRNITKAINSFAIPVLTYSFGIIPWSKSNLQNIQRIINTSMTKHRKHHPRSCTERLTLPRREGGRGLINITNLHNRQITALRSHFHERAKHTLLHKVVSGADKKFTPLNLLSSMTQNNEKIIDNKEKIASWERKSLHGRHRQDLCRPHVDIDASNAWLTRGDLFPETEGFMIAIQDQVIETRNYVKFIIKTPIPSDLCRRCNSSSETIQHITGACKTIVQTDYKYRHDQVAKIIHQKLAQKYKLITQTIPFTPYYKYTPTTILENKTHKIYYDRAILTDRTVHFNRPDITLIDKIQKTAHLIDIAVPNTHNIQATLTEKLTKYTELSNEIARMWKLNKVKIVPIIISATGVIPKQLHESIKTLDLPSSIYIQLQKSVILNTCRITRKFLNADPLSITHSYSHAHTT

SEQ ID NO: 20823 - protein, 1430 aa, Laothoe populi
MNSNNKKYNLRPLPGGRRGVFGAGAGYHSMRTIGDEELSRRAPIEESATAESLLSSSPSSLFPSTPSSPPSYLTERRRNFSSSSQSISPTSLNSSPNHRFHVNHTSPSISPKSVDVVQGTNAIQSAPTTDKTHARLKWSTEMNKFIMRTYLMVTKMERTTRGYLSRLHKKFTQQFPHMDVSQQRIGDQRRAIIRRKLLSDTSIRQIKDEIALQLQLNSVETEISITQNTHLTQSTQRPNTKQRQPTNRNKMRWSDHLNETLMKCYYEVTDLERNLTAYRSSLRNKFLEYCPHLTHLSEQRLADQKRSIIVNKYIKESKLQEIRKEVEKDLNNKTSATTNIKPINLLPTYTNNDTQPVSNIVNDSCNDNEIHNHLNSIQSIDSEPNNNEERLMHNNSYMNADKIKQIFHDTFTHFQFTNPTTRPSIPRQKSSKMLSLIVNCINTQILPNYITVDSDFITTQTAIYCAAHTAALCNGYKIKADSSHYTKTSPKWQRRLENKINLLRRNIGRMTQYIAGNSSRKITKHVEKIRNQYSIHTQHETPNLTDEEFLDTLKQKLNLTVSRLSRYKKCTDRKQQNSQFINNEKQFYRKLIENSKNIHHQVTQKTPPPEELHKFWANIWAIPVQHNIQAEWLQDDTSNTTSNMQFEQIPIDIFIKVLNRAHNWKAPGSDKIQNYWYKKFTWGHPLLYNHINNFVQSPDSMPGFVTQGLTYMIPKDEDSQNPAKYRPITCLQTIYKLLTGCIAELTYKHVNDNSILTEEQKGCRKRSKGCKEQLIIDSVAMRHAIDTKADISTMYIDYKKAFDSVPHSWLVHILHIYKIHPTIVNFLEQSMLEWKTQIKLHDKIHPEFIPIRRGIFQGDALSPLWFCLALNPLSVILNKSGNGFQITKNDTNILLTHLMYMDDIKLYSNTTTSLHTLADITQRFSHDIQMEFGIDKCKTLTVTSGKITQNSYTLNTGEIIEGLDQNSSYKYLGFHQSHQILQKNIKSELKEHFRRRINTIVKSQLNSRNLVKAINSFAIPILTYSFGIITWSQSNLKNIQRVINTAMTKHRKHHPRSCIERLTLPRRDGGRGIIDIVNLHNRQITSLREYFYAQAKQTLLHRVITAADKKFTPLNLQSNITQKNEHIRDNKEKITLWEQKSLHGRHRQDLYRPNVDIEASNAWLTRGDLFPETEGFLMAIQDQVIETRNYIKYIIKSPIPTDLCRRCNSSSEKIQHITGACKTIVQTDYKYRHDQVAKIIHQKLALKYKLIAPCTPFTPYYKYSPLTILENQTYKLYYDRAILTDRTVHYNRPDITIIDKTKKTAHLIDIAVPNTHNLQITVTEKLTKYTELANEVARMWKIRKVQIVPIIISTTGVIPKQLHESIKTLDLPPSIYIQMQKAVILNTCRIVRKFLNTDPHDATHAYTHTNNNTEDNATTNIPTVNEIHLV

SEQ ID NO: 20824 - protein, 790 aa, Hyles vespertilio
MIFDKIPIEIFMEVLKRAHNWKAPGSDKIQNYWYKKFTKIHPILYKHINNFIHSPETIPHYITHGITYMIPKDSDSQNPAKYRPITCLQTFYKLMTGCITEIIYSHIINNNLLSEEQKGCRKLSRGCKEQLIIDSVVMKQAIATKTDISTMYIDYRKAFDSVPHSWLLHIMQLYKIHPTVISCLKHTMLQWKTQLKLNNTIHPEFISIRRGIFQGDSLSPLWFCLALNPLSVMLNQSQHGFPITSCNRQVMLSHLMYMDDIKLYSNSITSLHKLADITQIFSQDIQMVFGIDKCKTFTITSGKITPNSYTLCTGEIMEGLERNSSYKYLGFEQSKHIHYKTTKLKLKETFKHRINSILRSQLNSRNLTKAINSFAVPVLTYSFGVLPWSQSNLKNVQRIINTSMTQNRKHHPRSCIERLTLPRREGGRGLIDIAKLHSRQITSLRTYFHEKSKNSLLHKAVSNADNKFTPLNLNSHIVQNNEKVLENKEKIATWSLKSLHGRHRQDLCRPNVDYEASNAWLTRGDLFPETEGFMLAIQDQVIETRNYMKYIVKSPIPSDLCRRCNSSSETIQHITGACKTIVQTDYKYRHDQVAKIIHQKLALKYKLIEPTTPITPYYKYIPLTILENQTYKLYYDRAILTDRTVHYNRPDITIIDKSQKIAHLIDIAVPNTHNLQATLTEKLTKYTELSHEIARMWKINKVKIVPIILSTTGVIPKQLHESIKTLDLPSALYIQLQKAVILNTCRITRKFLNTDPHTSTHIYTHALRNEENSTADRESDIPTINGTHLA

SEQ ID NO: 20825 - protein, 1413 aa, Deilephila porcellus
MDQVSKKYNLRPLPGGRRGASGADAGCYSMRTIGDEGLNRRAPIEELTTAESSPPSSPSSLFPSIASSPPSYLSESISTSSSNSPVNIIQHQISANLRPPSIVQTSVDVVQEANAVLTAPATDTLCARKKWSNNMNRCIMRNYFLLTNMEKSTRGYLSSLHENFLQKFPQMNVSRQRIGDQRRAIIRRKLLSDSEIEQIKAEVASQLQLSADESRHASIPPQLSPIETVHTQRTQTTLSENTRTKMRWTDDLNETLIKCYYEVTNLETDLTAYRSNLRSKFIEKCPHLAHLTEQRLADQRRSIINNRYIAHNKLQQIRNEVENSMPNRTRIATQDTALLQDLPRDLNITEETYTLTPITQNNNSQMNINLATITYNTSIESDKIAQQFRNCYIEFQSTEPTTRPAIPKQKSSKKLSQIVNHINTQILPNYITEDLDFITTQTIVYCAAYTAAICNGSKIKTTTPNYTKFTPKWQRRLDNKIKILRRDIGRMTQHIAGNRNRKLVRHVENIKSRYPIHTQHETPNVTDEEFLDTLKQKLTLISSRLSRYRKCTERKKQNIKFINSERLFYRELICNTKNTHNQGSNTPPSSELHTFWSDIWNVPVEHNKSAEWLHTHTPNITSDMEFDKIPIDIFIKVLKRAHNWKAPGSDKIQNYWYKKLTHIHPILYKYINTFINSPETIPHYITQGITYMIPKDSDSQNPAKYRPITCLQTVYKLMTGCITEIIYNHITDNNILSEEQKGCRKLSRGCKEQLIIDSVVMRQATVTKRDIATMYIDYRKAFDSVPHSWLIYVMQVYKIHPIIISCLEHTMLQWKTQLKLNNITHPEFIPIRRGIFQGDSLSPLWFCLALNPLSVMLNQSHLGFPITSHNSQLTLSHLMYMDDIKLYSNSIASLHKLADITQIFSQDIQMEFGIDKCKTFTITSGKITPNSYTLHTGEIMEGLDRNSSYKYLGFEQSKHIHHKATKLKLKETFTHRMNSILKSQLNSRNLIKAINSFAVPVLTYSFGVLPWSQSNLKSIQRIINTSMTKNRKHHPRSCIERLTLPRREGGRGLIDITNLHSRQITSLRSYFHEKSKDTLLHKAVVNADKKLTPLNLNNHSPQTNEKIIENEEKIATWAQKSLHGRHRQDLCRPNVDYVASNAWLTRGDLFPETEGFMLAIQDQVIETRNYIKYIVKSSITTDLCRRCNSSSETIQHITGACKTIVQTDYKYRHDQVAKIIHQKLALKYKLIAPTTPITPYYKYIPLTILENHTHKLYYDRAILTDRTVHYNRPDITILDKSQKIAHLIDIAVPNTHNLQTTLTEKLTKYTELSHEIARMWNIDKVKIVPIILSTTGVIPKQLHESIKTLDLPSALYIQLQKAVILNTCRIARKFLNTDPHTSTHTYTHINRNTEENSTDRESHIPITNGTHLA

SEQ ID NO: 20826 - protein, 1434 aa, Laothoe populi
MNSNNTKYNLRPLPGGRRGVSGAGAGYHSMRTIGDEELSRRVPIEESTTAESLLSSSPSSLFPSTPSSPPSYLTERRRKFSSSSQSISPTLFNSSPTHRFHVNHTSPSISPKSVDVVQGTNAIQSAPTADKIHARLKWSTEMNMFIMRTYLMVTNMESTTRGYLSRLHEKFTQQFPHMDVSQQRIGDQRRAIIRRKLLSDTSIKQIKDEVALQLQLTSVGTETSISIKQNIHLTQSTQRPNTKQREPTNRNKMRWSDHLNETLMKCYYEVTDLEQNLTAYRISLRNKFLEYCPHLTHLSEQRIADQKRSIIVNKYIKESRLQEIRKEVEKDLINKTSTTTNTEPIYLLPISANNDTQPVSNIVNDSCNVNEILNNLSSRRSIDSEPNNNEERLMHNNSHMNADKIKQIFHDIFTHFQSTDPTTRPSIPKQKSSKKLSLIVNCINAHILPNYITVDSDFITTQTVIYCAAHTAALCNGYKIKDKSSHYTKATPKWQKRLENKINVFRKNIGRMTQYISGNRSRKITKHVEKIRNQYSIHTQHETPNLNDEEFLDTLKQKLNLTVSRLSRYKKCTERKQQNSQFINNEKQFYRKLIENSKNSQLHVTQTTPPPEELHKFWANIWAIPAQHNINAEWLQADTPNTTPNMQFQQIPIDTFIKVLNRAHNWKAPGSDKIQNYWYKKFTWAHPLLYNHINNFIQSPDSMPGFVTQGLTYMIPKDEDSQNPAKYRPITCLQTIYKLLTGCISELTYKHVNDNSILTEEQKGCRKRSKGCKEQLIIDSVAMRHAIDTKADISTMYIDYRKAFDSVPHSWLIHILHIYKIHPIIINFLEQTMLKWKTQIKLHNQLHPEFIPIRRGIFQGDALSPLWFCLALNPLSAILNKSGNGFQITKDDTHILLTHLMYMDDIKLYSNTTTSLHTLADITQGFSQDIQMEFGIDKCKTLTVTSGKITQNSYTLNTGEIMEGLDQNSSYKYLGFHQSHQILQRNIKSELKEFFRRRINTIVKSQLNSRNLVKTINSFAIPILTYSFGIITWSQSNLKNIQRLINTAMTKHRKHHPRSCIERLTLPRRDGGRGIIDIVNLHNRQITSLREYFYAQAKETLLHRVITAADKKFTPLNLHSTITQKNEHIRDNKEKITLWEQKSLHGRHRQDLYRPNVDIVASNAWLIRGDLFPETEGFLLAIQDQVIETRNYIKYIIKSPIPTDSCRRCNSSSETIQHITGACKTIVQTDYKYRHDQVAKIIHQKLALKYKLIASCKPFTPYYKYNPLTILENHTYKLYYDRAILTDRTVHYNRPDITIIDKSEKTVHLIDIAVPNTHNLQTTVTEKLSKYTELANEVARMWKIRKVQIVPIIISTTGVIPKQLHESIKTLDLPPSTYIQMQKAVILNTCRIVRKFLNTDPHDTTHTYTHANNNTEDNATTNIATAITNEIHLV

SEQ ID NO: 20827 - protein, 1032 aa, Lycaena phlaeas
MEILVEQNSLTEGLIQDIYDKLKIALIQYSSMDPSSRPKLPKLKYNPCLSNLINIFNQNILHRFISEDTQLIDLHTLIYCTAFVISTELNYKITDYAGNSQAKYKNKPPWQMRLEKDIERLRADCGRLTQYIKNNRSNKVVKRVEAIFKSSLIHTRHEKNNRTPEEFLDTLKQKLALKVHRLRRYKKAQQRKNDNKIFGTNEKLFYRNLQKTQSDSTTHTNIQLPTKEQLETFWSGIWEEQVYHNEKADWIEKEEARYHTLEEMEFVEITETDITNITSRLHNWKSPGSDKIHNYWYKKLISLHKTLARNLTDIILGKQNIPEFIATGITYMLPKTTYLPEPSQYRPITCLPTIYKILTSAIATKINSHIEQHNIIAEEQKGCRRGHMGCKEQLVIDSTIHKHATSKNRNLHCTYIDYRKAFDSIPHSWLLKVLQIYKINPKIINFLRTVMANWKTTLQLNNCQSTIITRQISIKKGIYQGDSLSPLWFCLALNPLSNLLKNCKVGYNLKHSAAETIISHLIYMDDIKLYSKTEKEMKKLIDTTTEFSKDINMQFGLDKCKTLHIIRGKIKPGDYAVGNNVKITAMEPTDLYKYLGYKQLKGLDHTTTKQTLTTEYKRRINAVCKTQLYAKNLIKALNTFAIPILTYSFGIVKWSKTDIERIERSTRTTLTKYNNLHPKSAIERLTIKRQNGGRGLIDIQHLWQKQINNLKTFFQLKSHTSDIHKAIVQNDQNYTPLNLKVNINSDKLNQSNDPQKQKLEDWKKKVLHGRHPHDLEESHIDTIASNKWLKMGSLFPETEGFIIAIQDQVINTKNYRKYIIKDPTVTNDKCRKCHMQPETIQHITGACTTLTQTDYTHRHNQVANIIHQKLALKHKIIQNTNTPYYKYTPQTILENTSHKLYYDRAILTDRTIHYNRPDITLMDKTNKITYLIDIAVPNTHNLQKTITEKINKYSELKDEITQIWKQEKVYVVPIVISTTGVIPKHLKHSLQLLDLKESIYITLQKAVILNTCRIVRKFMQIEENETQHHTPL

SEQ ID NO: 20828 - protein, 1315 aa, Eilema depressum
METRAKRKRIGPLPGGDRRGTPGADAGCLSMRTVSGEELNRRAPTDKDTTAETADDGASLTDRTNTPAEPYSPSTISYTPSRISSPSIPSSVPSSPPSNTCYADPPNPVLSVAQEVNAFLPASTKAGKPRKRMRWSKDVNTFIMRTYYTITKIETDMTTYRKQLHELFTQKYPTIIVTEQRVSDQRRIIVKNKLLTVDELDRLKEEVRLQLREHADDSTEINSLTPTQYQIEDNQSRHHLQSQSQSQSHTQMSHISTQTEFITLTVENDIETLIEHNPVVEVHTQEILDKFRAAITLYSGMDPVVRPKLPKLKYSFKLFQLTNLFNQNILNQFLTDDTQLTDIHTFIYCTALVITEELNYKVIDRIDSIRPKHNNKPPWQVRLEKDIEKLRADCGRLTQYINNNRSNKIVKKVEAIFKSRTLHTKHENSNRKPEEFLDTLKQKLALKVHRLRRYTKAQERRNNNTLFANNEKVFYRNLRKPQRETDTATNIETPTQTELETFWAGIWEDEVQHNEKAGWIAEELNKWSITEEMEFEEITESDITSITANLHNWKAPGVDKIHNFWYKKLTILHKHIAKNFTDIILEKQHIPEFIATGITYMLPKGKYSPLPSQYRPITCLPTLYKILTSTIARKINTHIEHNQIIAEEQKGCRRGHMGCKEQLIIDSTIHKHATTKNRNLHCTYIDYKKAFDSIPHSWLLQILEIYKVNSKITHFLRNIMPFWKTSLHLNYLDNKITTREISIRKGIYQGDSLSPLWFCLALNPLSHLLHSCRAGYSFKNSSTETKISHLIYMDDIKLYAKTDKEMKKLVDTTAAFSKDINMEFGLEKCKTLHIVKGKVRPGSYAVDDFNDITAMEPSDLYKYLGYKQLKGLDHGAIKDTLTKEYKNRINSICKTQLPGKNLVKAVNTYAIPILTYSFGIIKWSKTDIEQLERTTRTTFTKHNNLHPKSAIERLTIKRQNGGRGITDIHHLWQKQLHNLKKFFDMKSHSSDIHKAVTENDHNYTPLNLNEALNTPNLDIVDPQALKIENWKKKTLHGRHPHDLEQPHIDPIASNKWLQIGNLFPETEGFIIAIQDQIINTKNYRKYIIKDPTATNDKCRKCHTQSETIQHITGACTTLTQTDYTHRHNQIVNIIHQSIAHKHNLIQNTNTPYYNYKPEIILENTSHKLYYDRAILTDRTIHYNRPDITLQDKINKTTYLIDIAVPNTHNLQKTITEKINKYSDLKEEVMRIWKQDKVYIVPIVVSTTGVIPTHLHHSIKLIDLKDNIYIPIQKAAILNTCRIVRKFLQIDDAENSHTLTQDTHDTHTPHLLGSGP

SEQ ID NO: 20829 - protein, 1301 aa, Apodemia mormo
METRSKKKRIGPLPGGDRRGTSGADAGCDSIRTVSGVEYRQARSGSPEDATASLTENRQTDIDNFSLNSFSSLVEPLSPSIVSYVPTTVSVVDEHSRETLSPRPTLTVARVANAFLPASTKAGKTRMRMKWSQEVNLFIMRTYYYITKLETDMTIYRKKLHERFSLQYPDVNVSEQRVSDQKRAIERNKLLSITTLEKLKDEVRKQLHEEETRNNVSEHRRQQTSEQPTHLYTQTQSLAHTHQITLSPDTSLANTQISHCSTQTEAVTILIENDIDTIINTHLINDTYMQEVTDKLRSTLILYSGMDPMVRPKLPKLKYSQKLFELIDLFNQNILNEFISPNVQLKDIHTLTYCTALVISEELNYNITNNLRTTRNKNEYKPSWQHRLEKDIEKLRVDIGKLTQHINNNRSKKVVKRVEEIFRNVTIHTRHENNNRIPEEYLDTLKQKLALKVHRLKRYKKSEQRKKDNTTFATNEKLFYRNLGKRETVTLVNNTQEPTKQQIEEYWAGIWEDQKSHKEGAGWITEEEKRWNGIKEMEFEQISEDEIRNITTKLHNWKSPGSDKVHNFWFKKLTVLHSPLAKIFSEIIQGQVNIPEFIAAGTTYMLPKTNNPTQPSEYRPITCLPTIYKLLTSVIAKRINTHIEQNNILAEEQKGCRRGHMGCKEQLIIDSTVVKHATSNQRNLHCTYIDYMKAFDSIPHSWLVKILEIYKINPKIISCLRYIMTLWKTTLHLHNRNTDIITREIAIRKGIYQGDSLSPLWFCLALNPLSYRLHSDRAGYRLKHSNIEKIISHLIYMDDIKLYAKNDKEMRQLIKTTTEFSTDINMQFGLDKCKAVHIIKGKIRPGDYAIDDTNNITAMEPNDVYKYLGFQQLKGLDHTHIKQTLTVEYKRRINAICKSQLSAKHLIKAINTYAIPILTYSFGIIKWTKTDLEQIERTTRRILTKHNNLHPKSAIERLTIRRQDGGRGLIDVQHLWHKQVYNLKLYFHTKSQTSDLHKAIIQNDRNYTPLNLEQDPSQENPQNIDPQNKKLEDWKKKVLHGRHPHDLNQPHIDTKASNMWLKIGSLFPETEGFIMAIQDQVINTKNYRKYIIKDPTVTNDKCRKCQTQPETIQHITGACTNLTRTDYTHRHNQIANIIHQKLAQKHKLIQNTNTPYYKYTPQSVLENTTHKLYYDRAILTDKTIHFNRPDITLQDKINKTTYLIDIAVPNTHNLQKTITEKINKYTELKEEIIRIWKQEKVYIVPIVISTTGIVPNNIRNSLKVIDLKPNILTIIQKAAILNTCRTVRKFMQLEETLPHTL

SEQ ID NO: 20830 - protein, 1315 aa, Eilema depressum
METRAKRKRLGPLPGGDRRGTPGADAGCLSMRTVSGEELNRRAPTDKDTTAETADDGASLTDRTNTPAEPYSPSTISYTPSRISSPSIPSSVPSSPPSNIFYADPPNPVLSVAQEVNTFLPASTKAGKPRKRMRWSKDVNTFIMRTYYTITKIETDMTTYRKQLHELFTQKYPTIIVTEQRVSDQRRIIVKNKLLTVDELERLKEEVRLQLQEHADDSTEINSLTPTQYQIEDNQSRHHLQSQSQSQSHTQMSHISTQTEFITLTVENDIETLIEHNPVVEVHTQEILDKFRAAITLYSGMDPVVRPKLPKLKYSFKLFQLTNLFNQNILNQFLTDDTQLTDIHTFIYCTALVITEELNYKVIDRIDSIRPKHNNKPPWQVRLEKDIEKLRADCGRLTQYINNNRSNKIVKKVEAIFKSRTLHTKHENSNRKPEEFLDTLKQKLALKVHRLRRYTKAQERRNNNILFANNEKVFYRNLRKPQRETDTATNIETPTQTELETFWAGIWEDEVQHNEKAGWIAEELNKWSITEEMEFEEITESDITSITANLHNWKAPGVDKIHNFWYKKLTILHKHIAKNFTDIILEKQHIPEFIATGITYMLPKGKHSPLPSQYRPITCLPTLYKILTSTIARKINTHIEHNQIIAEEQKGCRLGHMGCKEQLIIDSTIHKHATTKNRNLHCTYIDYKKAFDSIPHSWLLQILEIYKVNSKITHFLRNIMPFWKTSLHLNYLDNKITTREISIRKGIYQGDSLSPLWFCLALNPLSHLLHSCRAGYSFKNSSTETKISHLIYMDDIKLYAKTDKEMKKLVDTTAAFSKDINMEFGLEKCKTLHIVKGKVRPGNYAVDDFNDITAMEPSDLYKYLGYKQLKGLDHGAIKDTLTKEYKNRINSICKTQLAGKNLVKAVNTYAIPILTYSFGIIKWSKTDIEQLERTTRTTFTKHNNLHPKSAIERLTIKRQNGGRGITDIHHLWQKQLHNLKKFFDMKSHSSDIHKAVTENDHNYTPLNLNEALNTPYLDIVDPQALKIENWKKKTLHGRHPHDLEQPHIDPIASNKWLQIGNLFPETEGFIIAIQDQIINTKNYRKYIIKDPTATNDKCRKCHTQSETIQHITGACTTLTQTDYTHRHNQIVNIIHQSIAHKHNLIQNTNTPYYNYKPEIILENTSHKLYYDRAILTDRTIHYNRPDITLQDKINKTTYLIDIAVPNTHNLQKTITEKINKYSDLKDEVMRIWKQDKVYIVPIVVSTTGVIPTHLHHSIKLIDLKDNIYIPIQKAAILNTCRIVRKFLQIDDAENSHTLTQDTHDTHTPHLLGSGP

SEQ ID NO: 20831 - protein, 1015 aa, Hypena proboscidalis
MQDKFRTAITQYSGMNPASRPKLPKLKYSRKLLQLTQLFNQNILSRFLTNDTPLIDLHTLIYCTALVISEELGFKITEHIHAARSRTEKPPWQIRLEKDIEKIRADCGRLTQYINNNRSAKVVKRVEAIFKTRNIHTRHENDNRKPEEFLDTLKQKLALKVHRLKRYKKSQKRKDDNILFKSNEKMFYRTLLTPQSNTHILQNIEIPTKTQLETFWAGIWEEQIEHNDKAEWITVEEEKWNTIDEMEFDEITETDITNITTRLHNWKSPGIDKIHNFWYKKLTSSHKALAKSLTDIILGKHTIPEFLATGITYMLPKIAHSPQPSQYRPITCLPTIYKILTSALTRKITKHIEHNNILAEEQKGCRRGHMGCKEQLVIDSTIHKQATTKNRNLHCTYIDYRKAFDSIPHSWLLKTLQIYKINPKIRDFMHNIMSYWKTSLQLNSNNNTVTTRQIAIRKGIYQGDSLSPLWFCLALNPLSHMLHRCRVGYSLKNNSEESLISHLIYIDDIKLYAKADKDMKKLVDTTSIFSTDINMQFGLDKCKTLHIVRGKIRPGNYAVDENNAITAMESSDLYKYLGYKQLKGLDHTEIKNTLTTEYKRRVNAICKSQLSGKSLIKAINTFAIPILTYSFGVIKWSKTDIEQLERTTRTTLTKHNHLHPKSATERLTIKRPNGGRGLIDIHHLWQKQIHNIKTFFHSKSQTSNIHKAICQNDSNFTPLNLNQHQNTQNPNSTDPQTQKIETWKKKTLHGRHPHDLEHAHIDKTASNQWLKSGNLFPETEGFMIAIQDQIINTKNYRKYIIKDSSVTNDKCRKCNTQPETIQHITGACITLTQTDYTHRHNQIANIIHQKLAHKYNLIHNTNTPYYKYTPQTILENASHKLYFDRAILTDRTIHYNRPDITLVDKLNKTTYLIDIAVPNTHNLQKTIVEKISKYAELKEEVTRIWRQDKVYVVPIVLSTTGVIPKHLHHSLKMLDLKEHIYIMLQKAAILNTCRIVRKFLQIDENEVTTQHIVGP

SEQ ID NO: 20832 - protein, 1311 aa, Signeta flammeata
MRLRSSKRLPQAGTSNGESRSEQASSGSPTYSGEGTVSLQLAQYTTVASYRNINGEELNRRAPFESPEDTTANHTEDNSSRNSSSLIAEPYSPSTASYIPSPVSSVEYSSRGAPSPTLSVAQEVNTFLPASTKAGKPRVRMRWSKEVNIFIMRTYYYITKLETDMTTYRKQLHELFLQQYPEIKVTEQRISDQRRTIIRNKFLSQETLNQIKQDVRIKLQEESNLTTDGNLTVLAYHTHQENVSQTQSNSHIQSIPQLLTHTQTLHTSTPIECETLAPENDINKLVDSNRLIETNIQKIHTKLRTAIKQYTGTDPTARPKLPKLKYSYKLSQLIHLFNQDILPQFIADDMHLLDVHTLIYCTAVVIAEELNYKITEHTRNTTTKINDKPSWQLRLENDIEKLRADCGRLTQYINNNRSNKVVRRVEEIFNSKFIHTKHENNNRKPEEFLDTLKQKLALKVHRLRRYKKTLQRKNSNALFTTNEKIFYRKLLKPQNDTSTTQNIETPIKAELEKFWSEIWEDQVQHNDKADWIIKEENRWNTIEEMEFHEITESDITNITSRLHNWKSPGIDKIHNYWYKKLTSLHKSIAKNLTDIVLGKQIIPEFIATGITYMLPKTTYSPQPSQYRPITCLPTIYKILTSAIARKINTHIENNHIIAEEQKGCRRGHMGCKEQLVIDSTIHKHATTKNRNLHCTYIDYKKAFDSIPHSWLLQILQIYKINPKITNFMRHIMCYWKTSLQLTSSNHTITTRQISIRKGIYQGDSLSPLWFCLALNPLSHLLHSCRAGYRLKYAAEETIVSHLIYMDDIKLYSQNQKEMKKLIDTTTKFSKDINMEFGLDKCKTIHIIKGKIRPGDFAVDNDTTITAMEPTDLYKYLGFKQLKGLDHTTLKQTLMTEYKRRMNVLCNTQLSGKHTIKALNTYAVPILTYSFGIVKWSKTDIQQIERNTRTTLTKHNYLHPKSALERLTIKRHNGGRGLIDIHHLWQKQIHNLKTFFHTKSHTSNLHKAISQNDHNFTPLNLSETPNTQNPGDIDPQKQKIENWKKKTLHGRHPHDIEQTHIDSAASNKWLKVGNLFPETEGFMVAIQDQIINTKNYRKFVIKDPTVINDKCRRCHTQPETIQHITGACTTLTQTDYIHRHNQIANIIHQKLALKHNLIQNTNTPYYKYTPSTILENASHKLYYDRAILTDRTIHYNRPDITLQDKINKTTYLIDIAVPNTHNIQKTITEKISKYAELKEEVIRIWKQDKVYIVPVVLSTTGVIPKHLHHSLKLIHLHDTLYMTLQKAAILNTCRIVRKFMQIHENEITPHYT

SEQ ID NO: 20833 - protein, 1003 aa, Acronicta aceris
MDPATRPKLPRLKYSPHLSKLTHMFNQNILHRFISEDTQLIDIHTLIYCTALVISEELNYKITDYPGNTLTRKNNKPSWQIRLEKDIEKLRADCGRLTQYINNNRSNKVVKRVEAIFKSSITHTRHEKNNTTPEEFLDTLKQKLALKVHRLRRYKKAQQRKNDNIAFANNEKLFYRNLQKPQTNTATDTNIQTPTQEQLETFWSGIWEEQVHHNDKADWIEKEESRCHALGEMEFIEITETDITIITSRLHNWKSPGIDKIHNYWYKKLVSLHKIIASNLTDIILGKQSIPEFIATGITYMLPKTTHSTEPSQYRPITCLPTIYKILTSAIATKINLHVEQQDIIAEEQKGCRRGHMGCKEQLVIDSTIHKHAISKNRNLHCTYIDYKKAFDSIPHSWLLQVLQIYKINSKIIDFLRTIMARWKTTLQLNTRQNTITTRQISIKKGIYQGDSLSPLWFCLALNPLSHLLHSCRIGYPLKHSTSETIISHLIYMDDIKLYSKTEKEMKTLIDTTTEFSKDINMQFGLDKCKTLHIIRGKIKPGDYAINDTDTITAMEPNELYKYLGYKQLKGLDHTTTKQTLTIEYKRRVNAICKTQLSGKHLIKALNTFAIPILTYSFGVVKWSKTDIEQIERSTRTTLTKHNNLHPKSAIERLTIKRQNGGRGLIDIHHLWQKQINKLKTFFHMKSDTSDIHRAITQNDHNYTPLNLNEHTNTQILSINDPQKQKLEDWKKKTLHGRHPHDLEQSHIDTIASNKWLKIGNLFPETEGFIIAIQDQIIKTKNYRKYIIKDPTVTNDKCRKCHTQPENIQHITGACTTLTQTDYTHRHNQIANIIHQKLALKHKLIQNTNTPYYKYTPQTVLENTSHKLYNDRAILTDRTIHYNRPDITLIDKINKTTYLIDIAVPNTHNLQKTIAEKINKYAELKEEITQIWKQEKVYVVPIVISTTGVIPKHLKHSLKLIDLKESTYITLQKAAILNTCLEKIQSRAGFEPASSGLKRHLMT

SEQ ID NO: 20834 - protein, 1275 aa, Ochlodes sylvanus
METRSKSKRLGPLPGGNRRGTPGADAGCFSMRTVSGEELSRRAPSGSPENTTANRRDSNSNSHSPISIDDPYSPSTASYRPSPVSFVDDTSRETPTPTLNVAQEVNTFLPASTKAGKPRVRMRWSKEANIFIMRTYYYITKLETDMTMYRQQLFEHFSQQYPEIKVTEQRISDQRRTIIRNKLLPLNTLKQIKEEVRIKLEANTDLINNMPTSSQNTSPDIQSIPQPHTQFYKESISHKYAQTECETVIVENDIEILVVNNSTTETHTQKMQDRLKTILIQYSGMDPTVRPKLPKLKYSYKLTQLVHLFNNYILPQYISNDTKLIDIHTLIYCTAAVIAEDLNYKITHHTSNLGQKNNYKPPWQQRLEKDIEKLRQDCGRLTQYINNNRSKKLVKKVQEIFKRKITHTRHENNNSKPEEFLDTLKQKLALKVNRLKRYKKAQQRKSDNILFNNNEKVFYRNLLKQTYNSTTENLEVPTATQLEDFWAQIWEEEVHHNEKANWIVQEENRWNMIQEMEFDDITETDITSVTATLHNWKAPGIDKIHNYWYKKLTSLHKSIAKNFTEIILGKQNIPDFIATGITYMLPKNTHSLDPSQYRPITCLPTIYKILTSALANRINTHIEHNHIIAEEQKGCRRGHMGCKEQLVIDSTIHKHATTKNRNLHCTYIDYQKAFDSVPHSWLIHVLHIYRINSKVINFLHNIMTNWKTSLQLNNRNSTITTRQITIKKGIYQGDSFSPLWFCLAMNPLSNMLHGCRAGYNFKSTTENTTISHLIYMDDVKLYSQTQKQMEQLINTTREFSKDIDMHFGLDKCKTLHIIKGKVRPGDHDIGDNITIRAMEPSDLYKYLGYTQLKGLNHSHIKQTLTTEYKKRINAICNTQLSGKHLIKALNTYAIPILTYSFGIIKSSNTDIENIERTTRTTLTKHNYLHPKSAIERLTVKRYNGGRGLIDVHNLWEKQINNLKLFFHTKSLTSNIHKAISHNDHNFTPLNLSEHLTTLCNDKRDAQVCKIDSWKKKTLHGRHPHDLQQTHIDPEASNKWLTIGSLFPETEGFIIAIQDQVINTKNYRKFIIKDSSITNDKCRKCHTQSETIQHITGACTTLTQTDYTHRDNQIVNIVHQKLALKHSLIQNTNTPYYKYSPSTVLENATHKLYYDRAILTDRTIHYNRPDITFQDKTNKITYLIDIAVPNTHNIQKTITEKVNKYLELKEEITRIWKQNKVYVVPIVLSSTGVIPKHLHNSLKLIDLKETLFITLQKAAILNTCRIVRKFLQIDAS

SEQ ID NO: 20835 - protein, 1308 aa, Hypena proboscidalis
MEKMLLRSKRLGPLSGGDRRSTPGADAGCYSIRSVSGEELNRRVPSGSLENTTANHNDRQTDLDNISLSSTQSITIVEPYSPSTVSYVPTPVSSIEENSRGTPTPTLTVAQGVNTFLPASTKAGKPRVRMRWSEEVNMFIMRTFLYITKLETDMTTYRQQLHELFSRQYPEINVSEQRISDQRRTIVRNKLLSQELLNRIKEEVSKQLEDEADNSNQDDHINLSNRILGQNQLSSQSNNPPLTLHQLGTQTQEQSYTQVSHSSTQTETEILTLENDIENLTNQNLVSDLYVQEMQDKFRTAITQYSGMNPASRPKLPKLKYSRKLLQLTQLFNQNILSRFLTNDTPLIDLHTLIYCTALVISEELGFKITEHIHAARSRTEKPPWQIRLEKDIEKIRADCGRLTQYINNNRSTKVVKRVEAIFKTRNIHTRHENDNRKPEEFLDTLKQKLALKVHRLKRYKKSQKRKDDNILFKSNEKMFYRTLLTPQSNTHIPQNIEIPTKTQLETFWAGIWEEQIEHNDKAEWITVEEEKWSSIDEMEFDEITETDITNITTRLHNWKSPGIDKIHNFWYKKLTSSHKALAKSLTDIILGKHTIPEFLATGITYMLPKKAHSPQPSQYRPITCLPTIYKILTSALTRKITTHIEHNNILAEEQKGCRRGHMGCKEQLVIDSTIHKQATTKNRNLHCTYIDYRKAFDSIPHSWLLKTLQIYKINPKIRDFMHNIMSYWKTSLQLNSNNNTVTTRQIAIRKGIYQGDSLSPLWFCLALNPLSHMLHRSRVGYSLKNNSEESLISHLIYMDDIKLYAKADKDMKKLVDTTSKFSTDINMQFGLDKCKTLHIVRGKIRPGNYAVDENNAITAMESTDLYKYLGYKQLKGLDHTEIKNTLTTEYKRRVNAICKSQLSGKSLIKAINTFAIPILTYSFGVIKWSKTDIEQLERTTRTTLTKHNHLHPKSATERLTIKRPNGGRGLIDIHHLWQKQIHNIKTFFHSKSQTSNIHKAICQNDCNYTPLNLNQHQNTQNPNSTDPQTQKIETWKKKTLHGRHPHDLEHAHIDKTASNQWLKSGNLFPETEGFMIAIQDQIINTKNYRKYIIKDSSVTNDKCRKCNTQPETIQHITGACITLTQTDYTHRHNQIANIIHQKLAHKYNLIHNTNTPYYKYTPQTILENASHKLYFDRAILTDRTIHYNRPDITLVDKLNKTTYLIDIAVPNTHNLQKTIVEKISKYAELKEEVTRIWRQDKVYVVPIVLSTTGVIPKHLHHSLKMLDLKEHIYIMLQKAAILNTCRIVRKFLQIDENEVTTQHIVAL

SEQ ID NO: 20836 - protein, 1286 aa, Heliconius numata
METRLRKKLRGPLPEGNRRGAPGADAGCFSIRTVSGEELNRRTPTGDLQPEESTAEHLHTYTSRVNSPSEPYSPSTASYNPSVHSSPTSSVCSRGPPIPVLDVAQEANVFLPASTKAGKPRVRMQWSKDVNLFIMRTYYHITKLETDMTIYRKKLHEQFLLNYPQIKVSEQRISDQRRTIERNKLLSQEILNRLKEEVRIQLQEEETNNVNITEIPNHTYIRTRTSSPTTYQHYANSQQTQTSHIFTQTETITQLLENDIEGFVNVQPPNEEYIRIIIDKFRTNLTLYAGMDPKMRPKLPKLRYCRKLYQLSNLFNENILIEYISPDTKLIDLHTLIYCTALTITEELDYKITGHSRTNSKSNKYKPAWQHRLEKDIQKLRADIGKLTQFINNNRSKKIIERVEFLLKTTKVHTKHEKNNKRPEEVLDTLKQKLALKSHRLKRYNKAQERKAQNNTFVRNEKQFYRNLLKPQNLIQDKVETPTKEELEKYWSGIWEEQTYHNNQADWITKEEQRWHDLEVMEYNELVKEDIKEITDKLHNWKSPGIDKIHNFWFKKLTFLHSSLAKNISEIIFGQQNIPEFLATGITYMLPKNNFSTQPSQYRPITCLPTLYKIITSLITQKINKHIENNNIIAEEQKGCRRGHMGCREQLIIDSTIMKHALSKNKNLHCTYIDYQKAFDSIPHSWLLHILNIYKINPKIINFLANIMTQWKTTLHLHSSNYNINTREIAIKKGIYQGDSLSPLWFCLALNPLSYLLKCNRAGYVLKHDNSETIISHLIYMDDIKLYSKNNKEMKTLIDTTTEFSEDIHMHFGLDKCRTVHIVKGKIRPGDYAINEIDKITAMEPNEFYKYLGLQQLKGLNHTAIKETITNEYKKRINAICKSQLSSKHLIKALNTYAIPILTYTFGIVKWSNSNIEQIERLTRTTLTKHNNLHPKSAIERLTIKRKHGGRGLIDIKQLWQKQLHNLSNFFYTKAQSSNIHKSIVQNDFKYTPLNLNDCQSTGNLINIDPQKKKIEEWKKKVMHGRHPNDLQQPHIDLEASNKWLQTGSLFPETEGFIIAIQDQIINTKNFRKYIIKDPTITSDKCRRCHTQPETIQHITGACASLTQTDYTHRHNQLVNIIHQRLAHKHKLIQDTNIPYYKYTPQSVLENSSHKMYYDRAILTDKTIHFNRPDITLQDKINKTVYLIDVAVPNTHNIQKTIVEKINKYADLKEEVTRICKQNKVYVVPIIISTTGVVPKAIHHYLKIINLEDNILHTLQKAAILNTCRIVRKFLQIEENNISTLN

SEQ ID NO: 20837 - protein, 1282 aa, Emesis temesa
MRTVSGVELSRRAHTGSSELVTAELNDNIDGRINTDNICINTTSTIVKPSNPTTNLHIQSPTSLLVENLLELPTPSLIVAHEAKTFLPASTKAGKPRMRMTWSKDVNMFIMRTYFYITKLETDMTTYRKQLHESFTIQYPEVKVTEQRISDQRRTIIRNNLLSDKILNRLKDEVRTQLKKETHNNTHTNIIAHSINIPESIQCTSSQSNTQLIPDILSYSPPYTQTSNTTTQTETVNFIIENDIETLTIPATSPVTNVYEQDITNKFKSALTKYSRTDPAFRPKLPKLKYCKELFQLTDLFNQKILKQFLSEDSQLVDIHNFIYCTAVVVSEELNYKIMLRDRACNPKSKYNDKPPWQIRLEKDIEKLRADCGRLTQYIYNNRSNKVVKRVEEIFERRMIHTRHEVNNKKPEEFLDTLKQKLALKVNRLRRYKKTQQRKNDNILFSNNEKLFYRKLGKTHHDISTTQNTVLPTKTQLETFWAGIWEERAQHNDKAYWIVEEEKKCDTIDEMQFHEITKTDITKVTTKLHNWKSPGIDKIHNFWYKKLTSLHSSIAKNFTDIILGKQNIPEFIAQGITYMIPKSNYSMQPSQYRPITCLPTIYKILTSTITSKITTHIEKNRIISEEQKGCRRGHMGCKEQLIIDSTVHKHAATKNRNLHCTYIDYKKAFDSIPHSWLLQILKIYKINPKIITFLQNIMQHWRTTLQVHSHNNTVTTRQISITKGIYQGDSLSPLWFCLALNPLSSMLHDCLVGYNLKHMGQETVISHLIYMDDIKLYSKNEKDMKKLLDKTIEFSRDINMEFGIDKCRTLHVVRGKIQPGDYVINDNTIITAMEPTELYKYLGYKQLKGLDHTKIKQTLTSEYKRRIESICKTLLCGKKLIKALNTYAIPILTYSFGIIKWSKTDIEKLERLIRTTLTRHNHLHPKSAIERLTIKRQNGGRGLVDIYNLWNKQIYNLKIFFQNKSNSSNLHKAIVHNDCNYTPINLSEPSNIQDPTYTDPQTKKIETWKKKTLHGRHPHDLDQPLIDTIASNKWLKVGSLFPETEGFIIAIQDQVINTKNYRKHIIKDPLATNDKCRKCSTQPETIQHITGGCITLTQTDYTHRHNQICNIIHQRLAHKHQLIQMTNIPYYKYKPETVLENTTHKLYFDRAILTDKTIHYNRPDITLQDKTNKITYLIDIAVPNTHNLQKTITEKISKYTELKDEVIRIWRQEKVYVVPIVISTTGIVPKQLHNSLKLIDLPDNLYISLQKTSILNTCRIVRKFMQLEENEMLPRQLNTAPI

SEQ ID NO: 20838 - protein, 1310 aa, Eilema sororculum
METRLRRKRIGPLPGGDRRGTPGADAGCLSMRTVSGEELSRRAPTDKDTTAETTDDGTSLTDRTNTPVEPYSPSTISYTPSRVSSPSIPSSVPSSPSNIFNSGPPYPVLSVAQEVNTFLPASTKAGKPRQRMRWSKDVNTFIMRTYYTITKLETDMTTYRKQLYELFSQKYPTVIVTEQRVSDQRRTIVKNKLLTVEELNRLKDEVRLQLQEHADDSIEMNTLTPTQNQIEDDNQSRHHFQSQSQPHTQMSHISTQTEYITLTVENDIETIIEHNPVIEVHTQEILDKFRSAITQYSGMDPVVRPKLPKLKYSFKLFHLTNLFNQNILNQFLTDDTQLTDIHTLIYCTALVITEELNYKVIDRIGSIRSKHSNKPPWQVRLEKDIEKLRADCGRLTQYINNNRSSKVVKKVEAIFKSRTLHTKHEDSNKKPEEFLDTLKQKLALKVHRLRRYTKAQERRNNNTLFANNEKLFYRNLCKPQRETDTTTNTEIPTQTELETFWAGIWENEVQHNEKAGWIAEELNKWSEIDEMEFEEITESDIRSITAKLHNWKAPGVDKIHNFWFKKLTILHKYIAKNFTDLILEKQYIPEFIATGITYMLPKTKFSPLPSQYRPITCLPTIYKILTSALTRKINTHIEHNQIIAEEQKGCRRGHMGCKEQLIIDSTIHKHATTKNRNLHCTYIDYKKAFDSIPHSWLLQILQIYKINPKITHFLRNIMPFWKTSLQLNCSDKNITTREISIKKGIYQGDSLSPLWFCLALNPLSHLLHGCRAGYNFKNTSTETKISHLIYMDDIKLYAKTDNEMKKLVETTAAFSKDINMEFGLEKCKTLHIIKGKIRPGNYAVDDINDITAMESTDFYKYLGYRQLKGLDHSAIKETLTKEYKSRINSICKTQLTGKNLIKAVNTYAIPIMTYSFGIVKWSKTDIEQIERTTRTTLTKHNNLHPKSAIERLTIKRQNGGRGLIDILHLWQKQLHNLKIFFHMKSQSSDIHKTITENDHNFTPLNLHETLNTQNRDIDDPQVLKIENWKKKTLHGRHPHDLEQPHIDPTASNKWLQIGNLFPETEGFIIAIQDQIINTKNYRKFIIKDPTATNDKCRKCHTQSETIQHITGACTTLTQTDYTHRHNQIVNIVHQSLAHKHNLIQNTNTPYYNYKPEIILENTSHKLYYDRAILTDRTIHYNRPDITLQDKINKTTYLIDIAVPNTHNLQKTITEKINKYADLKDEVMRIWRQDKVYIVPIVVSTTGVIPKHLHHSLKLIDLKDNIYIPIQKAAILNTCRIVRKFLQIDDTENSHTLTQDTHTPTQDTHTH

SEQ ID NO: 20839 - protein, 1304 aa, Lycaena phlaeas
METRSKRKRLGPLPGGDRRGAPGADAGCLSMRTVSGEELNRRAPTEQDATAGINDNIDRLTDTTISPVERHSPNTELYTPSVCPLPTSSSTNSLNSDSPIPASDVARGLSAFLPASTKAGKPRVRMRWSKDVNTFIMRTYFYITKLETDFTTYRQQMHEQFSNHYPEITVTQQRISDQRRTIIKNKLLSAEEIELIKTEVRIQLQSEENNNQDASIILYTQNQSAHSQLILSQPCVQSQVNTQSQTIINSQLNINNTQTLHSSTETESRENDMEILVEQNPLTEGLIQDIYDKLKIALTQHSSMDPSSRPKLPKLKYNPCLSNLINIFNQNILHRFISEDTQLIDLHTLIYCTAFVISTELNYKITDYAGNSQAKYKNKPPWQMRLEKNIERLRADCGRLTRYLKNNRSNKVVKRVEAIFKSSLIHTRHEKNNRTPEEFLDTLKQKLALKVHRLRRYKKAQQRKNGNKIFGTNEKLFYRNLQKTQSDSTTDTNIQLPTKEQLETFWSGIWEEQVYHNEKADWIEKEEARYHTLEEMEFVEITETDITNITSRLHNWKSPGSDKIHNYWYKKLISLHKTLARNLTDIILGKQNIPEFIATGITYMLPKTTYLPEPSQYRPITCLPTIYKILTSAIATKINSHIEQHNIIAEEQKGCRRGHMGCKEQLVIDSTIHKHATSKNRNLHCTYIDYRKAFDSIPHSWLLKVLQIYKINPKIINFLRTVMANWKTTLQLNNCQSTIITRQISIKKGIYQGDSLSPLWFCLALNPLSNLLNNCKVGYTLKHSATETIISHLIYMDDIKLYSKTEKEMKKLIDTTTEFSKDINMQFGLDKCKTLHIIRGKIKPGDYAVGNNDKITAMEPTDLYKYLGYKQLKGLDHTTTKQTLTTEYKRRINAVCKTQLYAKNLIKALNTFAIPILTYSFGIVKWSKTDIERIERSTRTTLTKYNNLHPKSAIERLTIKRQNGGRGLIDIQHLWQKQINNLKTFFQLKSHTSDIHKAIVQNDQNYTPLNLKVNMNSENLNANDPQKQKLEDWKKKVLHGRHPHDLEESHIDTIASNKWLKMGSLFPETEGFIIAIQDQVINTKNYRKYIIKDPTVTNDKCRKCHMQPETIQHITGACTTLTQTDYTHRHNQVANIIHQKLALKHKIIQNTNTPYYKYTPQTILENTSHKLYYDRAILTDRTIHYNRPDITLMDKTNKITYLIDIAVPNTHNLQKTITEKINKYSELKDEITQIWKQEKVYVVPIVISTTGVIPKHLKHSLQLLDLKESIYITLQKAVILNTCRIVRKFMQIEENEITQHHTPS

SEQ ID NO: 20840 - protein, 1291 aa, Boloria selene
METRSKKLLRGPLPEGNRRGAPGADAGCFSMRSVSGEELSRRAPTDKNTTAEDSNTPHSPIEPYSPSTISYTPSLSSSPSSRSTIEPTPVLDVAQEANVFLPASTKAGKPRVRMKWNKDVNIFIMRTYYLITKLETDFSTYRKELHELFSQKYPSIQVTEQRVSDQRRTIVRNKLLSQELLNQIKEEVKSQIEIEERIANETHQNQIINQTQHLPNFTTHINIQTQLQQQSQNFLFNTQTINSSTQTESITFLLENDIETLVQPTLIITEENTQKLTDRFKTSLSLFSGLDPTSRPQLPKLRYSTKLFELINIFNRKILQNYATDDIQLTDIHTLIYCTATVIAEELGYKIRQNSDNVDWKNKYNNKEPWQIRLEKSIEVLRADIGRLTQYINNNRSNKVVNRVMKIFRNTTIHTRHENNNQKAEEFLDTLKQKLALKVHRLKRYKKAQQRKNDNKIFVTNEKLFYRYLSKPPNHLIEDKNQSIPTEEQLTTYWSGIWEEEANHNENANWILQEIDNNKAITEMTFTDITETDILQIITKLHNWKSPGVDKIHNFWYKKLTVFHKFIAKNLNDIILRRQNIPNFIATGITYMIPKSKFSSDPSQYRPITCLPTIYKILTSVITSKIITHVEKNNIIAEEQKGCRRGHMGCKEQLIIDSTIHKHAATKNRNLHCTYIDYKKAFDSIPHSWLLQILKIYKVNHTLVDFLQNIMSYWNTALQLNYNNKIVKTRQICIKKGIYQGDSLSPLWFCLALNPLSRLLDSCRVGYCFNLQTPSEPISHLIYMDDIKLYARTDKDMKKLIDTTSKFSNDINMQFGLDKCKTLHISKGKVRPGNYQVNDTDFITALEPNDIYKYLGYNQLKGLDHSSIKQTLTLEYKKRIHLICKSQLSGKHLIKGINTYAIPILTYSFGIVNWTKTDIEHLERLVRTILTKYNYLHPKSAIERLSIKRQDGGRGLIDIHYLWQKQIHKLQEFFKIKAKTSILHKIITENDHNCTPLNLGVIIDLENTLCNDPQKQKIENWKKKVLHGRHPYDLEQAHVDSIASNKWLKIGNLFPETEGFIIAIQDQIINTKNYRKYIIKDATVTNDKCRKCHTQPETIQHITGACTSLTHSDYTHRHNQISNIIHQQLAIKHGLIPDGNTPYYKYQPQTILENASHKLYYDRAVLTDKTIHFNRPDIILQNKIDKITYLIDIAIPNSHNLQKTFTEKTNKYVELKEEVARIWKQKTVYIVPIVLSSTGIIPKNSHHSIKLLDLKNTTYITLQKAAILNTCRLVRKFLQIDEKQHTQTELL

SEQ ID NO: 20841 - protein, 1172 aa, Heliconius hecalesia
MRWSSEVNIFIMRTYYLITKLETDFTTYRQRLHEIFSQKYPYINVSEQRVSDQMRTIIRNKLLPLELLNQIKIEVKNQLELDEIEVENIDRNQTQSLLTLSNTSNTQYQVDQQTQNTFITQATQTYTQTETLTCLLENEIETLIAPTDVTDKYIQNLKEKLTTKLNLFSGLDPTTRPNLPKLRYSQKLTELIKIFNSIILSNYNSEDNQLIDIHTIIYCTALVIGEELGYKIIQKIDTGQRKKYKSKPPWQIRLEKSIQKLRADIGRLTQYISNNRSEKVVKRVMKIFRNTTLHTKHENDNKKVEEFLDTLKQKLALKSHKLKRYMKAQKRKDDNILFTTKEKSFYRQLLRPNHSCQDISNESIPTEKQLVTYWSNIWEQESKHNENAEWILEEINKYKTIDEMNFTEITEAEIFKITAKLHNWKSPGVDKVHNFWYKKLTIFHKAIAKSLTDIIFKKQNIPNFMATGITYMIPKGKFSPDPAQYRPITCLPTIYKILTSVLTSKITTHIEKYNIVAEEQKGCRRGHMGCKEQLIIDSTIHKHATAKNRNLHCTYIDYKKAFDSIPHSWLVKILKIYKINPTVIEFLNSIMSQWKTTLQLNHNNHTVKTRHILIKKGIYQGDSLSPLWFCLALNPLSSLLKNSQVGYHFNSRIQNSLISHLIYMDDLKLYAKTNKDMKKLIDITAEFSDDIQMQFGLDKCKTLHINKGKVQPGNYSINENNIITALESHDIYKYLGYNQLKGLDHTNTKQILTEEYKKRIHAICKTQLSGKNLIKAINTYAIPILTYSFGVVKWTKTDIEQLERLIRTILTKHNYLHPKSAIERLTIKRLYGGRGIININTLWQNQLKTLQKFFINKSNTSIIHKTINDNDHNYTPLNLEEIGNVEISPNTDPQKQQIDNWKKKVLHGRHPHDLEQAHIDSIGSNMWLKVGSLFPETEGFIIAIQDQIINTKNYRKYIIKDTKTTNDKCRRCHSQSETIQHITGACSNLTQSDYTHRHNQISNIIHQQLAHKYKLITNVDTPYYKYTPETILENSTHKLYYDRAVLTDRTIHFNRPDIILQDKADKITYLIDIAVPNTHNLQRTITEKINKYEELKGEITRIWKQKAVYIVPIVLSTTGVIPKHLHHSIKMLNLKNTIYITLQRAAILNTCRLVRKFLQIDEDENTNMPQLQ

SEQ ID NO: 20842 - protein, 1296 aa, Atrytonopsis hianna
METRAKSKRLGPLPGGDRRGTPGADAGCFSMRTVSGEELNRRAPSGYPENTTANQTDNNSDINSSNTIDEPYSPSTASYIPSPVSSADGRICGTPTPTLSVAQEVNTFLPASTKAGKPRVRMSWSKEANMFIMRTYYYITKLETDMTTYRKQLHELFLRQYPDIQVTEQRISDQRRTIIRNKLLPLDIINQIKEEVRRRLQENTNDTDATLNIYNNSESLLNFTAPPMHHISSSPQILSQPHTQTSHTSTQTDTETFTLVNDIDILIDNTSLKETQINTLNSKLRTALIKYSGMDPTARPKLPKLKYSYKLSYLINIFNQKIIHQFISNDSQILDIHTLIYCIAVVIAEELEYKIAENTNNNYAPTKSVNKPPWQIRLERDVEKLRADIGRLTQYINNNRSNKVIKKVEEIFKRTVIHTKHENYNNKPEEFLDTLKQKLTLKANRLKRYNKAQQRKHCNSLFTSNEKVFYRKLQEPKNFTVTTENIEIPTETRLESFWSGIWEKQITHNEKADWITQEENRWNTIEEMKFEAITENDIITITAKLHNWKTPGIDSVHNFWYKKLTFLHKYLAKNLTDIVLGKQVAPEFITIGITYMLPKTAHSSDPSQYRPITCLPTIYKILTAAIARKINTHIEHYGIIAEEQKGCRKGHMGCKEQLVIDSTIHKHAATKNRNLHCTYIDYKKAFDSIPHSWLLQILQIYKINSEIINFLRNIIPLWKTSLRLNSHNQTVTTRNISIKTGIYQGDSLSPLWFCLALNPLSYLLNQCNAGYSLNHITEKTLISHLIYMDDIKLYSKTQKEMKTLIEKTSEFSQDINMEFGLDKCKTLHIIRGKIQPGNYAIDDNKSIKAMEATDMYKYLGYKQLKGLDHTQVKHTLTTEYKRRINSICNTQLAGRSFIKALNTYAIPILTYSFGIIKWTNTDIDSIERISRTTLTRHNYLHPKSAIERLTIKRHRGGRGLIDIHHLWQKQIHNLKHFFYNKSLVSNIHKAILKNDFNYTPLNLSEYKNTANFDNREPQIQKIENWKKKTLHGRHPHDLEQTHIDPIASNKWLQVGNIFPETEGFIIAIQDQIINTKNYRKFIIKDPSITSDKCRRCHTQPETIQHITGACTTLTQTDYTHRHNQIVNIIHQKLAIKHNLTQNTNTPYYKYTPPTILENASHKLYYDRAILTDKTIYCNRPDITLQDKINKTTYLIDIAVPNTHNIQKTISEKIGKYTELKEEVTRIWKQEKVYIVPIVISTTGVIPKHLHNSLKQIDLKENLYITLQKAAILNTCRIVRKFLQLDENEHQHTTPGN

SEQ ID NO: 20843 - protein, 1304 aa, Eilema depressum
METRAKRKRIGPLPGGDRRGTPGADAGCLSMRTVSGEELNRRAPTDKDNTAETTDDGASLTDRTNTPAEPYSPSTISYTPSRISSPSIPSSVPSSPPSNIFYADPPNPVLSVAQEVNAFLPASTKAGKPRKRMRWSKDVNTFIMRTYYTITKVETDMTTYRKQLHELFSQKYPTIIVTEQRVSDQRRTIVKNKLLTVDELDRLKEEVRLQLQEPADDSIEINSLTPTQNQIEDYNQSRHHSQSQSQSQSHTQMSHISTQTEFITLTVENDIETLIEHNPVVEVHTQEILDKFRAAITLYSGMDPVVRPKLPKLKYSFKLFQLTNLFNQNILNQFLTDDTQLTDIHTLIYCTALVITEELNYKVIDRIGSIKSKHNNKPPWQVRLEKDIEKLRADCGRLTQYINNNRSNKVVKKVEEIFKKRTLHTKHENSNRKPEEFLDTLKQKLALKVHRLRRYTKAQERRNNNTLFANNEKAFYRNLSKPQRETDTATNIETPTQTELETFWAGIWEDEVQHNEKAGWITEELNKWSTTDEMEFEEISESDITSITAKLHNWKAPGVDKIHNFWYKKLTILHKHIAKNFTDIILEKQHIPEFIATGITYMLPKTKYSPLPSQYRPITCLPTIYKILTSAIARKINTHIEHNQIIAEEQKGCRRGHMGCKEQLIIDSTIHKHATTKNRNLHCTYIDYKKAFDSIPHSWLLEILQIYKINPKITHFLRNIMSFWKTSLQLNCSDKNITTREISIKKGIFQGDSLSPMWFCLALNPLSHLLHGCRAGYSFKNTTKETKISHLIYMDDIKLYAKTDNEMKKLVDTTVTFSKDINMEFGLEKCKTLHIIKGKIRPGNYAVDDTNDITAMDSTNFYKYLGYRQLKGLDHSAIKETLTKEYKNRINSICKTQLTGKNLIKAVNTYAIPIMTYSFGIVKWSKTDIEQIERTTRTTLTKHNNLHPKSAIERLTIKRQNGGRGLIDIQHLWQKQLHNLKIFFNMKSQSSEIHKTVTENDYNFTPLNLNETLNTQNRDIDDPQVLKIENWKKKTLHGRHPHDLEQPHIDSTASNKWLQIGNLFPETEGFIIAIQDQIINTKNYRKFIIKDPTATNDKCRKCHTQSETIQHITGACTTLTQTDYTHRHNQIGNIIHQSLAHKHNLIQNTNTPYYNYKPETILENTSHKLYYDRAILTDRTIHYNRPDITLQDKINKTTYLIDIAVPNTHNLQKTITEKINKYSDLKDEIIRIWKQDKVYIVPIVVSTTGVIPKHLHHSIKLIDLKDNIYIPIQKAAILNTCRIVRKFLQIEDTENTHPLTQDTQ

SEQ ID NO: 20844 - protein, 1292 aa, Hesperia comma
METRSKRIRLGPLPGGDRRGTPGADAGGFSMRTVSGEELNRRAPSGYPENTTANQTDNNSDINSPVTIDEPYSPSTASYIPSLVSSVYENTRVVRTPTLSVAQVANAFLPASTKAGKPRVRMSWSKQVNMFIMRTYYYITKLETDMTTYRKQLHELFLRQYPDIQVTEQRISDQRRTIIRNKLLPLDIINKIKEEVRIKLQEDTNYTNNTLNFCNNLESQVNCSTLPIHNISLSPLVLSQPPTQTSHSSTQTENEILTIVNDIDILADNNSFKEVQINDLNNKLKTALIKYSGMDPIARPKLPKLKYSNKLSHLINIFNQKITHQYISDYSQILDIHTLIYCIAVVITEELDYKIVVNSNDNYTRKKSLNKPPWQIRLEKDVEKLRVDIARLTQYINNNRSNRVVKKVEEIFRKRSVHTRHEKYNKQPEEFLDTLKQKLTLKANRLKRYKKAQQRKNDNSLFIANEKLFYRKLLEPKSGTAATENLELPTETQLETYWSSIWEKQILHNEKADWITHEESRWNDIEEMKFEAITETDVKIITAKLHNWKTPGIDSIHNFWYKKLVSLHKCLAKNFTDIVLGKQAAPEFITIGITYMLPKTTYSSDPSQYRPITCLPTIYKILTAVIARKINIHIEHYNIISEEQKGCRKGHMGCKEQLVIDSTIHKHAVTKNRSLHCTYIDYKKAFDSIPHSWLLQILQIYKINSQIINFMRNIIPLWKTSLHLNSHNQTITTRTISIKKGIYQGDSLSPLWFCLALNPLSYLLQQCHAGYSLSHVTEKTTISHLIYMDDIKLYSKTEKEMKLLIEKTTEFSKDINMEFGLDKCKTLHIIKGKVQPGDYAIDDSNSIKAMEATDMYKYLGYKQLKGIEHTQIKHTLTTEYKRRVNAICNTHLAGRSLIKAINTYAIPILTYSFGIIKWSKTDIDQIERISRTTLTKHNYLHPKSAIERLSIKRQCGGRGLIDIRHLWQKQIHNLKHFFYIKSLGSNIHKAILKNDFNYTPLNLADYKNTVNLDNRDPQILKTENWKKKTLHGRHPHDLEQTHIDPVASSKWLQVGNIFPETEGFIIAIQDQVINTKNYRKFIIKDPSIKSDKCRRCHTQPETIQHITGACITLTQTDYTHRHNQIVNIIHQKLAIKHNLIQNTNTPYYKYTPSTVLENATHKLYYDRAILTDKTIYCNRPDITLTDKINKTTYLIDIAVPNTHNIQKTISEKIGKYTELKEEVTRIWKQEKVYIVPIVLSSTGVIPNHLHHSLKLIDLKENVYITLQKAAILNTCRIVRKFLQLDENEHQPQ

SEQ ID NO: 20845 - protein, 1297 aa, Craniophora ligustri
METRSKSKRPQVLGAPSSSTGYDGSQPETGRRGAKNPRVTTDPRQTTQAILTDSDTLSETTTDTPSPFHSIESPTSSLYSYQIPIPSSPSTNSSSSLNVAREVNAFLPASTKAGKPRVRMKWSKEVNTFIMRTYFYVTKLETDLTTYRQQLHDIFTRHYPEITISEQRISDQRRAIVRNKLLSLEEIDTIKKEVRIRIQQEVDNNLSSNVNSHTHSHPENDPQIQLEPCTQIDTHTQSYTQAHSDTQNTYTSHACTQTENITLMLENDIETLEEQTPVTDSRIQELHDKLRTAITQYSGMDPVVRPKLPKLKYSPSLSQLIYLFNHKILHRYVSEDTQLMDLHTLIYCTALVISEELNYKITEYVGNTPPKYNSKPPWQIRLEKDIEKLRADCGRLTQYVNNNRSNKVVKRVEAIFKNHITHTRHENNNKTSEEFLDTLKQKLALKVHRLRRYNKTQQRKNDNIIFATNEKRFYRNLQKPQTEKETDTNTDTPTQEQLETFWSGIWEEQTHHNDKADWIKKEESRCHTIEDMEFDEITETDITNITARLHNWKSPGVDKVHNYWYKKLISLHKTIAKNLTDIVLLKQDLPDFIATGITYMLPKTTHSPQPSQYRPITCLPTIYKILTSAIAGKVNKHVEQHNIIAEEQKGCRRGHMGCKEQLVIDSTIHKHATTKNRNLHCTYIDYKKAFDSIPHSWLLQVLQIYKINPKIIDFLRTIMAHWKTTLHLNTRQNSVTTRQIFIKKGIYQGDSLSPLWFCLALNPLSHSLHSCKIGYPLKHSTAETIVSHLIYMDDIKLYAKTQKQMKDLIETVTQFSKDINMQFGLDKCKTLHIIRGKVRPGDYVVSNTDTIAAMGPTDLYKYLGYMQRKGLDHVKIKQTLTTEYKRRTNAICNTQLGGKNLIKALNTYAIPILTYSFGVIKWTKTDINQLERLTRTTLTKYNNLHPKSAIERLTIKRENGGRGLIDIHHLWQKQILSLKTFFHTKSQTSHIHRAITEHDSNYTPLNLNEQTITHIDFNNDIQKQKIEDWKKKVLHGRHPHDLEQIHVNSIASNKWLQVGNLFPETEGFIIAIQDQIINTKNYRKFIIKDPSVTNDKCRRCHIQPETIQHITGACTSLTQTDYTHRHNQVANVIHQKLALKHALIQNTNTPYYNYTPQNVLENSTHKLYYDRAILTDKTVHYNRPDITLQDKVNNITYLIDIAVPNTHNLQKTITEKISKYAELKEEVARIWRQNKVYVVPIVLSTTGIIPNHLIHSLKLIDLRESVYITLQKAAILNTCRIVRKFMQLDEHEFTPHS

SEQ ID NO: 20846 - protein, 1291 aa, Fabriciana adippe
METRSKSKRIGPLPGGDRRGTPGADAGCHSMRTVSGEELNRRAPTDKDATAENTGTPHSPIEPYSPSTISYTPSLSSSPSSRSTIEPTPVLDVAREANAFLPASTKAGKPRVRMKWNKDVNIFIMRTYYLITKLETDFSTYRKEMHELFSRKYPSIHVTEQRVADQRRTIVRNKLLSQDLLNQIKEEVKSQIEIEEQIANETNQIQILNQPSNLPTFSTHHTIQTQLQQQSQNFLFNTQTTNSSTQTESITFVLENDIETLVEPILIITEENTQKLADRFKTSLSLYSGLDPTSRPQLPKLKYSTKLFELINIFNHKILQNYITNDIQLIDIHTLIYCTAIVVAEELGYKIKQNNDNDSRKNKYNNKEPWQIRLEKSIEVLRADIGRLTQYINNNRSNKVVNRVIKIFRNTTIHTRHENNNQKAEEFLDTLKQKLALKVHRLKRYKKAQQRKNDNKVFVTNEKLFYRQLSKPPNHLIEDKNESIPTEEQLTTYWSGIWEEESNHNENANWILQEINNNKETIKMAFSEITETDILNTTAKLHNWKSPGVDKIHNFWYKKLTVFNKFIAKNLNYIILKKQNIPNFIATGITYMIPKGKFSSDPSQYRPITCLPTIYKILTSVIASKINAHIEHNNIIVEEQKGCRRGHMGCKEQLIIDSTIHKHAMTNNRNLHCTYIDYKKAFDSIPHSWLIQILKIYKIDPILIDFLKDIMSHWRTALQLNNNNKTVKTRQIRIRKGIYQGDSLSPLWFCLALNPLSRLLERCRVGYCFNLQTPSMPISHLIYMDDIKLYSRTEKDMKKLIDITTEFSNDINMQFGLNKCKTLHIIKGKVRPGNYQVNDTDFITALEPNDIYKYLGYNQLKGLDHSSTKQTLTLEYKKRIHLICKSQLSGKHLIKGINTYAIPILTYSFGIVNWTKTDIEHLERLVRTILTKYNYLHPKSAIERLSIKRQDGGRGLIDIRYLWQKQIQKLQQFFKIKANTSILHKIITENDHNYTPLNLEVIRDLENILYNDPQKQKIENWKKKVLHGRHPHDLEQAHVDSIASNKWLKIGNLFPETEGFIIAIQDQIINTKNYRKYIIKDATTTNDKCRKCNTQPETIQHITGACTSLTHSDYTHRHNQISNIIHQQLAIKHGLIPKCNTPYYKYLPQTILENASHKLYYDRAVLTDKTIHFNRPDIILQNKIDKITYLIDIAVPNTHNLQKTLTEKTHKYLELKEEVARIWKQKKVYIVPIVLSTTGIIPKNLHYSIQILELKDTTYITLQKAAILNTCRLVRKFLQIDDKQHTQTELS

SEQ ID NO: 20847 - protein, 913 aa, Hypena proboscidalis
MQDKFRTAITQYSGMNPASRPKLPKLKYSRKLLQLTQLFNQNILSRFLTNDTPLIDLHTLIYCTALVISEELGFKITEHIHAARSRTEKPPWQIRLEKDIEKIRADCGRLTQYINNNRSAKVVKRVEAIFKTRNIHTRHENDNRKPEEFLDTLKQKLALKVHRLKRYKKSQKRKDDNILFKSNEKMFYRTLLTPQSNTHILQNIEIPTKTQLETFWAGIWEEQIEHNDKAEWITVEEEKWNTIDEMEFDEITETDITNITTRLHNWKSPGIDKIHNFWYKKLTSSHKALAKSLTDIILGKDTIPEFLATGITYMLPKIAHSPQPSQYRPITCLPTIYKILTSALTRKITIHIEHNNILAEEQKGCRRGHMGCKEQLVIDSTIHKQATTKNRNLHCTYIDYRKAFDSIPHSWLLKTLQIYKINPKIRDFMHNIMSYWKTSLQLNSNNNTVTTRQIAIRKGIYQGDSLSPLWFCLALNPLSHMLHRCRVGYSLKHNSEESLISHLIYMDDIKLYAKADKDMKKLVDTTSKFSTDINMQFGLDKCKTLHIVRGKIRPGNYAVDENNAITAMESTDLYKYLGYKQLKGLDHTEIKNTLTTEYKRRVNAICKSQLSGKSLIKAINTFAIPILTYSFGVIKWSKTDIEQLERTTRTTLTKHNHLHPKSATERLTIKRPNGGRGLIDIHHLWQKQIHNIKTFFHSKSQTSNIHKAICQNDSNFTPLNLNQHQNTQNPNSTDPQTQKIETWKKKTLHGRHPHDLEHAHIDKTASNQWLKSGNLFPETEGFMIAIQDQIINTKNYRKYIIKDSSVTNDKCRKCNTQPETIQHITGACITLTQTDYTHRHNQIANIIHQKLAHKYNLIHNTNTPYYKYTPQTILENASHKLYFDRAILTDRTIHYNRPDITLVDKLNKTTYLM

SEQ ID NO: 20848 - protein, 1310 aa, Eilema sororculum
METRLRRKRIGPLPGGDRRGTPGADAGCLSMRTVSGEELSRRAPTDKDTTAETTDDGTSLTDRTNTPVEPYSPSTISYTPSRVSSPSIPSSVPSSPSNIFNSGPPYPVLSVAQEVNTFLPASTKAGKPRQRMRWSKDVNTFIMRTYYTITKLETDMTTYRKQLYELFSQKYPTVIVTEQRVSDQRRTIVKNKLLTVEELNRLKDEVRLQLQEHADDSMEMNTLTPTQNQIEDDNQSRHHFQSQSQPHTQMSHISTQTEYITLTVENDIETIIEHNPVIEVHTQEILDKFRSAITQYSGMDPVVRPKLPKLKYSFKLFHLTNLFNQNILNQFLTDDTQLTDIHTLIYCTALVITEELNYKVIDRIGSIRSKHSNKPPWQVRLEKDIEKLGADCGRLTQYINNNRSSKVVKKVEAIFKSRTLHTKHEDSNKKPEEFLDTLKQKLALKVHRLRRYTKAQERRNNNTLFANNEKLFYRNLCKPQRETDTTTNTEIPTQTELETFWAGIWENEVQHNEKAGWIAEELNKWSEIDEMEFEEITESDIRSITAKLHNWKAPGVDKIHNFWFKKLTILHKYIAKNFTDLILEKQYIPEFIATGITYMLPKTKFSPLPSQYRPITCLPTIYKILTSALTRKINTHIEHNQIIAEEQKGCRRGHMGCKEQLIIDSTIHKHATTKNRNLHCTYIDYKKAFDSIPHSWLLQILQIYKINPKITHFLRNIMPFWKTSLQLNCSDKNITTREISIKKGIYQGDSLSPLWFCLALNPLSHLLHGCRAGYNFKNTSTETKISHLIYMDDIKLYAKTDNEMKKLVETTAAFSKDINMEFGLEKCKTLHIIKGKIRPGNYAVDDINDITAMESTDFYKYLGYRQLKGLDHSAIKETLTKEYKSRINSICKTQLTGKNLIKAVNTYAIPIMTYSFGIVKWSKTDIEQIERTTRTTLTKHNNLHPKSAIERLTIKRQNGGRGLIDILHLWQKQLHNLKIFFHMKSQSSDIHKTITENDHNFTPLNLHETLNTQNRDIDDPQVLKIENWKKKTLHGRHPHDLEQPHIDPTASNKWLQIGNLFPETEGFIIAIQDQIINTKNYRKFIIKDPTATNDKCRKCHTQSETIQHITGACTTLTQTDYTHRHNQIVNIVHQSLAHKHNLIQNTNTPYYNYKPEIILENTSHKLYYDRAILTDRTIHYNRPDITLQDKINKTTYLIDIAVPNTHNLQKTITEKINKYADLKDEVMRIWRQDKVYIVPIVVSTTGVIPKHLHHSLKLIDLKDNIYIPIQKAAILNTCRIVRKFLQIDDTENSHTLTQDTHTPTQDTHTH

SEQ ID NO: 20849 - protein, 1061 aa, Eilema sororculum
MSHISTQTEYITVTVENDIETIIEHNPVIEVHTQEILDKFRSAITQYSGMDPVVRPKLPKPKYSFKLFHLTNLFNQNILNQCLTDDTQLTDIHTLIYCTALVITEELNYKVIDRIGSIRSKHSNKPPWQVRLEKDIEKLRADCGRLTQYINNNRSSKVVKKVEAIFKSRTLHTKHEDSNKKPEEFLDTLKQKLALKVHRLRRYTKAQERRNNNTLFANNEKLFYRNLCKPQRETDTTTNTEIPTQTELETFWAGIWENEVQHNEKAGWIAEELNKWSEIDEMEFEEITESDIRSITAKLHNWKAPGVDKIHNFWFKKLTILHKYIAKNFTDLILGKQHIPEFIATGITYMLPKTKYSPLPSQYRPITCLPTIYKILTSALTRKINTHIEHNQIIAEEQKGCRRGHMGCKEQLIIDSTIHKHATTNNRNLHCTYIDYKKAFDSIPHSWLLQILQIYKINPKITHFLRNIMPFWKTSLQLNCSDKNITTREISIKKGIYQGDSLSPLWFCLALNPLSHLLHGCRAGYNFKNTPTETKISHLIYMDDIKLYAKTDNEMKKLVETTAAFSKDINMEFGLEKCKTLHIIKGKIRPGNYAVDDINDITAMESTDFYKYLGYRQLKGLDHSAIKETLTKEYKSRINSICKTQLTGKNLIKAVNTYAIPIMTYSFGIVKWSKTDIEQIERTTRTTLTKHNNLHPKSAIERLTIKRQNGGRGLIDIQHLWQKQLHNLKIFFHMKSQSSDIHKTITENDHNFTPLNLNETLNTQNRDIDDPQVLKIENWKKKTLHGRHPHDLEQPHIDLTASNKWLQIGNLFPETEGFIIAIQDQIINTKNYRKFIIKDPTATNDKCRKCHTQSETIQHITGACTTLTQTDYTHRHNQIVNIVHQSLAHKHNLIQNTNTPYYNYKPEIILENTSHKLYYDRAILTDRTIHYNRPDITLQDKINKTTYLIDIAVPNTHNLQKTITEKINKYADLKDEVMRIWRQDKVYIVPIVVSTTGVIPKHLHHSLKLIDLKDNIYIPIQKAAILNTCRIVRKFLQIDDTENSHTLTQDTHTPHLLGSGP

SEQ ID NO: 20850 - protein, 1291 aa, Fabriciana adippe
METRSKSKRIGPLPGGDRRGTPGADAGCHSMRTVSGEELNRRAPTDKDATAENTGTPHSPIEPYSPSTISYTPSLSSSPSSRSTIEPTPVLDVAREANAFLPASTKAGKPRVRMKWNKDVNIFIMRTYYLITKLETDFSTYRKELHELFSRKYPSIHVTEQRVADQRRTIVRNKLLSQDLLNQIKEEVKSQIEIEEQIANETNQIQILNQPSNLPTFSTHHTIQTQLQQQSQNFLFNTQTTNSSTQTESITFVLENDIETLVEPILIITEENTQKLADRFKTSLSLYSGLDPTSRPQLPKLKYSTKLFELINIFNHKILQNYITNDIQLIDIHTLIYCTAIVVAEELGYKIKQNNDNDSRKNKYNNKEPWQIRLEKSIEVLRADIGRLTQYINNNRSNKVVNRVIKIFRNTTIHTRHENNNQKAEEFLDTLKQKLALKVHRLKRYKKAQQRKNDNKVFVTNEKLFYRQLSKPPNHLIEDKNESIPTEEQLTTYWSGIWEEESNHNENANWILQEINNNKETIKMAFSEITETDILNTTAKLHNWKSPGVDKIHNFWYKKLTVFNKFIAKNLNDIILKKQNIPNFIATGITYMIPKGKFSSDPSQYRPITCLPTIYKILTSVIASKINAHIEHNNIIAKEQKGCRRGHMGCKEQLIIDSTIHKHAMTNNRNLHCTYIDYKKAFDSIPHSWLIQILKIYKIDPILIDFLKDIMSHWRTALQLNNNNKTVKTRQIRIRKGIYQGDSLSPLWFCLALNPLSRLLERCRVGYCFNLQTPSMPISHLIYMDDIKLYSRTEKDMKKLIDITTEFSNDINMQFGLNKCKTLHIIKGKVRPGNYQVNDTDFITALEPNDIYKYLGYNQLKGLDHSSTKQTLTLEYKKRIHLICKSQLSGKHLIKGINTYAIPILTYSFGIVNWTKTDIEHLERLVRTILTKYNYLHPKSAIERLSIKRQDGGRELIDIRYLWQKQIQKLQQFFKIKANTSILHKIITENDHNYTPLNLEVIRDLENILYNDPQKQKIENWKKKVLHGRHPHDLEQAHVDSIASNKWLKIGNLFPETEGFIIAIQDQIINTKNYRKYIIKDATTTNDKCRKCNTQPETIQHITGACTSLTHSDYTHRHNQISNIIHQQLAIKHGLIPKCNTPYYKYLPQTILENASHKLYYDRAVLTDKTIHFNRPDIILQNKIDKITYLIDIAVPNTHNLQKTLTEKTHKYLELKEEVARIWKQKKVYIVPIVLSTTGIIPKNLHHSIQILELKDTTYITLQKAAILNTCRLVRKFLQIDDKQHTQTELS

SEQ ID NO: 20851 - protein, 1308 aa, Hypena proboscidalis
MEKMLLRSKRLGPLSGGDRRSTPGADAGCYSIRSVSGEELNRRVPSGSLENTTANHNDRQTDLDNISLSSTQSITIVEPYSPSTVSYVPTPVSSIEENSRGTPTPTLTVAQGVNTFLPASTKAGKPRVRMRWSEEVNMFIMRTFLYITKLETDMTTYRQQLHELFSRQYPEINVSEQRISDQRRTIVRNKLLSQELLNRIKEEVSKQLEEEADNSNQDDHVNLSNRILGQNQLSSQSNNPPLTLHQLGTQTQEQSYTQVSHSSTQTETEILTLENDIENLTNQNLVSDLYVQEMQDKFRTAITQYSGMNPASRPKLPKLKYSRKLLQLTQLFNQNILSRFLTNDTPLIDLHTLIYCTALVISEELGFKITEHIHAARSRTEKPPWQIRLEKDIEKIRADCGRLTQYINNNRSAKVVKRVEAIFKTRNIHTRHENDNRKPEEFLDTLKQKLALKVHRLKRYKKSQKRKDDNILFKSNEKMFYRTLLTPQSNTHILQNIEIPTKTQLETFWAGIWEEQIEHNDKAEWITVEEEKWNTIDEMEFDEITETDITNITTRLHNWKSPGIDKIHNFWYKKLTSSHKALAKSLTDIILGKHTIPEFLATGITYMLPKIAHSPQPSQYRPITCLPTIYKILTSALTRKITKHIEHNNILAEEQKGCRRGHMGCKEQLVIDSTIHKQATTKNRKLHCTYIDYRKAFDSIPHSWLLKTLQIYKINPKIRDFMHNIMSYWKTSLQLNSNNNTVTTRQIAIRKGIYQGDSLSPLWFCLALNPLSHMLHRCRVGYSLKNNSEESLISHLIYMDDIKLYAKADKDMKKLVDTTSKFSTDINMQFGLDKCKTLHIVRGKIRPGNYAVDENNAITAMESSDLYKYLGYKQLKGLDHTEIKNTLTTEYKRRVNAICKSQLSGKSLIKAINTFAIPILTYSFGVIKWSKTDIEQLERTTRTTLTKHNHLHPKSATERLTIKRPNGGRGLIDIHHLWQKQIHNIKTFFHSKSQTSNIHKAICQNDSNFTPLNLNQHQNTQNPNSTDPQTQKIETWKKKTLHGRHPHDLEHAHIDKTASNQWLKSGNLFPETEGFMIAIQDQIINTKNYRKYIIKDSSVTNDKCRKCNTQPETIQHITGACITLTQTDYTHRHNQIANIIHQKLAHKYNLIHNTNTPYYKYTPQTILENASHKLYFDRAILTDRTIHYNRPDITLVDKLNKTTYLIDIAVPNTHNLQKTIVEKISKYAELKEEVTRIWRQDKVYVVPIVLSTTGVIPKHLHHSLKMLDLKEHIYIMLQKAAILNTCRIVRKFLQIDENEVTTQHIVGP

SEQ ID NO: 20852 - protein, 1304 aa, Lycaena phlaeas
METRSKRKRLGPLPGGDRRGAPGADAGCLSMRTVSGEELNRRAPTEQDATAGINDNIDRLTDRTISPVERQSPNTELYTPSVCPLPTSSSTNSLNSDSPIPASDVARGLSAFLPASTKAGKPRVRMRWSKDVNTFIMRTYFYITKLETDFTTYRQQMHEQFSNHYPEITVTQQRISDQRRTIIKNKLLSAEEIELIKTEVRIQLQSEENNNQDASIILYTQNQSAHSQLILSQPCVQSQVNTQSQTIINSQLNINNTQTLHSSTETESRENDMEILVEQNPLTEGLIQDIYDKLKIALTQYSSMDPSSRPKLPKLKYNPCLSNLINIFNQNILHRFISKDTQLIDLHTLIYCTAFVISTELNYKITDYAGNSQAKYKNKPPWQMRLEKDIERLRADCGRLTQYIKNNRSNKVVKRVEAIFKSSLIHTRHEKNNRTPEEFLDTLKQKLALKVHRLRRYKKAQQRKNDNKIFGTNEKLFYRNLQKTQSDSTTDTNIQLPTKEQLETFWSGIWEEQVYHNEKADWIEKEEARYHTLEEMEFVEITETDITNITSRLHNWKSPGSDKIHNYWYKKLISLHKTLARNLTDIILGKQNIPEFIATGITYMLPKTTYLPEPSQYRPITCLPTIYKILTSAIATKINSHIEQHNIIAEEQKGCRRGHMGCKEQLVIDSTIHKHATSKNRNLHCTYIDYRKAFDSIPHAWLLKVLQIYKINPKIINFLRTVMANWKTTLQLNNCQSTIITRQISIKKGIYQGDSLSPLWFCLALNPLSNLLNNCKVGYTLKHSAAETIISHLIYMDDIKLYSKTEKEMKKLIDTTTEFSKDINMQFGLDKCKTLHIIRGKIKPGDYAVGNNDKITAMEPTDLYKYLGYKQLKGLDHTTTKQTLTTEYKRRINAVCKTQLYAKNLIKALNTFAIPILTYSFGIVKWSKTDIERIERSTRTTLTKYNNLHPKSAIERLTIKRQNGGRGLIDIQHLWQKQINNLKTFFQLKSHTSDIHKAIVQNDQNYTPLNLKVNMNSENLNANDPQKQKLEDWKKKVLHGRHPHDLEESHIDTIASNKWLKMGSLFPETEGFIIAIQDQVINTKNYRKYIIKDPTVTNDKCRKCHMQPETIQHITGACTTLTQTDYTHRHNQVANIIHQKLALKHKIIQNTNTPYYKYTPQTILENTSHKLYYDRAILTDRTIHYNRPDITLMDKTNKITYLIDIAVPNTHNLQKTITDKINKYSELKDEITQIWKQEKVYVVPIVISTTGVIPKHLKHSLQLLDLKESIYITLQKAVILNTCRIVRKFMQIEENEITQHHTPS

SEQ ID NO: 20853 - protein, 1175 aa, Apodemia virgulti
MRMKWSQEVNLFIMRTYYYITKLETDMTIYRKKLHERFSLQYPDVNVSEQRVSDQKRAIERNKLLSITTLEKLKDEVRKQLHEEETRNNVSEHRRQHTSEQPTHLYTQTQSLAHTHQITLSPDTSLANTQISHCSTQTEAVTILIENDIDTIINTHLINDTYMQEVTDKLRSTLILYSGMDPMVRPKLPKLKYSQKLFELIDLFNQNILNEFISLNVQLKDIHTLTYCTALVISEELNYNVTNNLRRTRNKNEYKPSWQHRLEKDIEKLRVDIGKLTQYINNNRSKKVVKRVEEIFKNVTIHTRHENNNRIPEEYLDTLKQKLALKVHRLKRYKKSEQRKKDNTTFATNEKLFYRNLGKRETVTLVNNTQEPTKQQIEEYWAGIWEDQKSHKEGAGWIKEEEKRWNGIKEMEFEQISEDEIRNITTKLHNWKSPGSDKVHNFWFKKLTVLHSPLAKIFSEIIQGQVNIPEFIAAGTTYMLPKTNNPTQPSEYRPITCLPTIYKLLTSVIAKRINTHIEQNNILAEEQKGCRRGHMGCKEQLIIDSTVVKHATSNQRNLHCTYIDYMKAFDSIPHSWLVKILEIYKINPKIISCLRYIMTLWKTTLHLHNRNTDIITREIAIRKGIYQGDSLSPLWFCLALNPLSYRLHSDRAGYRLKHSNIEKIISHLIYMDDIKLYAKNDKEMRQLIKSTTEFSTDINMQFGLDKCKAVHIIKGKIRPGDYAIDDTNNITAMEPNDVYKYLGFQQLKGLDHTHIKQTLTVEYKRRINAICKSQLSAKHLIKAINTYAIPILTYSFGIIKWTKTDLEQIERTTRRILTKHNNLHPKSAIERLTIRRQDGGRGLIDVQHLWHKQVYNLKLYFHTKSQTSDLHKAIIQNDRNYTPLNLEQDPSQENPQNIDPQNKKLEDWKKKVLHGRHPHDLNQPHIDTKASNMWLKIGSLFPETEGFIMAIQDQVINTKNYRKYIIKDPTVTNDKCRKCQTHPETIQHITGACTNLTRTDYTHRHNQIANIIHQKLAQKHKLIQNTNTPYYKYTPQSVLENTTHKLYYDRAILTDKTIHFNRPDITLQDKINKTTYLIDIAVPNTHNLQKTITEKINKYTELKEEIIRIWKQEKVYIVPIVISTTGIVPNNIRNSLKVIDLKPNILTIIQKAAILNTCRTVRKFMQLEETLPHTL

SEQ ID NO: 20854 - protein, 1304 aa, Lycaena phlaeas
METRSKRKRLGPLPGGDRRGAPGADAGCLSMRTVSGEELNRRAPTEQDATAGINDNIDRLTDRTISPVERHSPNTELYTPSVCPLPTSSSTNSLNSDSPIPASDVARGLSAFLPASTKAGKPRVRMRWSKDVNTFIMRTYFYITKLETDFTTYRQQMHEQFSNHYPEITVTQQRISDQRRTIIKNKLLSAEEIELIKTEVRIQLQSEENNNQDASIILYTQNQSAHSQLILSQPCVQSQVNTQSQTIINSQLNINNTQTLHSSTETESRENDMEILVEQNPLTEGLIQDIYDKLKIALTQYSSMDPSSRPKLPKLKYNPCLSNLINIFNQNILHRFISEDTQLIDLHTLIYCTAFVISTELNYKITDYAGNSQAKYKNKPPWQMRLEKDIERLRADCGRLTQYIKNNRSNKVVKRVEAIFKSSLIHTRHEKNNRTPEEFLDTLKQKLALKVHRLRRYKKAQQRKNDNKIFGTNEKLFYRNLQKTQSDSTTDTNIQLPTKEQLETFWSGIWEEQVYHNEKADWIEKEEARYHTLEEMEFVEITETDITNITSRLHNWKSPGSDKIHNYWYKKLKSLHKTLARNLTDIILGKQNIPEFIATGITYMLPKTTYLPEPSQYRPITCLPTIYKILTSAIATKINSHIEQHNIIAEEQKGCRRGHMGCKEQLVIDSTIHKHATSKNRNLHCTYIDYRKAFDSIPHSWLLKVLQIYKINPKIINFLRTVMANWKTTLQLNNCQSTIITRQISIKKGIYQGDSLSPLWFCLALNPLSNLLNNCKVGYTLKHSAAETIISHLIYMDDIKLYSKTEKEMKKLIDTTTEFSKDINMQFGLDKCKTLHIIRGKIKPGDYAVGNNDKITAMEPTDLYKYLGYKQLKGLDHTTTKQTLTTEYKRRINAVCKTQLYAKNLIKALNTFAIPILTYSFGIVKWSKTDIERIERSTRTTLTKYNNLHPKSAIERLTIKRQNGGRGLIDIQHLWQKQINNLKTFFQLKSHTSDIHKAIVQNDQNYTPLNLKVNMNSENLNANDPQKQKLEDWKKKVLHRRHPHDLEESHIDTIASNKWLKMGSLFPETEGFIIAIQDQVINTKNYRKYIIKDPTVTNDKCRKCHMQPETIQHITGACTTLTQTDYTHRHNQVANIIHQKLALKHKIIQNTNTPYYKYTPQTILENTSHKLYYDRAILTDRTIHYNRPDITLMDKTNKITYLIDIAVPNTHNLQKTITEKINKYSELKDEITQIWKQEKVYVVPIVISTTGVIPKHLKHSLQLLDLKESIYITLQKAVILNTCRIVRKFMQIEENEITQHHTPS

SEQ ID NO: 20855 - protein, 1266 aa, Telicota sp.
MRTVSGEELNRRAPSGSPEYTTATQANTNRDTNSPNLIVEPYSPSTASYIPSPVSSTDEKSRGTPTPTLSVAQGVNPLLPASTKAGKPRVRMKWSKEVNIFIMRTYYYITKLETDLTTYRKQLHEIFSLQYPQIQVTEQRISDQRRAIIRNNLLSLQMLNQIKEEVQRKLDETANNIETSYNFNTSQNTLYPQLSSITPLVTNITADLQIQSQTSNTSTQTETEILTIENDVDILVNNKFLNEDHIEELNIKLKTALIKYSGMDPITRPKLPKLRYSPKLSKLTHIFNQNIIMQYISHDTQLLDLHTLIYCVAVVISEELKYVITQNINSTRSKNYKKPPWQVRLEKDIEKLRKDCGRLTQYINNNRTKKVVKKVEDIFKRTTKHTIHENSNNKPEEFLDTLKQKLALKVGRLRRYKKTQQRKNDNILFNSNEKMFYRNQLKTQNNTTTTQNLHTPTQTQLETFWSGIWEENVHYNDKAVWIKEEENRWNTIKEMEFKEITETDITTTTTKLHNWKSPGLDRIHNYWFKKFTSVHNCLAKNLSDIILGKQNIPEFIATGITYMLPKGTQSPDPSKYRPITCLPTIYKILTSTLARKINAHIEHNNIIAEEQKGCRRGHMGCKEQLIIDSTIHKHASIKNRNLHCTYIDYKKAFDSIPHSWLLQILKIYKINPILIHFIQNIMSYWKTSLQLNSHNQTITTRKIYIKKGIYQGDSLSPLWFCLALNPLSHLLHNCRAGYNLGYEKEETTISHLIYMDDIKLYSKTQKEMKKLLEITTEFSKNINMEFGLDKCKTLHIIRGNIQPGDYTIDNNITIAAMDTTDMYKYLGYEQLKGLNHKQIKDTLTTEYKRRMNAICRTQLSGKNTVKAINTYAIPILTYSFGIIKWTNTDIDQIERTTRTILTKHNYLHPKSAIERLTLQRSHGGRGVIDIHNLWQKQIQSLKSFFYAKSLVSNIHKLIVGNDYNYTPLNLTEHQNITNFENADPQRHKIENWKKKTLHGRHPHDLEQAHVDTIASNKWLKTGNLFPETEGFIIAIQDQIINTKNYRKFIIKDPAVTNDKCRKCHIQPETIQHITGACTTLTQTDYTHRHNQIVNIIHQKLALKHNLIGNTNTPYYKYTPQTVLENATHKLYYDRAILTDKTIHCNRPDITLIDKINKTTYIVDIAVPNTHNILRTISEKISKYTELREEITRIWKQEKVYIVPIVISTTGVIPNHLHHSLKLIDLKTNDYLTLQKAAILNTCRIVRKFLKIDENDIHHSPTSQTSN

SEQ ID NO: 20856 - protein, 1034 aa, Spialia galba
MLENEIETIIDHNPSTDTFVHEIIDRFRTTLTEYSGMDPLVRPKLPKIRYSPRLFQLIHIFNYNILYQFISDDTQLIDVHTIIYSVALVIAEELNYKITNYTTSTKHEDCNKPSWEIRLEKDIEKLRVDCGRLTQYINNNRSSKVVKHVEKIFKTQNTHTRHENNNKKPEEFLDTLKQKLALKVHRLRRYKKAQKRKNDNIIFSTSERTFYRNLHKPQTEIDNDTNLPTQEQLETFWSGIWEQQVNHNDEANWIGEEEIKWNTIDEMEFIEITETDITNITARLHNWKSPGIDKIHNFWYKKLFSLHKIIAKNLTNIVLGKQNIPDFIATGITYMLPKSQFSPQPSQYRPITCLPTIYKILTAVITTKVTKHIEQHNIIAEEQKGCRRGHMGCKEQLIIDSTIHKHATSRNRNLHCTYIDYKKAFDSIPHSWLIKILHIYKINSNIIHFLRSIMSRWKTTLHLKTNRTTITTREIAIRKGIYQGDSLSPLWFCLALNPLSSLLHGCRAGYCLKYDTQDTIISHLIYMDDIKLYSKTETEMKKLIDITTKFSKDINMEFGLDKCRTLHIKRGKVRPGNYKIEETDIITAMEPTELYKYLGYKQLKGLDHTEIKNTLTTEFKKRINLLCKTHLTGKHLIKSLNSFAVPILTYSFGIIKWTKTDLEQIERTIRTTLTKHNYLHPKSAVERLTIKRENGGRGFIDINQLWEKQINRLKIFFHSKSQTSTIHKAIAQNDFNYTPLNLIEDTQTQNTQNNNQQIQKVDDWKRKILHGRHPHDLEQPHINSAASNKWLKIGSLFPETEGFIIAIQDQVINTKNYRKYIIKDSSITDDKCRKCHLQPETIQHITGACTTLTQTDYTHRHNQVANIIHQKLALKHKLIQNTNTPYYSYTPQTVLENSTHKLYYDRAILTDRTIHFNRPDITLRDKINKITYLIDIAVPNTHNLQKTISEKISKYTELKEEVSRIWNQSKVYVVPIVLSTTGIIPNHLLHSLKQLDLKETIYITLQKAAILNTCRTVRKFLQIDENNSLHTTLK

SEQ ID NO: 20857 - protein, 1178 aa, Fabriciana adippe
MKWNKDVNIFIMRTYYLITKLETDFSTYRKELHELFSRKYPSIHVTEQRVADQRRTIVRNKLLSQDLLNQIKEEVKSQIEIEEEIANETNQIQILNQPSNLPTFSTHHTIQIQLQQQSQNFLFNTQTTNSSTQTESITFVLENDIETLVEPILMITEENTQKLADRFKTSLSLYSGLDPTSRPQLPKLKYSTKLFELINIFYHKILQNYITNDIQLIDIHTLIYCTAIVVAEELGYKIKQNNDNDSRKNKYNNKEPWQIRLEKSIEVLRADIGRLTQYINNNRSNKVVNRVMKIFRNTTIHTRHENNNQKAEEFLNTLKQKLALKVHRLKRYKKAQQRKNDNKVFVTNEKLFYRQLSKPPNHLIENKNESIPTEEQLTTYWSGIWEEESNHNENANWILQEINNNKETIKMAFSEITETDILNTTAKLHNWKSPGVDKIHNFWYKKLTVFNKFIAKNLNDIILKKQNIPNFIAAGITYMIPKGKFSSDPSQYRPITCLPTIYKILTSFIASKINTHIEHNNIIAEEQKGCRRGHMGCKEQLIIDSTIHKHALTNNRNLHCTYIDYKKAFDSIPHSWLIQILKIYKIDPILIDFLKDIMSHWRTALQLNNNNKTVKTRQIHIKKGIYQGDSLSPLWFCLALNPLSRLLERCRVGYCFNLQTPSMPISHLIYMDDIKLYARTEKDMKKLIDITTEFSNDINMQFGLNKCKTLHIIKGKIRPGNYQVNDTDFITALEPNDIYKYLGYNQLKGLDHSSTKQTLTLEYKKRIHLICKSQLSGKHLIKGINTFAIPFLTYSFGIVNWTKTDIEHLERLVRTILTKYNYLHPKSAIERLSIKRQDGGRGLIDIRYLWQKQIQKLQQFFKIKANTSILHKIITENDHNYTPLNLEVLRDLENTLYNDPQKQKIENWKKKVLHGRHPHDLEQAHVDSIASNKWLKIGNLFPETEGFIIAIQDQIINTKNYRKYIIKDATTTNDKCRKCHTQPETIQHITGACTSLTQSDYTHRHNQISNIIHQQLAIKHGLIPKCNTPYYKYLPQTILENASHKLYYDRAVLTDKTIHFNRPDIILQNKIDKITYLIDIAVPNTHNLQKTFTEKTHKYLELKEEVARIWKQKKVYIVPIVLSTTGIIPKNLHHSMKILDLKNTTYITLQKAAILNTCRLVRKFLQIDDKQHTQTELS

SEQ ID NO: 20858 - protein, 1297 aa, Craniophora ligustri
METRSKSKRPQVLGAPSSSTGYDGSQPETGRRGAKNPRVTTDPRQTTQAILTDSDTLSETTTDTPSPFHSIESPTSSLYSYQIPIPSSPSTNSSSSLNVAREVNAFLPASTKAGKPRVRMKWSKEVNTFIMRTYFYVTKLETDLTTYRQQLHDIFTRHYPEITISEQRISDQRRAIVRNKLLSLEEIDTIKKEVRIRIQQEVDNNLSSNVNSHTHSHPENDPQIQLEPCTQIDTHTQSYTQAHSDTQNTYTSHACTQTENITLMLENDIETLEEQTPVTDSRIQELHDKLRTAITQYSGMDPVVRPKLPKLKYSPSLSQLIYLFNHKILHRYVSEDTQLMDLHTLIYCTALVISEELNYKITEYVGNTPPKYNSKPPWQIRLEKDIEKLRADCGRLTQYVNNNRSNKVVKRVEAIFKNHITHTRHENNNKTSEEFLDTLKQKLALKVHRLRRYNKTQQRKNDNIIFATNEKRFYRNLQKPQTEKETDTNTDTPTQEQLETFWSGIWEEQTHHNDKADWIKKEESRCHTIEDMEFDEITETDITNITARLHNWKSPGVDKVHNYWYKKLISLHKTIAKNLTDIVLLKQDLPDFIATGITYMLPKTTHSPQPSQYRPITCLPTIYKILTSAIAGKVNKHVEQHNIIAEEQKGCRRGHMGCKEQLVIDSTIHKHATTKNRNLHCTYIDYKKAFDSIPHSWLLQVLQIYKINPKIIDFLRTIMAHWKTTLHLNTRQNSVTTRQIFIKKGIYQGDSLSPLWFCLALNPLSHSLHSCKIGYPLKHSTAETIVSHLIYMDDIKLYAKTQKQMKDLIETVTQFSKDINMQFGLDKCKTLHIIRGKVRPGDYVVSNTDTIVAMGPTDLYKYLGYMQRKGLDHVKIKQTLTTEYKRRTNAICNTQLGGKNLIKALNTYAIPILTYSFGVIKWTKTDINQLERLTRTTLTKYNNLHPKSAIERLTIKRENGGRGLIDIHHLWQKQILSLKTFFHTKSQTSHIHRAITEHDSNYTPLNLNEQTITHIDFNNDIQKQKIEDWKKKVLHGRHPHDLEQIHVNSIASNKWLQVGNLFPETEGFIIAIQDQIINTKNYRKFIIKDPSVTNDKCRRCHIQPETIQHITGACTSLTQTDYTHRHNQVANVIHQKLALKHALIQNTNTPYYNYTPQNVLENSTHKLYYDRAILTDKTVHYNRPDITLQDKVNNITYLIDIAVPNTHNLQKTITEKISKYAELKEEVARIWRQNKVYVVPIVLSTTGIIPNHLIHSLKLIDLRESVYITLQKAAILNTCRIVRKFMQLDEHEFTPHS

SEQ ID NO: 20859 - protein, 1032 aa, Lycaena phlaeas
MEILVEQNPLTEGLIQDIFDKLKIALTQYSSMDPSSRPKLPKLKYNPCLSNLINIFNQNILHRFISEDTQLIDLHTLIYCTAFVISTELNYKITDYAGNSQAKYKTKPPWQMRLEKDIERLRADCGRLTQYIKNNRSNKVVKRVEAIFKSSLIHTRHEKNNRTPEEFLDTLKQKLALKVHRLRRYKKAQQRKNDNKIFGTNEKLFYRNLQKTQSDSTTDTNIQIPTKEQLETFWSGIWEEQVYHNEKADWIEKEEARYHTLEEMEFVEITETDITNITSRLHNWKSPGSDKIHNYWYKKLISLHKTLARNLTDIILGKQNIPEFIATGITYMLPKTTYLPEPSQYRPITCLPTIYKILISAIATKINSHIEQHNIIAEEQKGCRRGHMGCKEQLVIDSTIHKHATSKNRNLHCTYIDYRKAFDSIPHSWLLKVLQIYKINPKIINFLRTVMANWKTTLQLNNCQSTIITRQISIKKGIYQGDSLSPLWFCLALNPLSNLLKNCKVGYTLKHSAAEKIISHLIYMDDIKLYSKTEKEMKKLIDTTTEFSKDINMQFGLDKCKTLHIIRGKIKPGDYAVGNNDKITAMEPTDLYKYLGYKQLKGLDHTTIKQTLTTEYKRRINAVCKTQLYAKNLIKALNTFAIPILTYSFGIVKWSKTDIERIERSTRTTLTKYNNLHPKSAIERLTIKRQNGGRGLIDIQHLWQKQINNLKTFFQLKSHTSDIHKAIVQNDQNYTPLNLKVNMNSENLNANDPQKQKLEDWKKKVLHGRHPHDLEESHIDTIASNKWLKMGSLFPETEGFIIAIQDQVINTKNYRKYIIKDPTVTNDKCRKCHMQPETIQHITGACTTLTQTDYTHRHNQVANVIHQKLALKHKIIQNTNTPYYKYTPQTILENTSHKLYYDRAILTDRTIHYNRPDITLMDKTNKITYLIDIAVPNTHNLQKTITEKINKYSELKDEITQIWRQEKVYVVPIVISTTGVIPKHLKHSLQLLDLKESIYITLQKAVILNTCRIVRKFMQIEENEITQHHTPS

SEQ ID NO: 20860 - protein, 1179 aa, Mythimna ferrago
MRWSKEVNLFIMRTYLYITKLETDMTTYRKQLHELFSLQYPEVTVSEQRISDQRRTIVRNKLLSLVEIDKLKEEVRSQLQAESEGVGDATSFSLTQGATYLQQEQSTLITQSQPFYQSQAHSQTTHTSTQTENTIITLENEIETLTDSNQNSPTDAFVQDIHDKFKTALTQYSGIDPAVRPKLPKLRYSPKLFQLVHLFNTNILNQYISEDIQLIDVNTLIYCTALVISEELNFKITEYTRNTNNRKFNKPAWQQRLENDIEKLRADCSRITQYINNNRSNKLVRRVEVIFKNMATHTRHEADNRKPEEFLDSLKQKLALKVHRLRRYKKAQERKNDNSRFATNEKIFYRNLQKSQTNIDTPAENNVELPTAEELEIFWSGIWEEQVQHNEKSDWVTDEQTKWSSLEEMEFVELTESDITSITMRLHNWKSPGIDKIHNYWYKKLESLHKVLAKNLTEIILGKQNIPEFIATGITYMLPKTQYSPQPSQYRPITCLPTMYKILTSAIAAKINKHIEHYNIIAEEQKGCRKGHMGCKEQLVIDSTIHKHAATKNRNLHCTYVDYKKAFDSVPHSWLIQILQIYKINSKLIDFLKNVMLQWKTTLHLNFRDNHIATRLIYIKKGIYQGDSLSPLWFCLALNPLSHLLHRCQAGYSLKHTTEETIISHLIYMDDIKLYAKSEREMKQLIDTTTKFSKDINMQFGLDKCKTVHIIRGKIKPGDYPINSTDTITAMDATDLYKYLGYKQLKGIDHTSIKHTLNTEYKRRVVAVCKTQLSGKHLIKALNTYAIPILTYSFGVIKWSKTDIQHIERTTRATLTKHNNLHPKSAVERLTIKRQNGGRGLIDIHHLWQKQITRLRTFFHTKSHTSNIHKAIVINDNNYTPLNLNDQIETPHTGIDDPQKQKLENWNKKVLHGRHPHDLEQSHIDTMASNKWLKIGTLFPETEGFIIAIQDQVINTKNYRKYIIKDPTMTNDKCRKCQSQPETIQHITGACTSLTQTDYTYRHNQVANIIHQNLALKYKLIQDSNTPYYKYAPQTVLENTTHKLYYDRAILTDRTIHYNRPDITLQDKINKITHLIDIAVPNTHNLQKAIGEKISKYAELKEEVTRIWRQEKVYVVPIVVSTTGVIPHHLHYSLRVINLKDSTYITLQKAAILNTCRIVRKFMQIGENEISPHNTHFPL

SEQ ID NO: 20861 - protein, 1254 aa, Eilema depressum
METRAKRKRIGPLPGGDRRGTPGADAGCLSMRTVSGEELNRRAPTYKDTTAETTDDGASLTDRTNTPAEPYSPSTISYTPSRISSPSIPSSVPSSPPSNIFYADPPNPVLSVAQEVNAFLPASTKAGKPRKRMRWSKDVNTFIMRTYYTITKVETDMTTYRKQLHELFSQKYPTIIVTEQRVSDQRRTIVKNKLLTVDELDRLKEEVRLQLQEPADDSMEINSLTPTQNQIEDYNQSRHHSQSQSQSHTQMSHISTQTEFITLTVENDIETLIEHNPVVEVHTQEILDKFRAAITLYSGMDPVVRPKLPKLKYSFKLFQLTNLFNQNILNQFLTDDTQLTDIHTLIYCTALVITEELNYKVIDRIGSIKSKHNNKPPWQVRLEKDIEKLRADCGRLTQYINNNRSNKVVKKVEEIFKKRTLHTKHENSNRKPEEFLDTLKQKLALKVHRLRRYTKAQERRNNNTLFANNEKAFYRNLSKPQRETDTATNIETPTQTELETFWAGIWEDEVQHNEKAGWITEELNKWSTTDEMEFEEISESDITSITAKLHNWKAPGVDKIHNFWYKKLTILHKHIAKNFTDIILEKQHIPEFIATGITYMLPKTKYSPLPSQYRPITCLPTIYKILTSAIARKINTHIEHNQIIAEEQKGCRRGHMGCKEQLIIDSTIHKHATTKNRNLHCTYIDYKKAFDSIPHSWLLEILQIYKINPKITHFLRSIMSFWKTSLQLNYSDKNITTREISIKKGIFQADSLSPMWFCLALNPLSHLLHGCRAGYSFKNTTKETKISHLIYMDDIKLYAKTDNEMKKLVDTTVTFSKDINMEFGLEKCKTLHIIKGKIRPGNYAVDDTNDITAMDSTNFYKYLGYRQLKGLDHSAIKETLTKEYKNRINSICKTQLTGKNLIKAVNTYAIPIMTYSFGIVKWSKTDIEQIERTTRTTLTKHNNLHPKSAIERLTIKRQNGGRGLIDIQHLWQKQLHNLKIFFNMKSQSSEIHKTVTENDYNFTPLNLNETLNTQNRDIDDPQVLKIENWKKKTLHGRHPHDLEQPHIDSTASNKWLQIGNLFPETEGFIIAIQDQIINTKNYRKFIIKDPTATNDKCRKCHTQSETIQHITGACTTLTQTDYTHRHNQIVNIIHQSLAHKHNLIQNTNTPYYNYKPETILENTSHKLYYDRAILTDRTIHYNRPDITLQDKINKTTYLIDIAVPNTHNLQKTITEKINKYSDLKDEIIRIWKQDKVYIVGIMAELNNSIFQVSR

SEQ ID NO: 20862 - protein, 1290 aa, Autographa gamma
METRSKKKRIGPLPGGYRRGTPGADAGCLSMRSVSGEELSRRAPIDKDTTAETSDEIDRLTDRTSSPVEPFSPSTISYTPSLASSPLTISNTDTRLTPTLDVAREVNTFLPASTKAGKTRVRMRWSKEVNLYIMRTYYYITKLETDMTIYRKLLHEQFSQKYPDIVVSEQRVSDQRRTIVRNKLLSQIELDSLKEEVRLQLENLELNLPSEDHTQNVNSFVPNSNYNQHAHLHTINTLTSNNSVGDVACVETQTESLTLTIENDIGILVEPDPLPETCTQEIIEKFKTALVLYSGMDPTVRPKLPKLKYCPKLIQLVLLFNENILNKFISEDMQLVDLHTLIYCTAVVISEELNYKVTEYTGNNKPRYDNSHKPPWQVRLERGIEKLRADCGILTQYINNNRSNKVVKRVEAIFKTRIIHTRHESNNNKPEDFLDTLKQKLALKVHRLRRYKKAEQRKNDNILFSANEKAFYRNLAKPQTEGTVGSNIVEIPSKNELEDFWSAIWEKQELHNERAEWIKDEETKYNLLEEMDFVEITETDIANITIRLHNWKAPGVDKIHNYWYKKLGLLHKPLAKNLTDIILGKQVVPEFIATGITYMLPKGTHSASASQYRPITCLPTIYKILTSVIAAKINKHIEEHNIIAEEQKGCRRGHMGCKEQLVIDSTIHKHATTKNRNLHCTFIDYKKAFDSIPHSWLVKILQIYKVNSKLIDFLRIIMDKWKTTLHINYLSNSVSTRQIFIRKGIYQGDSLSPLWFCLALNPLSHMLHRSRVGYCLKNTSQDTIISHLIYMDDIKLYSKSEKEMKILIDTTSQFSNDINMQFGLEKCKTLHIIRGKIKPGNYPVNHTDTIVAMEPTDLYKYLGYNQLKGLDHRTIKDSLNIEYRRRINSLCKSQLSGKNLIKAINTYAVPILTYSFGIIKWTKTDIERIERATRTTLTKHNNLHPKSAIERLTIKRQDGGRGLIDIHHLWQKQISRLRTFFTTKSSTSEIHKAISQNDDNFTPLNLKDQANTLRLSDCEPQTEKILNWKKKVLHGRHPHDLEQSHVDTVASNKWLKIGSLFPETEGFIIAIQDQIINTKNYRKFIIKDPNITNDKCRKCHIHSETIQHITGACTTLTQTDYTHRHNQVVNIVHQQLAIKHKLIDTTYTPYYKYTPQTVLENATHKLYYDRAILTDRTVHYNRPDITLQDKVNKTTYLIDVAIPNTHNLQKTIAEKISKYADLKEEVARIWKQDKVFVIPIVVSTTGVIPKQLHNSLKIIDVKKSLYIMLQKAAILNTCRIVRKFMSAEEN

SEQ ID NO: 20863 - protein, 1274 aa, Dryas iulia
METRLKKKLRVPLPEGDRRGTPGADAGCFSMRTVSGLELNRRAPTDKNTTAEHTTPPNSPTDPYSPSSASYTPSIPSSPSSSHTIEHVPTLSAAREANAFLPASTKAGKPRVRMRWSSEVNIFIMRTYYQITKLETDFTTYRQSLHEIFCQKYPYINVSEQRISDQRRTIIRNKLISQELINQIREEVKCQIESEELAIGNFDNQTSSSLSQIGPQSQTFFNTQVTHTSTQTESLTCLLENEIETPITTTDVTEEYISNLREKLTTTLNLFSGLDPTVRPNLPKLKYTPKLAELIKIFNLKILNNYNCKDIQLIDIHTLIYCTAVVVGEELGYKITHKTEKGQEKKNKNKPSWQIRLEKSVEKLRVDIGRLTQYINNNRSKKVVNTVMKIFRNLKLHTKHENDNKKAEEFLDTLKQKLALKCNRLKRYKKAQKRKDDNILFATREKSFYRQLLNSNHQSQECNEESIPTEEQLTTYWADIWEQELKHNENAEWILEETDKYKAITEMRFTDITETEILKITAKLHNWKSPGVDKVHNYWFKKLTVFHKAIAKNLTEIILKKQNIPNFIMTGITYMIPKGKFSADPAQYRPITCLPTVYKILTSIITSRITTHIEQHNIIAEEQKGCRRGHMGCKEQLIIDSTIHKHATAKNRNLHCTYIDYKKAFDSIPHTWLIQILKIYKISPTIIQFLNNIMPQWKTTLQLNYNSNTIKTRNILIKKGIYQGDSLSPMWFCLALNPLSNLLNKSHLGYSFNSHIQNSLISHLIYMDDLKLYAKSHKDMKKLIDITTEFSNDIQMQFGLDKCKTLHIIKGKIQPGNYSISDQDIITALETSEIYKYLGYNQQKGLDHTNTKQILTTEYKKRIYAICKTQLSGKHLIKAINTYAIPILTYSFGIVKWTKTDIENLERLVRTTLTKHNYHHPKSAVERLTIKRSYGGRGLINVNALWQKQINNLKSFFINKSNSSVIHKTIRDNDHNYTPLNLEEIVDVESNPSTDPHKQQIDNWKKKVLHGRHPHDLEQAHIDSIGSNMWLKVGSLFPETEGFIIAVQDQIINTKNYRKYIIKDTKVTNDKCRKCHNQPETIQHITGACSNLTHSDYTHRHNQICNIIHQQLACKHKLIDTSNTPYYKYTPDTILENSTHKLYYDRAVLTDRTIHFNRPDIILQNKKDKITYVIDIAVPNTHNIQKTISEKISKYDELKEEITRIWKQKNVYIVPIVLSTTGVIPKHLHHSLQMLNLKNTTYITLQRAAILNTCRIVRKFLQIDEEQNTYTPQI

SEQ ID NO: 20864 - protein, 905 aa, Apodemia duryi
MQEVTDKLRSTLILYSGMDPMVRPKLPKLKYSQKLFELIDLFNQNILNEFISPNVQLKDIHTLTYCTALVISEELNYNITNNLRTTRNKNEYKPSWQHRLEKDIEKLRVDIGKLTQYINNNRSKKVVKRVEEIFRNVTIHTRHENNNRIPEEYLDTLKQKLALKVHRLKRYKKSEQRKKDNTTFATNEKLFYRNLGKRETVTLVNNTQEPTKQQIEEYWAGIWEDQKSHKEGAGWITEEEKRWNGIKEMEFEQISEDEIRNITTKLHNWKSPGSDKVHNFWFKKLTVLHSPLAKIFSEIIQGQVNIPEFIAAGTTYMLPKTNNPTQPSEYRPITCLPTIYKLLTSVIAKRINTHIEQNNILAEEQKGCRRGHMGCKEQLIIDSTVVKHATSNQRNLHCTYIDYMKAFDSIPHSWLVKILEIYKINPKIISCLRYIMTLWKTTLHLHNRNTDIITREIAIRKGIYQGDSLSPLWFCLALNPLSYRLHSDRAGYRLKHSNIEKIISHLIYMDDIKLYAKNDKEMRQLIKTTTEFSTDINMQFGLDKCKAIHIIKGKIQPGDYAIDDTNNITAMEPNDVYKYLGFQQLKGLDHTHIKQTLTVEYKRRINAICKSQLSAKHLIKAINTYAIPILTYSFGIIKWTKTDLEQIERTTRRILTKHNNLHPKSAIERLTIRRQDGGRGLIDVQHLWHKQVYNLKLYFHTKSQTSDLHKAIIQNDRNYTPLNLEQDPSQENPQNIDPQNKKLEDWKKKVLHGRHPHDLNQPHIDTKASNMWLKIGSLFPETEGFIMAIQDQVINTKNYRKYIIKDPTVTNDKCRKCQTQPETIQHITGACTNLTRTDYTHRHNQIANIIHQKLAQKHKLIQITNTPYYKYTPQSVLENTTHKLYYDRAILTDKTIHFNRPDITL

SEQ ID NO: 20865 - protein, 1181 aa, Ampittia dioscorides
MNANLPTSTKAGKPRVRMPWSMEMNMFIMRTYYYITKLETDMTMYRKQLHKLFSQQYPTMNVTEQRISDQRRAIVRNKMLSDKIIDEIKGAVRTQLQNETIVPTTENNTPHQSPSGHNACKEPSSQCLPSLLTQNNQSRYTQTDNEILVLENDIEILIDSNGVQPSNTYIEKLQNQLKSALTQFSGLDPTLRPKLPILKYCSKLSRLIHLFNNTILTQFISEDMQLTDIQTLIYCTAVVIAEELNYKIDYTRQARSKNNNKPPWQQRLEKDIQKLRADCGRLTQYIKNNRSNKIVKRVEEIFKTRKLHTKHENNNRKPEEFLDTLKQKLALKAHRLRRYIKSQKRKNDNSLFATNEKLFYRKLTQHDTSITKAITLPTKTQIELFWSEIWEKKLVHNDKAEWIKTEESRWSKIEEMEFAEITELDIKHAAALLHNWKSPGVDKIHNYWLKYLTTLHKFIARNFTEIILGRQTAPEFLTTGITYLLPKKGYSPEPSQYRPITCLPTIYKMLTSTIARKINVHIDKYNIMSEEQKGCRRGHMGCKEQLVIDSTIHKHATSKNRNLHCTYIDYKKAFDSIPHSWLLKILQIYKIHPSITNFMRNIMSTWNTTIQINNANNSIITRKIGIKNGIFQGDSLSPLWFCLALNPLSHMLHLSRAGYCFKHTSEKTIISHLIYMDDIKLYSQTEKQMKKLIEVTTEFSKSINMEFGFDKCKTLHIIKGKILPGDYIVSSSESISAMEPNDVYKYLGYNQLKGINHTTIKQELTNEYKRRIHSICNSYLSGKHTIKALNTYAIPVLTYSFGIIKWSKTDIENIERLTRTTLTKHKYLHPKSAVERLTIKRQSGGRGLIDINNLWLKQLYKLKTFFHTKSVTSKIHKAITHMDHNFTPLNLYEPTNSPNPTDTDPHTHKLYDWKMKTLHGRHPHDLDQPHIDSIASNRWLKVGNLFSETEGFIIAIQDQIINTKNYRKYIIKDPTVTDDKCRKCRAQPETIQHITGACTLLTQSDYTYRHNQIVNIIHQKLALKHNLIEKTNTPYYKYTPATVLENSSHKLYYDRAILTDKTIHYNRPDITLLDKINKITYLIDVAVPNTHNIQKTITEKYTKYTDLREEILRIWKQEKVYIVPIVLSTTGVIPRQIHQNLKLIGLQENLYIKMQKAAILNTCRIVRKFLQIDDNNIAPIP

SEQ ID NO: 20866 - protein, 1289 aa, Autographa gamma
METRSKKKRIGPLPGGYRRGTPGADAGCLSMRSVSGEELSRRAPTDKDTTAETSDEIDRLTDGTISPVEPFSPSTISYTPSLASSPLTISNSDILPTPTLDVAREVNTFLPASTKAGKPRVRMRWSKEVNLFIMRTYYYITRLETDMTIYRKLLHEHFSQKYPDIAVSEQRVSDQRRTIIRNKLLSQEELDRLKEDVRLQLENSEVNIPSEDHTQDVDWVLPNSNNNQIAYLQTLNSLTSNSGGDAVCAETQTESLTLTIENDIGILVGPDPLSDKSTQEILEKIKTALVLYSGMDPTMRPKLPKLNYSPKLIQLVSLFNENILNQFISEDMELVDLHTLIYCTAVVISEELSYKVTEYTGKSKVNYNDNNKPPWQIRLEKDIEKLRADCGKLTQYIHNNRSKNVVKRVEAIFKTRIIHTRHESSNNKPEDFLDTLKQKPALKVHRLRRYKKAEQRKNDNKLFSTNEKMFYRNLSKPQTVGAVGNNNVQMPSKNELEDFWSGIWEKQEQHNERAEWIKDEETKWNLIEEMNFVEITETDIANITIRLHNWKAPGVDKIHNYWYKKLGSLHKPLAKNLTDIVLGRQVVPEFIATGITYKLPKGMHSAQASQYRPITCLPTIYKILTSVIALKINKHIEQHNIIAEEQKGCRRGHMGCKEQLVIDSTVHKHAITKNRNLHCTFIDYKKAFDSIPHSWLVKILQIYKVNSKLIDFLSNIMKRWKTTLQLNYLSNSVTTRQIMIRKGIYQGDSLSPLWFCLALNPLSHMLHRSRVGYCLKNSSQDTIISHLIYMDDIKLYSKSEKDMKILIDTTSHFSNDINMQFGLDKCKTLHIIRGKIKPGDYPVNNTDTILAMEPTDLYKYLGYNQLKGLDHKTIKDSLNIEYRRRINLLCKSQLCGKHLIKAINTYAVPILTYSFGIIKWTKTDIERIERATRTTLTKHNNLHPKSAIERLTIKRQDGGRGLIDIHDLWQKQISRLKTFFTTKSSTSEIHKAITQNDDNFTPLNLKDQANTLRLSDCEPQKEKIENWKKKVLHGRHPHDLEQSHVDTVASNKWLKIGNLFPETEGFIIAIQDQIINTRNYRKFIIKDPNITNDKCRKCHIHPETIQHITGACTTLTQTDYTHRHNQVVNIVHQQLALKHKLIDTTYTPYYKYTPQTVLENATHKLYYDRAILTDRTVHYNRPDITLQDKVNKTTYLIDIAIPNTHNLQKTIAEKISKYTDLKEEVARIWKQDKVFVIPIVVSTTGVIPKQLHNSLKIIDLKKSLYIMLQKAAILNTCRLVRKFMSVEEN

SEQ ID NO: 20867 - protein, 1304 aa, Lycaena phlaeas
METRSKRKRLGPLPGGDRRGAPGADAGCLSMRTVSGEELNRRAPTEQDATAGINDNIDRLTDRTISPVERHSPNTELYTPSVCPLPTSSSTNSLNSDSPIPASDVARGLSAFLPASTKAGKPRVRMRWSKDVNTFIMRTYFYITKLETDFTTYRQQMHEQFSNHYPEITVTQQRISDQRRTIIKNKLLSAEEIELIKTEVRIQLQSEENNNQDASIILYTQNQSAYSQLILSQPCVQSQVNTQSQTIINSQLNINNTQTLHSSTETESRENDMEILVEQNPLTEGLIQDIYDKLKIALTQYSSMDPSSRPKLPKLKYNPCLSNLINIFNQNILHRFISEDTQLIDLHTLIYCTAFVISTELNYKITDYAGNSQAKYKNKPPWQMRLEKDIERLRADCGRLTQYIKNNRSNKVVKRVEAIFKSSLIHTRHEKNNRTPEEFLDTLKQKLALKVHRLRRYKKAQQRKNDNKIFGTNEKLFYRNLQKTQSDSTTDTNIQLPTKEQLETFWSGIWEEQVYHNEKADWIEKEEARYHTLEEMEFVEITETDITNITSRLHNWKSPGSDKIHNYWYKKLISLHKTLARNLTDIILGKQNIPEFIATGITYMLPKTTYLPEPSQYRPITCLPTIYKILTSAIATKINSHIEQHNIIAEEQKGCRRGHMGCKEQLVIDSTIHKHATSKNRNLHCTYIDYRKAFDSIPHSWLLKVLQIYKINPKIINFLRTVMANWKTTLQLNNCQSTIITRQISIKKGIYQGDSLSPLWFCLALNPLSNLLNNCKVGYTLKHSAAETIISHLIYMDDIKLYSKTEKEMKKLIDTTTEFSKDINMQFGLDKCKTLHIIRGKIKPGDYAVGNNDKITAMEPTDLYKYLGYKQLKGLDHTTTKQTLTTEYKRRINAVCKTQLYAKNLIKALNTFAIPILTYSFGIVKWSKTDIERIERSTRTTLTKYNNLHPKSAIERLTIKRQNGGRGLIDIQHLWQKQINNLKTFFQLKSHTSDIHKAIVQNDQNYTPLNLKVNMNSENLNANEPQKQKLEDWKKKVLHGRHPHDLEESHIDTIASNKWLKMGSLFPETEGFIIAIQDQVINTKNYRKYIIKDPTVTNDKCRKCHMQPETIQHITGACTTLTQTDYTHRHNQVANIIHQKLALKHKIIQNTNTPYYKYTPQTILENTSHKLYYDRAILTDRTIHYNRPDITLMDKTNKITYLIDIAVPNTHNLQKTITEKINKYSELKDEITQIWKQEKVYVVPIVISTTGVIPKHLKHSLQLLDLKESIYITLQKAVILNTCRIVRKFMQIEENEITQHHTPS

SEQ ID NO: 20868 - protein, 1296 aa, Spialia mafa
METRSKSKRIGPLPGGDRRGTLGAGAECHSMRTVSGEELNRRTPTDKNTTAETHTPTDRLTPIEPYSPSTVSYTPSIPTSPTSSLRSVTPTLDVARGANAFLPTSTKAGKPRVRMRWSKEINLFIMRTYYYITKLETDLTTYRKQLHELFLQEYPEINVTEQRIADQRRVIVRNNLLNQETLNQIKEEVKAQLEADNEIHNDCSITQQTTQNPFLVSQITSQSQPNTQNSQSSLTFTRNTQSMHTLSYSQSHISTQTEHITLMLENDIETIIDHNSCTDTFVHEITDRFRTTLMQYSGMDPLVRPKLPKLRYSPRLFQLIHIFNSNILHQFITDDIQLVDIHTIIYSVALVIAEELNYKITNYTRSTKHKDCNKPSWEIRLEKDIEKLRVDCGRLTQYIKNNRSSKVVKHVERIFKTQNTHTRHENNNKKPEEFLDTLKQKLALKVHRLRRYKKAQKRKNDNITFSTNEKTFYRNLHKPQTDIENDTNLPTQEQLETFWSGIWEQQVNHNEEASWIGDEEMKWNTIDEMEFIEITETDVTNITARLHNWKSPGIDKIHNFWYKKLFSLHKIIAKNLTDIVLGKQNIPDFIATGITYMLPKSQFSPQPSQYRPITCLPTIYKILTAIITTKITKHIEQHNIIAEEQKGCRRGHMGCKEQLIIDSTIHKHATSRNRNLHCTYIDYKKAFDSIPHTWLIKILQIYKINSKIIHFLHSIMSRWKTTLHLTTSRTSITTREIAIRKGIYQGDSLSPLWFCLALNPLSSLLHGCRAGYCLKYDSQNTIISHLIYMDDIKLYSKTETEMKKLIDTTTKFSKDINMEFGLDKCRTLHLKRGKVQPGDYEINETDLITAMGPTELYKYLGYKQLKGLDHTEIKNTLTTEFKKRINALCKTQLTGKHLIKSLNSFAIPILTYSFGIIKWTKTDLEQIERTIRTTLTKHNYLHPKSAVERLTIKRENGGRGLIDINQLWEKQINRLKSFFHSKSQTSTIHKAIVLNDFNYTPLNLKEHTQTQNTQNNDPQTQKVDDWKRKILHGRHPHDLEQPHINSVASNKWLKIGNLFPETEGFIIAIQDQVINTKNYRKFIIKDPSITNDKCRKCHNQPETIQHITGACTTLTQTDYTHRHNQVSNIIHQKLALKHKLIQNTNTPYYNYTPQTVLENDTHKLYYDRAILTDRTIHFNRPDITLTDKINKITYLIDIAIPNTHNLQKTISEKISKYTELKEEVFRIWKQNKVYIVPIVLSTTGIIPNHLLHSLKLLELKETLYITLQKAAILNTCRTVRKFLQIDENNSPLTTLT

SEQ ID NO: 20869 - protein, 1331 aa, Eilema sororculum
METRSRRKRIGPLPGGDRRGTPGADAGCLSMRTVSGEELSRRAPTDKDTTAETTDDGTSLTDRTNTPVEPYSPSTISYTPSRVSSPSIPSSVPSSPSNIFNSGPPYPVLSVAQEVNTFLPASTKAGKPRQRMRWSKDVNTFIMRTYYTITKLETDMSTYRKQLYELFSQKYPTVIVTEQRVSDQRRTIVKNKLLTVEELNRLKDEVQLQLQEHTDDSIEMNTLTPTQNQIEDDNQSRHHFQSQSQPHTQMSHISTQTEYITLVVENDIETIIEHNPVIEVHTQEILDKFRSAITQFSGMDPVVRPKLPKLKYSFKLFHLTNLFNQNILNQFLTDDTQLTDIHTLIYCTALVITEELNYKVIDRIGSIRSKHSNKPPWQVRLEKDIEKLRADCGRLTQYINNNRSSKVVKKVEAIFKSRTLHTKHEDSNKKPEEFLDTLKQKLALKVHRLRRYTKAQERRNNNTLFANNEKLFYRNLCKPQRETDTTTNTEIPTQTELETFWAGIWKNEVQHNEKAGWIAEELNKWSEIDEMEFEEITESDIRSITAKLHNWKAPGVDKIHNFWFKKLTILHKYIAKNFTDLILEKQHIPEFIATGITYMLPKTKYSPLPSQYRPITCLPTEYKILTSALTRKINTHIEHNQIIAEEQKGCRRGHMGCKEQLIIDSTIHKHATTKNRNLHCTYIDYKKAFDSIPHSWLLQILQIYKINPKITHFLRNIMPFWKTSLQLNCSDKNITTREISIKKGIYQGDSLSPLWFCLALNPLSHLLHGCRAGYNFKNTSTETKISHLIYMDDIKLYAKTDNEMKKLVETTAAFSKDINMEFGLEKCKTLHIIKGKIRPGNYAVDDINDITAMESTDFYKYLGYRQLKGLDHSAIKETLTKEYKSRINSICKTQLTGKNLIKAVNTYAIPIMTYSFGIVKWSKTDIEQIERTTRTTLTKHNNLHPKSAIERLTIKRQNGGRGLIDILHLWRKQLHNLKIFFHMKSQSSDIHKTITENDHNFTPLNLNETLNTQNRDIDDPQVLKIENWKKKTLHGRHPHDLEQPHIDPTASNKWLQIGNLFPETEGFIIAIQDQIINTKNYRKFIIKDPTATNDKCRKCHTQSETIQHITGACTTLTQTDYTHRHNQIVNIVHQSLAHKHNLIQNTNTPYYNYKPEIILENTSHKLYYDRAILTDRTIHYNRPDITLQDKINKTTYLIDIAVPNTHNLQKTITEKINKYADLKDEVMRIWRQDKVYIVPIVVSTTGVIPKHLHHSLKLIDLKDNIYIPIQKAAILNTCRIVRKFLQIDDTENSHTLTQDTHTLTQDTHTLTQDTHTLTQDTHTPHLLGSGP

SEQ ID NO: 20870 - protein, 1286 aa, Heliconius numata
METRLRKKLRGPLPEGNRRGAPGADAGCFSIRTVSGEELNRRAPTGDLQPEESTAEHLSTYTSRVNSPSEPYSPSTASYNPSVHSSPTSSVCSRGPPIPVLDVAQEANAFLPASTKAGKPRVRMQWSKDVNLFIMRTYYHITKLETDMTIYRKKLHEQFLLNYPQIKVSEQRISDQRRTIERNNLLSQEILNRLKEEVRIQLQEEETNNVNITEIPNHTYIRTRTSSPTTYQHYANSQQTQTSHIFTQTETITQLLENDIEGFVNVQPPNEEYIRIIIDKFRTNLTLYAGMDPKMRPKLPKLRYCRKLYQLSNLFNENILIEYISPDTKLIDLHTLIYCTALTITEELNYKITGHSRINSKSNKYKPAWQHRLEKDIQKLRADIGKLTQFINNNRSKKIIERVEFLLKTTKVHTKHEKNNKRPEEVLDTLKQKLALKSHRLKRYNKAQERKAQNNTFVRNEKQFYRNLLKPQNLIQDKLETPTKEELEKYWSGIWEEQTYHNNQADWITKEEQRWHDLEVMEYNELVKEDIKEITDKLHNWKSPGIDKIHNFWFKKLTFLHSSLAKNISEIISGQQNIPEFLATGITYMLPKNNFSTQPSQYRPITCLPTLYKIITSLITQKINKHIENNNIIAEEQKGCRRGHMGCREQLIIDSTIMKHALSKNKNLHCTYIDYQKAFDSIPHSWLLHILNIYKINPKIINFLANIMTQWKTTLHLHSSNYNINTREIAIKKGIYQGDSLSPLWFCLALNPLSYLLKCNRAGYVLKHDNSETIISHLIYMDDIKLYSKNNKEMKTLIDTTTEFSEDIHMHFGLDKCRTVHIVKGKIRPGDYAINEIDKITAMEPNEFYKYLGLQQLKGLNHTAIKETITNEYKKRINAICKSQLSSKHLIKALNTYAIPILTYTFGIVKWSNSNIEQIERLTRTTLTKHNNLHPKSAIERLTIKRKHGGRGLIDIKQLWQKQLHNLSNFFYTKAQSSNIHKSIVQNDFKYTPLNLNDCQSTGNLINIDPQKKKIEEWKKKVMHGRHPNDLQQPHIDLEASNKWLQTGSLFPETEGFIIAIQDQIINTKNFRKYIIKDPTVTSDKCRRCHTQPETIQHITGACASLTQTDYTHRHNQLVNIIHQRLAHKHKLIQDTNIPYYKYTPQSVLENSSHKMYYDRAILTDKTIHFNRPDITLQDKINKTVYLIDVAVPNTHNIQKTIVEKINKYADLKEEVTRIWKQNKVYVVPIVISTTGVVPKAIHHYLKIINLEDNILHTLQKAAILNTCRIVRKFLQIEENNISTLN

SEQ ID NO: 20871 - protein, 1276 aa, Hesperia comma
METRSKSKRLGPLPGGYRRGTPGADAGCFSMRTVSGEELNRRAPSGSPEYTTANQTDSNSNSNSPISIQNPYSPSTASYIPSPVSFADDISRVAPTPTLSVAQEGNTFLPASTKAGKPRVRMSWSKEVNIFIMRTYYYVTKLETDMTMYRKQLFELFSRKYPEIKVTEQRISDQRRTIIRNKLLPISTLNQIKEEVRIELQEKTDLVDDLPDDMPQTLQQTNTETPHTLTQTSQSCTQTECETVVIENDIDILVESEPLTHVQKLNDRLKTILIQYSGMDPTVRPKLPKLKYSNQLNQIVHVFNTNILPQYVSNDTKLVDVHTLIYCTAIVTAEELNYKITEHIDIIGSKHNYKPPWQQRLEKDIEKLRADCGRLTQYINNNRSNKVVKKVQEIFKRKITHTRHENNNSKPEEFLDTLKQKLALKVHRLRRYKKAQQRKNDNILFNKNEKGFYRNLLKQTCKPTTENLELPTAVQLEEFWAKIWEERAEHNDKAYWITQEENRWNTIEEMEFIEITETDITGVTAKLHNWKAPGVDKIHNFWYKKLTSLHKPIAKNLTDIILGRQNIPEFIATGITYMLPKTSHSVEPSKYRPITCLPTIYKILTSTIARKVNAHIEGNQIMAEEQKGCRRGHMGCKEQLIIDSTIHKHAITKNRNLHCTFIDYQKAFDSVPHSWLIHVLQIYKINPKIINFMRNVMTHWKTSLQLNYKIKTITTRQLTIRKGIFQGDSFSPLWFCLALNPLSNLLHDCHAGYNLKSTTENTTISHLIYMDDIKLYSQTQKQMEQLIDTTREFSKDINMEFGLDKCKMLHIIKGKVRPGDYEIDDNMTIRAMEPSDLYKYLGYNQLKGLKHTEIKQTLTIEYKSRMNAICNSQLSGKNLIKALNTYAIPILTYSFGVIKWTRTDIENIERITRTTLTRHNYLHPKSAVERLTIKRYNGGRGLIDVNHLWQKQIENIKSFFFNKSLTSNIHRAICQNDHNFTPLNLSEKNIPDCTNNRDPQSQKIENWKKKTLHGRHPHDLQQMHIDPVASNKWLTLGSLFPETEGFIMAIQDQIVNTKNYRRYIIKDSSIKDDKCRKCHTQPETIQHITGGCTTLTQTDYTYRHNQIVNIVHQKLALKHNLIQKTDTPYYKYSPATILENATHKLYYDRAILTDRTIHYNRPDITLQDKTNKITYLIDIAVPNTHNIQKTISEKINKYLDLKEEIARIWKQNKVYVVPIVLSTTGVIPKHILHSLKLIDLKETLYITLQKAAILNTCRIVRKFLQIDADEIDTNTT

SEQ ID NO: 20872 - protein, 1296 aa, Ochlodes sylvanus
METRLKRKRLGPLPGGNRRGTPGADAGCFSMRTVSGEELNRRAPSGSPENTTANHTDNNSDINSSITIDEPYSPSTASYIPSPVSSVDENTRRAPTPTLTVAQGANAFLPASTKAGKPRVRMSWSKEANMFIMRTYYYITKLETDMTTYRKQLHELFLRQYPDIQVTEQRISDQRRTILRNKLLPLNIINQIKEEVRKNLQENPDDTDTTLNFYNNLESQSNFTTPSIHHISSSPQILSQQHTQTLHSSTQTESETLTIVNDIDILVDNNTFKEAQINSLSTKLRTALIKYSGMDPAARPKLPKLKYSYELSNLINIFNQKITHQFIANDLQTSDIHTLIYCIAVVIAEELEYKVTVKTNNNFAQKKSSNKPPWQIRLERDVEILRTDIARLTQYINNNRSNRVVKKVEEIFKRRIIHTRHENYNNKPEEFLDTLKQKLTLKANRLKRYKKAQQRKNDNTLFTTNEKLFYRKLLEPKSCTTTTENIELPTETQLETYWSGIWEKQILHNEKADWITQEENRWNTIEEMKFEAITETDITTITTKLHNWKTPGIDSIHNFWYKKLTSLHKCLARNLTDIVLGKQAAPEFITIGTTYMLPKTTHSSDPSQYRPITCLPTIYKILTAAIARKINTHIEHYGIIAEEQKGCRKGHMGCKEQLVIDSTIHKHAATKNRNLHCTYIDYKKAFDSIPHSWLLQILQIYKINSNIINFMHNIIPRWKTSLQLNSHNQTITTRTISIKKGIYQGDSLSPLWFCLALNPLSYLLNQCHAGYSLSHITEKTVISHLIYMDDIKLYSKTQKEMKILIEKTTEFSKDINMEFGLDKCKTLHIIRGKIQPGNYAIDDSTSIKAMEATDMYKYLGYKQLKGLDHTQIKHTLTTEYKRRINAICNTRLAGRSLIKALNTYAIPILTYSFGIIKWSKTDIDQIERISRTTLTKHNYLHPKSAIERLTIKRQCGGRGLIDIHHLWQKQICNLKHFFYTKSLVSNIHKAIFKNDFNYTPLNLNEYQNTANLDNRDPQIPKTENWKKKTLHGRHPHDLEQTHIDLIASNKWLQVGNIFPETEGFIIAIQDQIINTKNYRKFIIKDPSIKSDKCRRCHTQSETIQHITGACTTLTQTDYTHRHNQIVNIIHQKLAIKHNLIQNTNTPYYKYTPSTVLENASHKLYYDRAILTDKTIYCNRPDITLKDKLNKTTYLIDIAVPNTHNIQKTISEKISKYTELKEEVTRIWKQEKVYIVPIVLSTTGVIPKHLHHSLKQIDLRENIYITLQKAAILNTCRIVRKFLQIDENEHHHTTPEN

SEQ ID NO: 20873 - protein, 1308 aa, Hypena proboscidalis
MEKMLLRSKRLGPLSGGDRRSTPGADAGCYSIRSVSGEELNRRVPSGSLENTTANHNDRQTDLDNISLSSTQSITIVEPYSPSTVSYVPTPVSSIEENSRGTPTPTLTVAQGVNTFLPASTKAGKPRVRMRWSEEVNMFIMRTFLYITKLETDMTTYRQQLHELFSRQYPEINVSEQRISDQRRTIVRNKLLSQELLNRIKEEVSKQLEEEAENSNQDDHINLSNRILGQNQLSSQSNNPPLTLHQLGTQTQEQSYTQVSHSSTQTETEILTLENDIENLTNQNLVSDLYVQEMQDKFRTAITQYSGMNPASRPKLPKLKYSRKLLQLTQLFNQNILSRFLTNDTPLIDLHTLIYCTALVISEELGFKITEHIHAARSRTEKPPWQIRLEKDIEKIRADCGRLTQYINNNRSAKVVKRVEAIFKTRNIHTRHENDNRKPEEFLDTLKQKLALKVHRLKRYKKSQKRKDDNILFKSNEKMFYRTLLTPQSNTHILQNIEIPTKTQLETFWAGIWEEQIEHNDKAEWITVEEEKWNTIDEMEFDEITETDITNITTRLHNWKSPGIDKIHNFWYKKLTSSHKALAKSLTDIILGKHTIPEFLATGITYMLPKIAHSPQPSQYRPITCLPTIYKILTSALTRKITKHIEHNNILAEEQKGCRRGHMGCKEQLVIDSTIHKQATTKNRNLHCTYIDYRKAFDSIPHSWLLKTLQIYKINPKIRDFMHNIMSYWKTSLQLNSNNNTVTTRQIAIRKGIYQGDSLSPLWFCLALNPLSHMLHRCRVGYSLKNNSEESLISHLIYMDDIKLYAKADKDMKKLVDTTSKFSTDINMQFGLDKCKTLHIVRGKIRPGNYAVDENNAITAMESSDLYKYLGYKQLKGLDHTEIKNTLTTEYKRRVNAICKSQLSGKSLIKAINTFAIPILTYSFGVIKWSKTDIEQLERTTRTTLTKHNHLHPKSATERLTIKRPNGGRGLIDIHHLWQKQIHNIKTFFHSKSQTSNIHKAICQNDSNFTPLNLNQHQNTQNPNSTDPQTQKIETWKKKTLHGRHPHDLEHAHIDKTASNQWLKSGNLFPETEGFMIAIQDQIINTKNYRKYIIKDSSVTNDKCRKCNTQPETIQHITGACITLTQTDYTHRHNQIANIIHQKLAHKYNLIHNTNTPYYKYTPQTILENASHKLYFDRAILTDRTIHYNRPDITLVDKLNKTTYLIDIAVPNTHNLQKTIVEKISKYAELKEEVTRIWRQDKVYVVPIVLSTTGVIPKHLHHSLKMLDLKEHIYIMLQKAAILNTCRIVRKFLQIDENEVTTQHIVGP

SEQ ID NO: 20874 - protein, 1269 aa, Niconiades incomptus
MRTVSGEELNRRAPSGSPEYITANRTDSNSHTNSPVSVHDPYSPSTISYVPSPVSFADDISRGTPTPTLDVAQEVNTFLPASTKAGKPRVRMRWNKEVNMYIMRTYYYITKLETDMTMYRKQLYDLFSRQYPEIKVSEQRISDQRRTIIRNKLLPINILDQIKEEVRIKLQENTDIIDYVPSLEPCNLENISQLQVHTNLHITETHNNDTQLINTERSHVATEITHRYVQTECETVIIENDIDILVKCNPLTETQIQKTHDRFKTILIHYSGMDPTVRPILPKLKYSYKLSQLINLFNNNILPQYISNDIKLIDVHTLIYCTAVGIAEELNYTIADHTNNTRSNNINKPPWQHRLEKDIEKLRADCGRLTQYINNNRSQKVVKKVQEIFKRKVTHSRHENDNSKPEEFLDTLKQKLALKVHRLRRYKKAQQRKNDNILFSNNEKAFYRNLQKQTHNPTTKNLQTPTATQLEEFWAKIWEDKVQHNDKANWITQEQSRWNALQEMDFVEITERDITNVTATLHNWKSPGIDKIHNYWFKKLTSLHKCIATNLTEIILGKQNIPEFIAIGITYMLPKNTHSLEPSQYRPITCLPTIYKILTSTIARKINTHIENNNIMAEEQKGCRRGHMGCKEQLVIDSTIHKHATTKNRNLHCAYIDYQKAFDSVPHSWLIHVLQIYKINSKIIHFLSNVMSYWKTSLQLNSTNSRVTTRQIVIRNGIYQGDSLSPLWFCLALNPLSSLLHSSRAGYNLKSTTETTTISHLIYMDDIKLYSQTQKQMSQLINITSEFSKDINMKFGLEKCKTLHISKGKILSGDHEIDSSNTIRAMEPSDLYKYLGYNQLKGLNHTQIKHNLTTEYKKRLNAICNTKLSGKNTIKALNTYAIPILTYSFGVIKWSNTDIEHIERITRTTLTKHNYLHPKSAVERLTIKRNDGGRGLIDIHCLWQNQIDRLKVFFHTKAVSSNIHKVICQNDHSLTPLNLNDNKTILGTENRNLQSYKLDNWKKKTLHGRHPHDLQQTHIDSVASNKWLTIGSLFPETEGFIIAIQDQVINTKNYRKFIIKDSSVITDKCRRCHTQPETIQHITGACTTLTQTDYTYRHNQVVNIIHQRLALKYNLIQDTNTPYYKYTPSTVLENSTHKLYYDRAILTDRTIHYNRPDITLTDKTNKVTYLVDIAVPNTHNVQKTISEKINKYIELKEEVARIWNQNKVYVVPIVLSTTGLIPKHLHHSLKLINLKETLYITLQKAVILNTCRIVRKFLQIDDNEAHTNI

SEQ ID NO: 20875 - protein, 1000 aa, Toxidia parvulus
MDPTTRPKLPKLKYSHKLSQLIHLFNQDILTQFITNDMQLVDIHTLIYCTAVVIAEELNYKITDYTQNTTTKTYNKPPWQLRLERDIEKLRADCGRLTQYINNNNRSNKVVKKVEEIFRNRLTHTRHENNNRKPEEFLDTLKQKLALKVHRLRRYKKTQQRKNSNTLFTTNEKIFYRKLLTPQSDTSTKENIEIPTKIELEKFWSRIWEDQVQHNDKADWIKKEENRWNTIEEMEFHEITESDIANITSRLHNWKSPGIDKVHNYWYKKLTSLHKSIAQNLTDIILGKQNIPEFIATGITYMLPKTTYTPQPSQYRPITCLPTIYKILTSAIARKINTHIEKNHIISEEQKGCRRGHMGCKEQLIIDSTVHKHATTKNRNLHCTYIDYKKAFDSIPHSWLLHILQIYKINPTITNFMRKIMPHWKTSLQLTSRDHTITTRQISIRKGIYQGDTLSPLWFCLTLNPLSNLLHGCQVGYCLKYATEKTTVSHLIYMDDIKLYSQNQKEMKKLIETTAGFSKDINMEFGLDKCKTLHIIRGKIQPGDYAIDENNTITAMEPTDMYKYLGFKQLKGLDHTAIKQTLITEYKRRMNALCSTQLSGKHTIKAINTYAIPILTYSFGIIKWSNTDIERIERNTRTTLTKHNHLHPKSAIERLTIKRHNGGRGLIDIHHLWQKQIHNLKTFFHSKSLTSNLHKAISLNDHNFTPLNLSEAQNTQNPGDIDPQVQKIENWKKKTLHGRHPHDIEQTHIDLAASNKWLKVGNLFPETEGFIIAIQDQIINTKNYRKFVIKDPTVTNDKCRKCHTQSETIQHITGACTTLTQTDYTHRHNQITKIIHQKLALKHNLIQNTNTPYYKYTPSTILENTSYKLYYDRAILTDRTIHYNRPDITLQDKINKTTYLIDIAVPNTHNLQKTITEKISKYGELKEEVIRIWKQDKVYIVPIVLSTTGVIPKHLHHSLKLIQLQDTLYITLQKAAILNTCRIVRKFLQINENEITLHNT

SEQ ID NO: 20876 - protein, 772 aa, Calephelis nemesis
MEFEDITQTDITNITAKLHNWKTPGIDKIHNYWYKKLTILHEHLAKNITQMIVGNQQIPDFISTGITYMLPKTTHPTQPSQYRPITCLPTIYKIVTFVIPLKINTHIEHNNIIAEEQKGCRRGHMGCKEQLIIDSTIHKHTASKNRNLHCTYIDYKKAFDSVPHSWLLQILDIYKISPTITDFLRKIMPTWKTTLQINNSHNTITTRQIFIKRGIYQGDSLSPLWFCLALNPLSRLLQRCRAGYCLTHNNDKTTISHLMYMDDIKLYSQTKADMKKLLKSTTTFSNDIHMQFGLDKCRTLHIIRGKIQPGSYEVSDTDTILAMEPTEFYKYLGYTQQKGLDHTNIKKSLTTEYKRRLNTICKTQLSGRHIIEAINTFAIPILTYSFSVIKWAKTNIENLERTTRTILNKHNNLHPKSAIERLTIKRQDGGRGLIDIQHPWEKQIHNLKTFFHTKSHSSDIHKAICENDHNYTPLNLIEHTYTHNPHTHNPQTQKIDNWKKKTLHGRHPHDLEQSHIDTQASNKWLKVGSLFPETEGFIIAIQDQIINTKNYKKYIIKDPSITNDKCRRCHTQPETIKHLTGACSTLTQTDYTHRHNQISNIIHQNLAHKHNLIQNIYTPYYNYKTQNVLENATHKMYYDRAILTDRTIHYNRPDITLTDKLNKTTYLIDISVPNTHNLQKTIAEKINNYTELKEEVIRIWRQEKVYVVPIVLSNTGVIPKHLHHSLKLLDIKDTTYIILQKAVILNTCRIVRKFMQIDENEITPSHTTYTHN

SEQ ID NO: 20877 - protein, 1308 aa, Hypena proboscidalis
MEKMLLRSKRLGPLSGGDRRSTPGADAGCYSIRSVSGEELNRRVPSGSLENTTANHNDRQTDLDNISLSSTQSITIVEPYSPSTVSYVPTPVSSIEENSRGTPTPTLTVAQGVNTFLPASTKAGKPRVRMRWSEEVNMFIMRTFLYITKLETDMTTYRQQLHELFSRQYPEINVSEQRISDQRRTIVRNKLLSQELLNRIKEEVSKQLEEEADNSNQDDHINLSNRILGQNQLSSQSNNPPLTLHQLGTQTQEQSYTQVSHSSTQTETEILTLENDIENLTNQNLVSDLYVQEMQDKFRTAITQYSGMNPASRPKLPKLKYSRKLLQLTQLFNQNILSRFLTNDTPLIDLHTLIYCTALVISEELGFKITEHIHAARSRTEKPPWQIRLEKDIEKIRADCGRLTQYINNNRSAKVVKRVEAIFKTRNIHTRHENDNRKPEEFLDTLKQKLALKVYRLKRYKKSQKRKDDNILFKSNEKMFYRTLLTPQSNTHILQNIEIPTKTQLETFWAGIWEEQIEHNDKAEWITVEEEKWNTIDEMEFDEITETDITNITTRLHNWKSPGIDKIHNFWYKKLTSSHKALAKSLTDIILGKHTIPEFLATGITYMLPKIAHSPQPSQYRPITCLPTIYKILTSALTRKITIHIEHNNILAEEQKGCRRGHMGCKEQLVIDSTIHKQATTKNRNLHCTYIDYRKAFDSIPHSWLLKTLQIYKINPKIRDFMHNIMSYWKTSLQLNSNNNTVTTRQIAIRKGIYQGDSLSPLWFCLALNPLSHMLHRCRVGYSLKNNSEESLISHLIYMDDIKLYAKADKDMKKLVDTTSKFSTDINMQFGLDKCKTLHIVRGKIRPGSYAVDENNAITAMESTDLYKYLGYKQLKGLDHTEIKNTLTTEYKRRVNAICKSQLSGKSLIKAINTFAIPILTYSFGVIKWSKTDIEQLERTTRTTLTKHNHLHPKSATERLTIKRPNGGRGLIDIHHLWQKQIRNIKTFFHSKSQTSNIHKAICQNDSNYTPLNLNQHQNTQNPNSTDPQTQKIETWKKKTLHGRHPHDLEHAHIDKTASNQWLKSGNLFPETEGFMIAIQDQIINTKNYRKYIIKDSSVTNDKCRKCNTQPETIQHITGACITLTQTDYTHRHNQIANIIHQKLAHKYNLIHNTNTPYYKYTPQTILENASHKLYFDRAILTDRTIHYNRPDITLVDKLNKTTYLIDIAVPNTHNLQKTIVEKISKYAELKEEVTRIWIQDKVYVVPIVLSTTGVIPKHLHHSLKMLDLKEHIYIMLQKAAILNTCRIVRKFLQIDENEVTTQHIVGL

SEQ ID NO: 20878 - protein, 1308 aa, Hypena proboscidalis
MEKMLLRSKRLGPLSGGDRRSTPGADAGCYSIRSVSGEELNRRVPSGSLENTTANHNDRQTDLDNISLSSTQSITIVEPYSPSTVSYVPTPVSSIEENSRGTPTPTLTVAQGVNTFLPASTKAGKPRVRMRWSEEVNMFIMRTFLYITKLETDMTTYRQQLHELFSRQYPEINVSEQRISDQRRTIVRNKLLSQELLNRIKEEVSKQLEEEADNSNQDDHVNLSNRILGQNQLSSQSNNPPLTLHQLGTQTQEQLYTQISQSSTQTETEILTIENDIENLTNQNLVSDLYVQEMQDKFRTAITQYSGMNPASRPKLPKLKYSRKLLQLTQLFNQNILSQFLTNDTPLIDLHTLIYCTALVISEELGFKITEHIHAARSRTEKPPWQIRLEKDIEKIRADCGRLTQYINNNRSAKVVKRVEAIFKTRNVHTRHENDNRKPEEFLDTLKQKLALKVHRLKRYKKSQKRKDDNILFKSNEKMFYRTLLTPQSNTHILQNIEIPTKTQLETFWAGIWEEQIEHNDKAEWITVEEEKWNTIDEMEFDEITETDITNITTRLHNWKSPGIDKIHNFWYKKLTSSHKALAKSLTDIILGKHTIPEFLATGITYMLPKIAHSPQPSQYRPITCLPTIYKILTSALTRKITKHIEHNNILAEEQKGCRRGHMGCKEQLVIDSTIHKQATTKNRNLHCTYIDYRKAFDSIPHSWLLKTLQIYKINPKIRDFMHNIMSYWKTSLQLNSNNNTVTTRQIAIRKGIYQGDSLSPLWFCLALNPLSHMLHRCRVGYSLKNNSEESLISHLIYMDDIKLYAKADKDMKKLVDTTSKFSTDINMQFGLDKCKTLHIVRGKIRPGNYAVDENNAITAMESSDLYKYLGYKQLKGLDHTEIKNTLTTEYKRRVNAICKSQLSGKSLIKAINTFAIPILTYSFGVIKWSKTDIEQLERTTRTTLTKHNHLHPKSATERLTIKRPNGGRGLIDIHHLWQKQIHNIKTFFHSKSQTSNIHKAICQNDSNFTPLNLNQHQNTQNPNSTDPQTQKIETWKKKTLHGRHPHDLEHAHIDKTASNQWLKSGNLFPETEGFMIAIQDQIINTKNYRKYIIKDSSVTNDKCRKCNTQPETIQHITGACITLTQTDYTHRHNQIANIIHQKLAHKYNLIHNTNTPYYKYTPQTILENASHKLYFDRAILTDRTIHYNRPDITLVDKLNKTTYLIDIAVPNTHNLQKTIVEKISKYAELKEEVTRIWRQDKVYVVPIVLSTTGVIPKHLHHSLKMLDLKEHIYIMLQKAAILNTCRIVRKFLQIDENEVTTQHIVGP

SEQ ID NO: 20879 - protein, 1273 aa, Hesperia meskei
MRTVSGEELNRRAPSGSPEYTTANQTDSFSNPNSPILIENPYSPSTVSYIPSPVSFADDISCEAPTPALSVAQGVNTFLPASTKAGKPRVRMRWSKEVNIFIMRTYYYITKLETDMTVYRKQLFEAFSQKYPEIKVTEQRISDQRRTIIRNQLLPINTINQIKEEVRIKLQENSNLLDQVPSETICDRVENISQLHEHTNTQSSEAQNKETPQTLKQLYTHTPHSSIQTANTYAQTECETVVVENDIDILVESNPVIDTQKLHDKLKMILIQYSGMDPIVRPRLPKLKYSNELTQLVHLFNTYILPQYISNDTKLVDVHTLIYCTAFVIGEELNYKITGQTNNSRSKNNPKPPWQQRLERDIEKLRADCGRLTQYINNNRSKKVVKKVQEIFKRKITHTRHENSNSKPEEFLDTLKQKLALKVHRLRRYKKAQQRKNDNILFNKNEKVFYRNLQKQTCNPTLENTELPTAIDLEEFWAKIWEEKSQHNDKADWITQEENRWQSIEEMDFVEITETDITGVTATLHNWKASGVDKIHNYWYKKFTSLHKCIAKNLTDIILGKQNIPEFIATGITYMLPKTSHSLEPSKYRPITCLPTIYKILTSSIARKINTHIEHNHIMAEEQKGCRRGHMGCKEQLIIDSTIHKHATTKNRNLHCTYIDYQKAFDSVPHSWLVHILHVYKINPKIINFMRNLMTYWKTSLQLSYRNNTITTREITIRKGIFQGDSFSPLWFCLALNPLSNLLHDCHVGYNFKSTTETTTISHLMYMDDIKLYSQTQKQMELLINITREFSKDINMEFGLDKCKTLHIIKGKVQPGDHEMGDNRTIRAMEPSDLYKYLGYNQLKGLKHTQIKQTLITEYKTRMNAICNTQLSGKNLIKAINTHAIPILTYSFGVIKWSNTDIENIERITRTTLTKHNYLHPKSAVERLTIKRYNGGRGLIDIHHLWEKQIDNLKSFFYNKSLTSNIHKAITLNDHNFTPLNLSEKVITECTVNRDPQIQKIEDWKKKTLHGRHPHDLQLMHIDPIASNKWLTLGSLFPETEGFIMAIQDQIINTKNYRRYIIKDSSIKNDKCRKCHIQPETIQHITGGCTTLTQTDYTYRHNQIVNIVHQKLAHKHNLIQKTDTPYYRYSPATILESAMHKLYYDRAILTDKTIHYNRPDITLQDKTNKITYLIDIAVPNTHNIHKTISEKINKYLDLKDEIARIWKQNKVYVVPIVLSTTGVIPKHLHHSLKLIDLKATLYITLQKAVILNTCRIVRKFLQIDADETDTHIT

SEQ ID NO: 20880 - protein, 810 aa, Eilema depressum
MWEDEVQHNEKAGWIAEELNKWSITEEMEFEEITESDITSITANLHNWKAPGVDKIHNFWYKKLTILHKHIAKNFTDIILEKQHIPEFIATGITYMLPKGKYSPLPSQYRPITCLPTLYKILTSTIARKINTHIEHNQIIAEEQKGCRRGHMGCKEQLIIDSTIHKHATTKNRNLHCTYIDYKKAFDSIPHSWLLQILEIYKVNSKITHFLRNIMPFWKTSLHLNYLDNKITTREISIRKGIYQGDSLSPLWFCLALNPLSHLLHSCRAGYSFKNSSTETKISHLIYMDDIKLYAKTDKEMKKLVDTTAAFSKDINMEFGLEKCKTLHIVKGKVRPGNYAVDDFNDITAMEPSDLYKYLGYKQLKGLDHGAIKDTLTKEYKNRINSICKTQLAGKNLVKAVNTYAIPILTYSFGIIKWSKTDIEKLERTTRTTFTKHNNLHPKSAIERLTIKRQNGGRGITDIHHLWQKQLHDLKKFFDMKSHSSDIHKAVTENDHNYTPLNLNEAPNTPNLDIVDPQALKIENWKKKTLHGRHPHDLEQPQIDPIASNKWLQIGNLFPETEGFIIAIQDQIINTKNYRKYIIKDPTATNDKCRKCHTQSETIQHITGACTTLTQTDYTHRHNQIVNIIHQSIAHKHNLIQNTNTPYYNYKPEIILENTSHKLYYDRAILTDRTIHYNRPDITLQDKINKTTYLIDIAVPNTHNLQKTITEKINKYSDLKEEVMRIWKQDKVYIVPIVVSTTGVIPTHLHHSIKLIDLKDNIYIPIQKAAILNTCRIVRKFLQIDDAENSHTLTQDTHDTHTPHLLGSGP

SEQ ID NO: 20881 - protein, 1304 aa, Eilema depressum
METRAKRKRIGPLPGGDRRGTPGADAGCLSMRTVSGEELNRRAPTDKDTTAETTDDGASLTDRTNTPAEPYSPSTISYTPSRISSPSIPSSVPSSPPSNIFYADPPNPVLSVAQEVNAFLPASTKAGKPRKRMRWSKDVNTFIMRTYYTITKVETDMTTYRKQLHELFSQKYPTIIVTEQRVSDQRRTIVKNKLLTVDELDRLKEEVRLQLQEPADDSIEINSLTPTQNQIEDYNQSRHHSQSQSQSQSHTQMSHISTQTEFITLTVENDIETLIEHNPVVEVHTQEILDKFRAAITLYSGMDPVVRPKLPKLKYSFKLFQLTNLFNQNILNQFLTDDTQLTDIHTLIYCTALVITEELNYKVIDRIGSIKSKHNNKPPWQVRLEKDIEKLRADCGRLTQYINNNRSNKVVKKVEEIFKKRTLHTKHENSNRKPEEFLDTLKQKLALKVHRLRRYTKAQERRNNNTLFANNEKAFYRNLSKPQRETDTATNIETPTQTELETFWAGIWEDEVQHNEKAGWITEELNKWSTTDEMEFEEISESDITSITAKLHNWKAPGVDKIHNFWYKKLTILHKHIAKNFTDIILEKQHIPEFIATGITYMLPKTKYSPLPSQYRPITCLPTIYKILTSAIARKINTHIEHNQIIAEEQKGCRRGHMGCKEQLIIDSTIHKHATTKNRNLHCTYIDYKKAFDSIPHSWLLEILQIYKINPKITHFLRNIMSFWKTSLQLNCSDKNITTREISIKKGIFQGDSLSPMWFCLALNPLSHLLHGCRAGYSFKNTTKETKISHLIYMDDIKLYAKTDNEMKKLVDTTVTFSKDINMEFGLEKCKTLHIIKGKIRPGNYAVDDTNDITAMDSTNFYKYLGYRQLKGLDHSAIKETLTKEYKNRINSICKTQLTGKNLIKAVNTYAIPIMTYSFGIVKWSKTDIEQIERTTRTTLTKHNNLHPKSAIERLTIKRQNGGRGLIDIQHLWQKQLHNLKIFFNMKSQSSEIHKTVTENDYNFTPLNLNETLNTQNRDIDDPQVLKIENWKKKTLHGRHPHDLEQPHIDSTASNKWLQIGNLFPETEGFIIAIQDQIINTKNYRKFIIKDPTATNDKCRKCHTQSETIQHITGACTTLTQTDYTHRHNQIVNIIHQSLAHKHNFIQNTNTPYYNYKPETILENTSHKLYYDRAILTDRTIHYNRPDITLQDKINKTTYLIDIAVPNTHNLQKTITEKINKYSDLKDEIIRIWKQDKVYIVPIVVSTTGVIPKHLHHSIKLIDLKDNIYIPIQKAAILNTCRIVRKFLQIEDTENTHPLTQDTQ

SEQ ID NO: 20882 - protein, 1304 aa, Eilema depressum
METRAKRKRIGPLPGGDRRGTPGADAGCLSMRTVSGEELNRRAPTDKDTTAETTDDGASLTDRTNTPAEPYSPSTISYTPSRISSPSIPSSVPSSPPSNIFYADPPNPVLSVAQEVNAFLPASTKAGKPRKRMRWSKDVNTFIMRTYYTITKVETDMTTYRKQLHELFSQKYPTIIVTEQRVSDQMRTIVKNKLLTVDELDRLKEEVRLQLQEPADDSIEINSLTPTQNQIEDYNQSRHHSQSQSQSQSHTQMSHISTQTEFITLTVENDIETLIEHNPVVEVHTQEILDKFRAAITLYSGMDPVVRPKLPKLKYSFKLFQLTNLFNQNILNQFLTDDTQLTDIHTLIYCTALVITEELNYKVIDRIGSIKSKHNNKPPWQVRLEKDIEKLRADCGRLTQYINNNRSNKVVKKVEEIFKKRTLHTKHENSNRKPEEFLDTLKQKLALKVHRLRRYTKAQERRNNNTLFANNEKAFYRNLSKPQRETDTATNIETPTQTELETFWAGIWEDEVQHNEKAGWITEELNKWSTTDEMEFEEISESDITSITAKLHNWKAPGVDKIHNFWYKKLTILHKHIAKNFTDIILEKQHIPEFIATGITYMLPKTKYSPLPSQYRPITCLPTIYKILTSAIARKINTHIEHNQIIAEEQKGCRRGHMGCKEQLIIDSTIHKHATTKNRNLHCTYIDYKKAFDSIPHSWLLEILQIYKINPKITHFLRNIMSFWKTSLQLNCSDKNITTREISIKKGIFQGDSLSPMWFCLALNPLSHLLHGCRAGYSFKNTTKETKISHLIYMDDIKLYAKTDNEMKKLVDTTVTFSKDINMEFGLEKCKTLHIIKGKIRPGNYAVDDTNDITAMDSTNFYKYLGYRQLKGLDHSAIKETLTKEYKNRINSICKTQLTGKNLIKAVNTYAIPIMTYSFGIVKWSKTDIEQIERTTRTTLTKHNNLHPKSAIERLTIKRQNGGRGLIDIQHLWQKQLHNLKIFFNMKSQSSEIHKTVTENDYNFTPLNLNETLNTQNRDIDDPQVLKIENWKKKTLHGRHPHDLEQPHIDSTASNKWLQIGNLFPETEGFIIAIQDQIINTKNYRKFIIKDPTATNDKCRKCHTQSETIQHITGACTTLTQTDYTHRHNQIVNIIHQSLAHKHNLIQNTNTPYYNYKPETILENTSHKLYYDRAILTDRTIHYNRPDITLQDKINKTTYLIDIAVPNTHNLQKTITEKINKYSDLKDEIIRIWKQDKVYIVPIVVSTTGVIPKHLHHSIKLIDLKDNIYIPIQKAAILNTCRIVRKFLQIEDTENTHPLTQDTQ

SEQ ID NO: 20883 - protein, 1171 aa, Hesperia comma
MSWSKEANIFIMRTYYHITKLETDMTTYRKQLHQLFSQQYPNVKVTEQRVSDQRRTIIRNKLLPLNVINQIKEEVRISLQENTNYTDASLNSNNNLEDDLNCTEPPINHIPSSLQVVSQEHTQTSHSSTQTENITLTLVNDIDILIESRTPNEGEINALHNKLRTTLIKYSGMDPTIRPKLPKLKYSYQLFHLIHLFNQKIANQFISNDSHITDIHTLIYCIAVVIAEELKYKITENTDEARPKIHSKPPWQIRLQKDIDKLRTDIGRLTQYINNNRSNKVVKKVEEIFKRRMIHTRHENHNHKPEEYLDTLKQKLTLKANRLKRYNKAQQRKNDNSLFTSNEKVFYRKLQNHSPTSKNIEIPTKVQLETFWSGIWENHTQHNEKAEWIKQEENRWSMIEEMKFEEITESDITNIINKLHSWKAPGIDKIHNFWYKKLTSLHKCLAKNLTDVIFDKQVMPEFITTGITYMLPKSTHSSDPSQYRPITCLPTLYKILTSVIATKINVHIEHNNIIAEEQKGCRRGHMGCKEQLIIDSTIHKHATTKNRNLHCTYIDYKKAFDSIPHSWLLQILRVYKINTKIITFLRNTIPNWKTSLQLNSHHQTITTRTIFIKKGIYQGDSLSPLWFCLALNPLSHLLHQCRAGYSLKHTTEETVISHLMYMDDIKLYSKTHKEMEVLVEKTTKFSKDINMEFGLDKCRTLHIIRGKIQPGDYTIDDSNTIKAMEVSDMYKYLGYKQLRGLDHTNIKHTLTTEYKRRVNSICNTQLSGRNLIKGLNTYAIPILTYSFGIIKWSKSDIEQIERTTRTTLTKHNYLHPKSAIERLTIKRHHGGRGLTDIHQLWLKQINSLKYFFHSKSLVSNIHQAISKNDLNYTPLNLNEYENSFNPNSRDSQTHKIENWKKKTLHRRHPHDLEQTHIDSIASNKWLQVGNIFPETEGFIIAIQDQIINTKNYRKFIIKDTSISSDKCRRCHTQPETIQHITGACTTLTQTDYTHRHNQIVNIIHQKLAIKHKLMQDTKTPYYKYTPVTVLENSSYKLYYDRAILTDKTIYCNRPDITLQDKINKITYLIDIAVPNTHNIQKTISEKISKYTELKEEVTRIWKQKKVYIVPIVLSTTGVIPKHLHHSLKQIDLKENIYIALQKAAILNTCRIVRKFLQVDENEHQHQYTPEN

SEQ ID NO: 20884 - protein, 1252 aa, Ochlodes sylvanus
MARPVRLIFFLYVPTGPRRVLIIIIIIHSPSTASYIPSPVSSVDENTRRAPTPTLTVAQGANAFLPASTKAGKPRVRMSWSKEANMFIMRTYYYITKLETDMTTYRKQLHELFLRQYPDIQVTEQRISDQRRTILRNKLLPLNIINQIKEEVRKNLQENQDDTDTTLNFYNNLESQSNFTTPSIHHISSSPQILSQQHTQTLHSSTQTESETLTIVNDIDILVDNNTFKEAQINSLSTKLRTALIKYSGMDPAARPKLPKLKYSYELSNLINIFNQKITHQFVANDLQTSDIHTLIYCIAVVIAEELEYKVTVKTNNNFAQKKSSNKPPWQIRLERDVEILRKDIARLTQYINNNRSNRVVKRVEEIFKRRIIHTRHENYNNKPEEFLDTLKQKLTLKANRLKRYKKAQQRKNDNILFTTNEKLFYRKLLEPKSCTTTTENIELPTETQLETYWSGIWEKRILHNEKADWITQEENRWNTIEEMKFEAITETDITTITTKLHNWKTPGIDSIHNFWYKKLTSLHKCLARNLTDIVLGKQAAPEFITIGTTYMLPKTTHSSDPSQYRPITCLPTIYKILTAAIARKINTHIEHYGIIAEEQKGCRKGHMGCKEQLVIDSTIHKHAATKNRNLHCTYIDYKKAFDSIPHSWLLQILQIYKINSNIINFMHNIIPRWKTSLQLNSHNQTITTRTISIKKGIYQGDSLSPLWFCLALNPLSYLLNQCHAGYSLSHITEKTVISHLIYMDDIKLYSKTQKEMKILIEKTTEFSKDINMEFGLDKCKTLHIIRGKIQPGNYAIDDSTSIKAMEATDMYKYLGYKQLKGLDHTQIKHTLTTEYKRRINAICNTRLGGRSLIKALNTYAIPILTYSFGIIKWSKTDIDQIERISRTTLTKHNYLHPKSAIERLTIKRQCGGRGLIDIHHLWKKQIYNLKHFFYTKSLVSNIHKAILKNDFNYTPLNLNEYQNTANLDNRDPQIPKTENWKKKTLHGRHPHDLEQTHIDLIASNKWLQVGNIFPETEGFIIAIQDQIINTKNYRKFIIKDPSIKSDKCRRCHTQSETIQHITGACTTLTQTDYTHRHNQIVNIIHQKLAIKHNLIQNTNTPYYKYTPSTVLENASHKLYYDRAILTDKTIYCNRPDITLKDKLNKTTYLIDIAVPNTHNIQKTISEKISKYTELKEEVTRIWKQEKVYIVPIVLSTTGVIPKHLHHSLKQIDLRENIYITLQKAAILNTCRIVRKFLQIDENEHHHTTPEN

SEQ ID NO: 20885 - protein, 1308 aa, Hypena proboscidalis
MEKMLLRSKRLGPLSGGDRRSTPGADAGCYSIRSVSGEELNRRVPSGSLENTTANHNDRQTDLDNISLSSTQSITIVEPYSPSTVSYVPTPVSSIEENSRGTPTPTLTVAQGVNTFLPASTKAGKPRVRMRWSEEVNMFIMRTFLYITKLETDMTTYRQQLHELFSRQYPEINVSEQRISDQRRTIVRNKLLSQELLNRIKEEVSKQLEEEADNSNQDDHINLSNRILGQNQLSSQSNNPPLTLHQLGTQTQEQSYTQVSHSSTQTETEILTLENDIENLTNQNLVSDLYVQEMQDKFRTAITQYSGMNPASRPKLPKLKYSRKLLQLTQLFNQNILSRFLTNDTPLIDLHTLIYCTALVISEELGFKITEHIHAARSRTEKPPWQIRLEKDIEKIRADCGRLTQYINNNRSAKVVKRVEAIFKTRNIHTRHENDNRKPEEFLDTLKQKLALKVYRLKRYKKSQKRKDDNILFKSNEKMFYRTLLTPQSNTHILQNIEIPTKTQLETFWAGIWEEQIEHNDKAEWITVEEEKWNTIDEMEFDEITETDITNITTRLHNWKSPGIDKIHNFWYKKLTSSHKALAKSLTDIILGKHTIPEFLATGITYMLPKIAHSPQPSQYRPITCLPTIYKILTSALTRKITIHIEHNNILAEEQKGCRRGHMGCKEQLVIDSTIHKQATTKNRNLHCTYIDYRKAFDSIPHSWLLKTLQIYKINPKIRDFMHNIMSYWKTSLQLNSNNNTVTTRQIAIRKGIYQGDSLSPLWFCLALNPLSHMLHRCRVGYSLKNNSEESLISHLIYMDDIKLYAKADKDMKKLVDTTSKFSTDINMQFGLDKCKTLHIVRGKIRPGSYAVDENNAITAMESTDLYKYLGYKQLKGLDHTEIKNTLTTEYKRRVNAICKSQLSGKSLIKAINTFAIPILTYSFGVIKWSKTDIEQLERTTRTTLTKHNHLHPKSATERLTIKRPNGGRGLIDIHHLWQKQIRNIKTFFHSKSQTSNIHKAICQNDSNYTPLNLNQHQNTQNPNSTDPQTQKIETWKKKTLHGRHPHDLEHAHIDKTASNQWLKSGNLFPETEGFMIAIQDQIINTKNYRKYIIKDSSVTNDKCRKCNTQPETIQHITGACITLTQTDYTHRHNQIANIIHQKLAHKYNLIHNTNTPYYKYTPQTILENASHKLYFDRAILTDRTIHYNRPDITLVDKLNKTTYLIDIAVPNTHNLQKTIVEKISKYAELKEEVTRIWIQDKVYVVPIVLSTTGVIPKHLHHSLKMLDLKEHIYIMLQKAAILNTCRIVRKFLQIDENEVTTQHIVGP

SEQ ID NO: 20886 - protein, 888 aa, Heliconius charithonia
MKIFRNTTLHTKHENDNKKVEEFLDTLKQKLALKSHRLKRYMKAQKRKDDNILFTTKEKSFYRQLLRPNHLCQDSNNESIPTEKQLVTYWSNIWEHESKHNENAEWILEEINKYKTIDEMSFTEITEAEIFKITAKLHNWKSPGVDKIHNFWYKKLTIFHKAIAKSLTDIIFKKQNIPNFMATGITYMIPKDKFSPDPAQYRPITCLPAIYKILTSVLTSKITTHIEKYKIVAEEQKGCRRGHMGCKEQLIIDSTIHKHATAKNRNLHCTYIDYKKAFDSIPHSWLVKILKIYKINPTVVEFLNSIMSQWKTTLQLNHNNHTVKTRHIFIKKGIYQGDSLSPLWFCLALNPLSTILKNSQVGYHFNSRIQNSLISHLIYMDDLKLYAKTNKDMKKLIDITAEFSDDIQMQFGLDKCKTLHINKGKVQPGNYSINENNIITALESHDIYKYLGYNQLKGLDHTNAKQILTAEYKKRIHAICKTQLSGKNLIKAINTYAIPILTYSFGVVKWTKTDIEHLERLIRTILTKHNYLHPKSAIERLTIKRTYGGRGIININTLWQNQLKTLQNFFINKSNSSIIHKIIKDNDHNYTPLNLEQIVNVESSPSTDPQKQQIDNWKRKVLHGRHPHDLEQAHIDLIGSNMWLKVGSLFPETEGFIIAIQDQIINTKNYRKYIIKDTKITNDKCRRCHSQPETIQHITGACSNLTQSDYTHRHNQISNIIHQQLAHKYKLITDIDTPYYKYTPETILENSTHKLYYDRAVLTDKTIHFNRPDIILQDKADKITYLIDIAVPNTHNLQKTITEKINKYEELKGEITRIWKQKAVYIVPIVLSTTGVIPKHLHHSIKMLNLKNTIYITLQRASILNTCRLVRKFLQIDEDQNTNMPQVQ

SEQ ID NO: 20887 - protein, 1313 aa, Mythimna ferrago
METRSKSKRIGPLPGGDRRGAPGADAGCHSMRTVSGEELSRRAPTDKDTTAEIIDDGDRLTGRTNTPIEPYSPSTVSYSPSRHSLPSILSSPSIPSSPPIISLNTVPLTPTLNVAREASSFLPASTKAGKARVRMRWSKEVNLFIMRTYLYITKLETDMTTYRKQLHELFSLQYPEVTVSEQRISDQRRTIVRNKLLSLVEIDKLKEEVRSQLQAESEGVGDATSFSLTQGATYLQQEQSTLITQSQPFYQSQAHSQTTHTSTQTENLIITLENEIETLTDSNQNSPTDAFVQDIHDKFKTALTQYSGIDPAVRPKLPKLRYSPKLFQLVHLFNTNILNQYISEDIQLIDVNTLIYCTALVISEELNFKITEYTRNTNNRKFNKPAWQQRLENDIEKLRADCSRITQYINNNRSNKVVRRVEVIFKNMATHTRHEADNRKPEEFLDSLKQKLALKVHRLRRYKKAQERKNDNSRFATNEKIFYRNLQKSQTNIDTPAENNVELPTAEELEIFWSGIWEEQVQHNEKSDWVTDEQTKWSSLEEMEFVELTESDITSITMRLHNWKSPGIDKIHNYWYKKLESLHKVLAKNLTEIILEKQNIPEFIATGITYMLPKTQYSPQPSQYRPITCLPTMYKILTSAIAAKINKHIEHYNIIAEEQKGCRKGHMGCKEQLVIDSTIHKHAATKNRNLHCTYVDYKKAFDSIPHSWLIQILQIYKINSKLIDFLKNVMLQWKTTLHLNFRDNHIATRLIYIKKGIYQGDSLSPLWFCLALNPLSHLLHRCQAGYSLKHTTEETIISHLIYMDDIKLYAKSEREMKQLIDTTTKFSKDINMQFGLHKCKTVHIIRGKIKPGDYPINSTDTITAMDATDLYKYLGYKQLKGIDHTSIKHTLNTEYKRRVVAVCKTQLSGKHLIKALNTYAIPILTYSFGVIKWSKTDIQHIERTTRATLTKHNNLHPKSAVERLTIKRQNGGRGLIDIHHLWQKQITRLRTFFHTKSHTSNIHKAIVINDNNYTPLNLNDQIETPHTGIDDPQKQKLENWKKKVLHGRHPHDLEQPHIDTMASNKWLKIGTLFPETEGFIIAIQDQVINTKNYRKYIIKDPTMTNDKCRKCQSQPETIQHITGACTSLTQTDYTYRHNQVANIIHQNLALKYKLIQDSNTPYYKYAPQTVLENTTHKLYYDRAILTDRTIHYNRPDITLQDKINKITYLIDIAVPNTHNLQKAIGEKISKYAELKEEVTRIWRQEKVYVVPIVVSTTGVIPHHLHYSLRVINLKDSTYITLQKAAILNTCRIVRKFMQIGENEISPHNTHFPL

SEQ ID NO: 20888 - protein, 769 aa, Apodemia zela
MRWNTIKEMEFIEITEVEIEKFTARLHNWKSPGIDKIHNFWYKKLTCLHKLLAQNLTDIILGNQSIPEFIATGLTYMLPKGKYSPQPSQYRPITCLPTIYKILTSIISYKINSHIENHHILAEEQKGCRQGHMGCKEQLVIDATIHKHATSRNRNLHCTYIDFKKAFDSIPHSWLLQILQIYKVNQKLVNFLQNIMTYWKTTLHLQNHNNSVTTKKIAIKKGIFQGDSMSPLWFCLALNPLSYQLHNTRAGYQFKVSNKETIISHLIYMDDIKLYSKTDRQMQHLINTTVNFSKDINMEFGMDKCKTVHIQKGKIQPGDYEVDNTGIISALDSTDLYKYLGYKQLKGLDHTNIKQSLNVEFKRRLNILCNTKLSGKNLIKALNTFAIPILTYSFGIIKWSKTDIEQIERVTRTTLTKHNHLHPKSAVERLTLKRNEGGRGLIDIKHLWQKQIYSLASFFHSKAKCSDLHKAVIENDCNYTPLNLRQPIILEDPNFDHPNKRKIEQWKMKVLHGRHPHDLEQAHIDLKASNNWLKVGNLFPETEGFMMAIQDQVINTKNYRKFIIKDPTLINDKCRKCQTHSETIQHITGACTSLTQTDYTHRHNQIANIVHQKLAFNSSLIQNINTPYYKYTPQSILENKLYKLYYDRAILTDKTIHYNRPDIVFQDKSNKVTYLIDIAVPNTHNLQKTIAEKINKYIELKEEVTRIWQQEKVYIVPIVLSTTGVIPNHLHQSLKLLQLSKSLYITLQKAAILNTCRIVRKFMQISIPH

SEQ ID NO: 20889 - protein, 1032 aa, Lycaena phlaeas
MEILVEQNPLTEGLIQDIYDKLKIALTQYSSMDPSSRPKLPKLKYNPCLSNLINIFNQNILHRFISEDTQLIDLHTLIYCTAFVISTELNYKITDYAGNSQAKYKNKPPWQMRLEKDIERLRADCGRLTQYIKNNRSNKVVKRVEAIFKSSLIHTRHEKNNRTPEEFLDTLKQKLALKVHRLRRYKKAQQRKNDNKIFGTNEKLFYRNLQKTQSDSTTDTNIQLPTKEQLETFWSGIWEEQVYHNEKADWIEKEEARYHTLEEMEFVEITETDITNITSRLHNWKSPGSDKIHNYWYKKLISLHKTLARNLTDIILGKQNIPEFIATGITYMLPKTTYLPEPSQYRPITCLPTIYKILTSAIATKINSHIEQHNIIAEEQKGCRRGHMGCKEQLVIDSTIHKHATSKNRNLHCTYIDYRKAFDSIPHSWLLKVLQIYKINPKIINFLRTVMANWKTTLQLNNCQSTIITRQISIKKGIYQGDSLSPLWFCLALNPLSNLLNNCKVGYTLKHSAAETIISHLIYMDDIKLYSKTEKEMKKLIDTTTEFSKDINMQFGLDKCKTLHIIRGKIKPGDYAVGNNDKITAMEPTDLYKYLGYKQLKGLDHTTTKQTLTTEYKRRINAVCKTQLYAKNLIKALNTFAIPILTYSFGIVKWSKTDIERIERSTRTTLTKYNNLHPKSAIERLTIKRQNGGRGLIDIQHLWQKQINNLKTFFQLKSHTSDIHKAIVQNDQNYTPLNLKVNMNSENLNANDPQKQKLEDWKKKVLHGRHPHDLEESHIDTIASNKWLKMGSLFPETEGFIIAIQDQVINTKNYRKYIIKDPTVTNDKCRKCHMQPETIQHITGACTTLTQTDYTHRHNQVANIIHQKLALKHKIIQNTNTPYYKYTPQTILENTSHKLYYDRAILTDRTIHYNRPDITLMDKTNKITYLIDIAVPNTHNLQKTITEKINKYSELKDEITQIWKQEKVYVVPIVISTTGVIPKHLKHSLQLLDLKESIYITLQKAVILNTCRIVRKFMQIEENEITQHHTPS

SEQ ID NO: 20890 - protein, 1304 aa, Lycaena phlaeas
METRSKRKRLGPLPGGDRRGAPGADAGCLSMRTVSGEELNRRAPTEQDATAGINDNIDRLTDRTISPVERHSPNTELYTPSVCPLPTSSSTNSLNSDSPIPASDVARGLSAFLPASTKAGKPRVRMRWSKDVNTFIMRTYFYITKLETDFTTYRQQMHEQFSNHYPEITVTQQRISDQRRTIIKNKLLSAEEIELIKTEVRIQLQSEENNNQDASIILYTQNQSAHSQLILSQPCVQSQVNTQSQTIINSQLNINNTQTLHSSIETESRENDMEILVEQNPLTEGLIQDIYDKLKIALTQYSSMDPSSRPKLPKLKYNPCLSNLINIFNQNILHRFISEDTQLIDLHTLIYCTAFVISTELNYKITDYAENSQAKYKNKPPWQMRLEKDIERLRADCGRLTQYIKNNRSNKVVKRVEAIFKSSVIHTRHEKNNRTPEEFLDTLKQKLALKVHRLRRYKKAQQRKNDNKIFGTNEKLFYRNLQKTQSDSTTDTNIQLPTKEQLETFWSGIWEEQVYHNEKADWIEKEEARYHTLEEMEFVEITETDITNITSRLHNWKSPGSDKIHNYWYKKLISLHKTLARNLTDIILGKQNIPEFIATGITYMLPKTTYLPEPSQYRPITCLPTIYKILTSAIATKINSHIEQHNIIAEEQKGCRRGHMGCKEQLVIDSTIHKHATSKNRNLHCTYIDYRKAFDSIPHSWLLKVLQIYKINPKIINFLRTVMANWKTTLQLNNCQSTIITRQISIKKGIYQGDSLSPLWFCLALNPLSNLLNNCKVGYTLKHSAAETIISHLIYMDDIKLYSKTEKEMKKLIDTTTEFSKDINMQFGLDKCKTLHIIRGKIKPGDYAVGNNDKITAMEPTDLYKYLGYKQLKGLDHTTTKQTLTTEYKRRINAVCKTQLYAKNLIKALNTFAIPILTYSFGIVKWSKTDIERIERSTRTTLTKYNNLHPKSAIERLTIKRQNGGRGLIDIQHLWQKQINNLKTFFQLKSHTSDIHKAIVQNDQNYTPLNLKVNMNSENLNANDPQKQKLEDWKKKVLHGRHPHDLEESHIDTIASNKWLKMGSLFPETEGFIIAIQDQVINTKNYRKYIIKDPTVTNDKCRKCHMQPETIQHITGACTTLTQTDYTHRHNQVANIIHQKLALKHKIIQNTNTPYYKYTPQTILENTSHKLYYDRAILTDRTIHYNRPDITLMDKTNKITYLIDIAVPNTHNLQKTITEKINKYSELKDEITQIWKQEKVYVVPIVISTTGVIPKHLKHSLQLLDLKESIYITLQKAVILNTCRIVRKFMQIEENEITQHHTPS

SEQ ID NO: 20891 - protein, 1228 aa, Pholisora mejicanus
MLYSLIIIIIILDVAQVANAFLPASTKAGKPRVRMSWSKEINLFIMRTYYYITKLETDLTTYRKQLHEHFSRQYPEIKVSEQRIADQRRTIVKNKRLNEETLNQLKEEVKLQLEKDKQNTTHIPNYTHQNSLTDHQNMQIQNHSVYPEHSQSQLTTQNVESLNILTQNTQSLDIATQTESNTITLENNIETISEYDPKRDINSHKIYASFRTALAQFSSMDPVVRPKLPKLRYSTQLFQLIYVFNHNIINQFLSEKTQLTDIHTIIYCTAFVISQELDNKVTDYTQNKLPKTRKKPPWQIRIEKDIEKLRADCARVTQYVNGNRSSKIIKHVEIIFKNKVTHTKHEKLNRKPEEFLDTLKQKLALKVSRLRRYKKALQRKTDNNMFTTNEKIFYRNLQKPQTDTTKNSLELPTEKQLETFWSGIWEEKVQHNGNAEWIREEENKWNRIEEMEFITITESDIANITYKLHNWKSPGADKIHNFWYKKLVSLHKSIAKNLTDIILGKVKVPEFISTGITYMLPKSKYSPQPSQYRPITCLPTIYKILTSVITLKINKHIEQHNIIAEEQKGCRRGHMGCKEQLIIDSTIHKHATSKNRNLHCTYIDYKKAFDSIPHSWLIQILQIYKINPNIINFLRNIMTQWKTTLHLVTPQKSITTRQIFIKKGIFQGDSLSPLWFCLALNPLSDLLKRCQVGYCLKRDTTDIIISHLIYMDDIKLYAKSERDIKKLLDTTTQFSKDINMEFGLEKCKLLHIKRGKVGPGDYTINNTDVITAMEPTDVYKYLGYKQLKGLDHTAIKDTLTTEYTKRINALCRTQLSGKHLIKSLNTYAIPILTYSFGIVKWTKTDIERLERTTRTTLTKHNYLHPKSAIERLTLKRQDGGRGLIDINQLWQKQICGLKSFFLAKSQTSNLHKVVVFNDNNYTPLNLKEETNKSHTQNTNNTNSNNPQQQKIEVWKKKTLHGRHRHDLDQLHVDAIASNKWLQIGNLYPETEGFMIAIQDQIINTKNYRKYIIKDPAITSDKCRKCHTQPETIQHITGACTTLTQTDYTHRHNQVTNIIHQKLSLKHKLIQNTKTPYYQYTPQTVLENKTHKIYYDRAILSDKTIHNNRPDITLIDKTNKQTYIIDIAVPNTHNIQKTITDKIHKYTQLKEEIIRIWKMNKVYIVPLVLSSTGVIPKHLHHYLKLIGLPTNTYITMQKAAILNTCRIVRKFLQEDSELEQTSPNELHLV

SEQ ID NO: 20892 - protein, 1302 aa, Apodemia arnacis
METRNKKKRIGPLPGGDRRGTSGADAGCDSIRTVSGDEYRQAHSGSPEDATASLTENRQTDIDSISLKSFSSLVEPFSPSTASYVPTPVSVVDEHSRGTPSASPTLAVARVANAFLPASTKAGKPRMRMKWSQDVNLFIMRTYYYITKLETDMTIYRKKLHEHFSLQYPDVNVSEQRVSDQKRAIERNKLLSTTTLEKLKEEVKKQLQEETRNNDNEHTKLQTSEQLTHLYTQTQSLAHTHQITLSPYTSMANTQISHSSTQTEAVTILIENDIDTLINTHLVNDTYIQEVIGKLRSTLTLYSGMDPMVRPKLPKLKYSQKLFELIDLFNQNILNEFISPDTQLKDIHTLTYCTALVISEELNYKVTDNLGAIRGKNEYKPAWQHRLEKDIEKLRVDIGKLTQYINNNRSTKVVKRVEIIFRNTIIHTRHENNNRKPEEYLDTLKQKLALKVHRLKRYKKSEQRKKDNNTFATNEKLFYRNLEKQETVTPENNTQIPTKQQIEEYWAGIWEDQTPHKESAGWITEEEKRWNAIEEMEFEQISEDEIRNITAKLHNWKSPGLDKVHNFWFKKLITLHSPLAKNFFEIVQGQQNIPEFIATGITYMLPKSNNPTQPSQYRPITCLPTIYKLLTSLIAKRINTHIEQNNMLAEEQKGCRRGHMGCKEQLIIDSTIVKHATSNHRNLHCTYIDYKKAFDSIPHSWLIKILEIYKINPKIVNCLRNIMTLWKTTLHLHNRNTDIITREIAIKKGIYQGDSLSPLWFCLALNPLSYQLHNNRAGYPLKHSNNEKVISHLIYMDDIKLYAKNDKEMKQLIKTTTDFSTDINMQFGLDKCKAVHIIKGKIRPGDYAIDDSNITAMEPNEVYKYLGFQQLKGLDHINIKQSLTLEYKRRINAICKSQLSAKHLIKAINTYAIPILTYSFGIIKWTKTDLEQTERITRTLLTKHNNLHPKSAIERLTIRRQDGGRGLIDVQHLWHKQVYSLKSFFHVKSQTSNLHKAIVQNDRNYTPLNLEQGLSQENPRNTDPQEKKLEDWKKKVLHGRHPHDLNQPHIDTKASNMWLKTGSLFPETEGFIIAIQDQVINTKNYRKFIIKDPTVTNDKCRKCQSQAETIQHITGACVNLTQTDYTHRHNQIANIIHQKLAHKHKLIQDTNTPYYKYTPQTVLENTTHKLYYDRAILTDRTIHFNRPDITLQDKINKTAYLIDIAVPNTHNLQKTIAEKINKYTELKEEVIRIWKQEKVYIVPIVISTTGVVPNNIRNSLNLIDLKPNILTIIQKAAILNTCRIVRKFMQLEETDRTLPHTL

SEQ ID NO: 20893 - protein, 1292 aa, Apotomis turbidana
MEMKLRSKRLGPPPGGDRRGTPGADAGCLSMRTVSGEELIRRAPSGSSENATANLTDDRLTDHDDISLYSAVEPYSPSTASYIPSPVSSVGASSRRTPTPDLDVAQEANAFLPASTKAGKPRVRMSWSKEVNLFIMRTYYYITKLETDMTTYRKQLHELFTRQYPTVKVTEQRVSDQRRAIIRNKLLTDQELSRLKDEVETQLNDIDLVDNSNITHSIPPHSRAQSQDDTEHHSQNTYTPYTQSHMSHTSSQTETITLTLENDIEALVDPETITEPNTQQIIDKFHAAITKYSGMDPGSRPKLPKLKYSNKLSQLVYLFDRDVLNRFISDDTQLIDIHTLIYCTAVVISEELNYTITEQTTHGRKKYIKKPPWQIRLERDIEKLRADCGRLTQYIHNNRSRKVVKRVEEIFRNRITHTRHEADNRKPEEYLDTLKQKLALKVHRLRRYMKAQKRKDDNILFTTNEKGFYRNLHTNKRHTQTHTDTAIPTQAQLESFWSSIWEEQTQHNDQADWIETERSKWDTIEEMKFDDITETDITNITAKLHNWKSPGIDKIHNYWYKKLTSLHTYIAKNLTEIILGKQNIPEFIATGITYMLPKTTHTSHPSQYRPITCLPTIYKILTSAITRKINSHIEHNQIISEEQKGCRRGHMGCKEQLIIDSTIHKHATAKNRNLHCTYIDYKKAFDSIPHSWLLQILEIYKIGPKITHFLRNIMSQWKTTLQLTAGNDTVTTRTISIKKGIYQGDSLSPMWFCLALNPLSHLLNNSRVEYNFRNTPTDTCISHLIYMDDIKLYAKTDKDMKKLVDITTTFSNDINMKFGIDKCKTLHIIKGKIRPGNYTVDDDNTITAMEANDLYKYLGYKQLKGLDHTITKQTLTTEYKNRLSKICKTQLPGKNLIKAINTYAIPILTYSFGIIKWSKTDIETIERTTRTTLTKHNHLHPKSAIERLTIKRHKGGRGMINISHLWQKQIQSLHTFFHTKSHTSNIHNAIVQNDLNYTPLNLKKQPERQNLDNDPQIQQINNWKKKVLHGRHPHDLEQTHIDTTASNTWLKTGSLFPETEGFIIAIQDQIINTKNYRKHIIKDTILTNDKCRRCHIQSETIQHVTGACTTLTQTDYTHRHNQIANIIHQNLATKHNLIKDKHTPYYKYTPQIVLENTTHKLYYDRAILTDRTIHYNRPDITLTDKINKTTYLIDISVPNTHNIQKTITEKITKYAELKDEVVRIWRQEKVYVVPIVLSTTGVIPKHLHHSLKLLDLKSHIYTILQKAAILNTCRIVRKFMQLDPENNATQAI

SEQ ID NO: 20894 - protein, 823 aa, Bombyx mori
MKPKTDRDNSNIDIPTAEQLEMYWARLWENSAKPNDKANWITEEKERWDTIEEMQFDDVTEEEITTITARLHNWKSPGIDKIHNFWFKKLICLHKTIAKNLTDIISRNQSIPEFIATGITYMIPKGDFSIEASQYRPITCLPTIYKILTTVITKKINSHIEHNNILAEEQKGCRRGHMGCKEQLIIDSTIMKHATTKNRNLHCTYIDYKKAFDSIPHSWLIQVLEIYKINPIIISFLRNIMTHWQTTLKLKNPHNFVTTRQIAIKKGIYQGDSLSPLWFCLALNPLSHQLHNDRAGYRIKQQDNTETIISHLIYMDDIKLYAKNDKEMKKLIDTTTIFSNDISMQFGLDKCKTVHIIKGKVQPGDYTIDDTNTITAMEPSDLYKYLGFQQLKGLDHITIKQSLTSEYKKRINAICKTKLSGKHLIKALNTYAIPILTYSFGIIKWSKTDIEQIERITRTTLTKHNNLHPKSAIERLTIKRQDGGRGLIDIWHLWRKQIHSLKTFFYIKSDLSEIHRAIAQNDNNYTPLNLKQKELIDNTENLRNRNPQKDMEENWKKKALHGRHPHDLSQSHIDSKASNMWLKTGSLFPETEGFLIAIQDQVINTKNYRKYIIKDPTIRDDKCRKCNTQPETIQHITGACSTLTQTDYTHRHNQLANIIHQQLALKHKLIQNTNTPYYNYKPQTVLENDSCKLYYDRAILTDRTIHYNRPDVTLQDKNNKVTYIIDIAVPNTHNIQKTFTEKMTKYTELKEEIVRVWKQKKAYIVPIIISTTGVVPNHIHNSLKLLDLKDNIFISLQKAAILNTCRIVRKFMQLEENQTYYTQ

SEQ ID NO: 20895 - protein, 1285 aa, Nastra julia
METRSKSKRLGPLPGGDRRGTPGADAGCFSMRTVSGEELNRRAPSGSPENTTANQTDDNRSLKSPNSIVEPFSPSTASYIPSPVSSLDEMSRGAPTPVISVALEGKTLLPASTKAGKPRVRMSWSKEVNIFIMRTYYYITKLETDMTIYRKQLHELFSQQYSEVKVTEQRIADQRRAIIRNKLLSQEIIDRIKEEVRVRLEESTDKIDNSIGVYNGNSSDQLISYMQSYTNPTSQISHIATQTDTEIVTVESDIDIFIDRGPPVVTDSEEILNKFKSALTNFSGMDPTLRPKLPKLKYSNKLTKLIDLFNEHILVQFFTDDTKLVDIHTILYCTAVVIVEELGYKLNERKDYSATKYNNKPPWQIRLERDIEKLRADCGRLTQYIKNNRSKKVVKRVEEIFRNRIKHTRHESSNKKPEEFLDTLKQKLALKVHRLRRYKKAQQRKKDNMIFATNEKQFYRNLQIKNTDIPSTNKLDIPTKTQLELFWSGIWEEEIQHNERAEWIKEEEQRWKAIKEMEFDGITEVDIANITVKLHNWKSPGIDKIHNYWFKKLTSAHKCIAKNLTDIMVGRQDIPTFLATGLTYMIPKTTHIAEPSQYRPITCLPTIYKILTSVIATKINGHIQQNNILAEEQKGCRRNHMGCKEQLIIDSVIHKHASTKNRNLHCTYIDYKKAYDSIPHSWLLKVLQIYKVNPIISNFMRNIMCHWKTSLQLNTTNSTVTTRQIYIKRGIYQGDSLSPLWFCLALNPLSQLLQRCKVGYCLKHLREETLISHLIYMDDIKLYSKTHNEMKQLVDTTVEFSKDIRMEFGIDKCKTLHIVKGKIKPGDYTIDDNCAITALESTDMYKYLGYRQLQGLDHTTLKETLTVEYKRRINTVCNTQLSGRQTIKALNTYAIPILTYSFGVVKWSKTDIEQIERTTRTILTKHNYLHPKSAVERLTIRRHRGGRGLIDIHHLWKKQIYHLKTFFHTKSRTSHIHKAISHNDHNFTPLNLNDHTNTEDPREVDPQDQKIESWKKKSLHGRHAYDLEQTHIDSTASNKWLKVGNLFAETEGFLIAIQDQIINTKNYKKFIIKDPLVKNDKCRKCHTQSETIQHITGACTTLTQTDYTHRHNQITNIIHQQLALKHNLIHTTNTPYYRYIPATVLENTKCKLYYDRAILTDKTIHYNRPDIILQDKVNKTTYLIDVAVPNTHNISKTIAEKISKYLELKEEVSRIWKQDKVYVVPIVLSTTGAIPKHLHHSLKQIGLKDILYVTLQKAAILNTCRKVRKFLQIEENNLRSHHDTT

SEQ ID NO: 20896 - protein, 1221 aa, Ochlodes sylvanus
METRSKRKRLGPLPGGYRRGTPGADAGCFSMRTVSGEELNRRAPSGSPENTTANQPDDNSRLNSPISVSEPYSPSTASYIPTPVSSMDEMSRGAPSPVLSVAQEVNTFLPASTKAGKPRVRMRWSKDVNMFIMRTYYYITKLETDMTIYRQQLHELFSQQYPEIKVTEQRISDQRRTIIRNKLLSQEIIDQIKQEVRVKLQENIDNNIDVDDQHQSNQLESFSQVYTYPIAQTLQRPFTQISHTSTQTESETLVLENDIEVLVDSNPLTDIYVEEIRTKLKSALINFSGMDPTVRPKLPKLKYSNKLSRLTDIFNKHILLQFLSDDTKLIDIHTLIYCTAVVISEELKCKINEHISPSKTIFNNKPPWQIRLEKDIEKLRADCGRLTQYIKNNRSKKVVKRVEEIFKSRITHTRHESNNKKPEEFLDTLKQKLAIKVHRLRRYNKAQKRKKDNILFATNEKQFYRKLLTKDTDTTPTENLDIPTKTQLELFWSNIWEGETQHNDKADWIMEEEKRWNSIEEMDFNEITEIDIANITAKLHNWKSPGIDKIHNYWFKKLTSLHKYIARNLTHIVLGKQNIPEFFATGITYMIPKTSYSPQPSQYRPITCLPTIYKILTSAIATKISKHIEHNEILAEEQKGCRRGHMGCKEQLIIDSTIHKHATTKNRNLHCTYIDYKKAFDSIPHSWLLKILQIYKINPTLLNFMQNIMSHWKTSLQVNFNNNTVSTRQISIKRGIYQGDSLSPLWFCLALNPLSHILHQCQAGYSFKNSREETRISHLIYMDDIKLYSKTYNEMEKLVGTTAEFSNDIKMEFGIDKCKTLHIVRGKIQPGDFAIDDNYTITALEPTDMYKYLGYKQLKGLDHTVLKQSLTTEYKRRINAICNTQLSGRHTIKAFNTYAIPVLTYSFGVIKWSKTDIEQIERTTRTTLTKHNYLHPKSAIERLTIRRHKGGRGLIDIHHLWKKQIYHLKTFFHTKSMKSKIHKAISQNDHNFTPLNLNEQSNIEDPRNTDPQEQKVENWKKKSLHGRHPYDLEQTHIDSTASNKWLKVGNLFPETEGFLIAIQDQIINTKNYKKFIIKDPTITSDKCRKCHTQSETIQHITGACTTLTQTDYTHRHNQITNIIHQQLALKHNLIEDTNTPYYRYTPQTVLENLNIYISCVRVYVTELLLNGLTDLVEIFCVSSGGSENGLDSQLDPVGGVAVDISLKHFLIIKRYEVRWDH

SEQ ID NO: 20897 - protein, 1297 aa, Leptidea sinapis
METRSMKKRKIGPLPGGDRRGTPGAGAGCLSMRTVSGEELNRRAPTGSSENTTAENDRLTDRTTPTEPYSPCTISYTPSIPSSPLSSRYSPTPTLDAAREANAFLLASTKAGKPRVRMKWSKEMNLFIMRTYYYITKLETDLTTYRKQLHELFLQKYPDLNVTEQRIADQRRVIVKNKLLNQETLNQIKEEIKSQLEIENENQFHINISEPTNDVIPCSSTQTIPNTQHNQSLNTFTYNTQSLQTFSYITQTSHNMPTQTEFVTIMMENDIDTVLDHNPGTNTEIEEICYKFKTALTQYSGMDPLVRPKLPKLRYNSHLFQLVNMFNSDILSRFISDDTKLTDIHTIVYCVALVISEELNYKVTEYIRSTRPKDCYKPPWQIRLEKDIEKLRADCGRLTQYINNNRSRKIIKHVKAIFKTGNTHTKHENSNIKPEEFLDTLKQKLALKVHRLKRYKKAQERKNDNTMLSTNEKNFYRNLHKLKTDTVNNPNVPTQEQLETFWSGIWEQQVHHNDKADWIIEEENKWNAIEEMDFTEITETDKNNITARLHNWKSPGIDKIHNFWYKKLFSLHKIMAKNITDIIIGKQKIPDFIATGITYMLPKLQISPLPSQYRPITCLPTIYKILTSAITTKINKHVEHYNIIAEEQKGCRRGHMGCKEQLIIDSTIHKHATSKNRNLHCTYIDYKKAFDSIPHSWLIKILQIYKINPKIINFLHDIMSRWKTTLYLNTNQNTITTREIAIRKGIYQGDSLSPLWFCLALNPLSHLLRDCRAGYRLKHDIQETIVSHLIYMDDIKLYGKTEMEMKKLIDTTAQFSKDINMEFGLDKCRTLHIKRGKIRPGDYAVNDIDIIRAMEQTELYKYLGYKQLRGLDHTEIKNTLTIEFKKRINALCKTQLTSKHLIKSQNTYGIPILTYSFGIIKWTKTDIEQIERTIRTTLTKHNNLHPKSAIERLTIKREYGGRGLIDLNHLCQKQVDILIDFFHLKSQTSEIHKAIVKNDINFTPLNLHEDISSQNTRRNDPQIQKLDSWKRKVLHGRHPHDLEQSHINTAASNKWLKIGNLFPETEGFIIAIQDQVVNTKNYRKFIIKDPSISNDKCRKCHVQPETIQHITGGCTTLTQTDYTHRHNQVVNIIHQKLALKHKLIQNTNTPYYKYKPQTVLENDTYKLYFDRAILTDRTIHYNRPDITLKDKLNEITYLIDIAVPNTHNLQKTISEKINKYTELKDEVARIWNQKKVYVIPIVLSTTGVIPNHLLHSLKLLELKETLYITLQKVAILNTCRIVRKFLQIDEHDISPYT

SEQ ID NO: 20898 - protein, 808 aa, Hecatera dysodea
MPSKEVLETFWSNIWEEQVHHNDKANWITEEKTKWRAIDEMEFNEISESDIANITARLHNWKSPGLDKIQNFWFKKLTILHKSIAKNCTDIVLGKRNIPEFIATGITYMLPKSKHTSDPSQYRPITCLPTIYKILTSVLTNKINSHIEHHKIIAEEQKGCRRGHMGCKEQLIIDSTIHKHATIKNRNLHCTYIDYQKAFDSIPHSWLAHILEIYKINTKIIEFLRKVMTRWKTTLQLNNRHSTLVTRQINIRKGIYQGDSLSPLWFCLALNPLSHLLNRCRGGYNFKQNTDETTVSHLIYMDDIKLYSKTEKEMKILIETTTKFSQDINMQFGLDKCRTLHIIRGKIKPGNYMINDTDTIAAMEPNDLYKYLGYKQLKALDHTSIKQTLSTEYRRRMNAIYKTHLSGKHLTKALNTFAIPILTYSFGVVKWSKTDIEQLERVTRTTLTKYNYLHPKSAIERLTIKRQNGGRGLIDIRYLWQKQIARLKTFFYSKSRTSDIHRAITYNDFNYTPLNLSDQILQDTIDIDPQKQKIENWKNKVLHGRHPHDLEQTHVNLAASNKWLKIGNLFPETEGFMIAIQDQIINTKNYRKYIIKDPTLTNDKCRRCHIQSETIQHITGACTTLTQTDYTYRHNQVANIIHQKLAIKHSLIENSSTPYYNYKPETILENGTHKLYYDRAILTDKTIHYNRPDIMLQDKIKRITYLIDIAVPNTHNLQKTIAEKISKYAELKDEVTRIWRQEKVYIIPIVLSTTGVIPNYLLHSLKLLDLKETLYIILQKAAILNTCRIVRKFMQIEDNEVGPHHTTH

SEQ ID NO: 20899 - protein, 1312 aa, Hydraecia micacea
METRSKRKRIGPLPGGDRRGTLGADAECLSMRTVSGEELNRRAPTDKDATAEVIDDGDRLTNRTDTPIEPYSPSTVSYAPSRTSSPSIPSSPIPSSSPITRFNTVSPAPALNVAREVSTFLPASTKAGKTRVRMRWSKEVNLFIMRTYLHITKLETDMTTYRQQLHERFSRQYPEISVSEQRISDQRRTIVRNKLLSQVEIDQLKEEVRTKLQQESENYADTIILTQNTNVNIIQEQPQSQTESLTQLHPNSQYLTNNQSQPYTQTAHISTQTESLTLTLENDIETLVVADQNLTTDTYIQDIHDKFRTTITQYSGMDPAARPKLPKLKYTPNLFRLVNLFNENILIQFISDDTQLIDIHLLIYCTAVVISEELNFKITDHTRTTRTSRIVKPAWQQRLEKDIEMLRADCGRLTHYINGIRSNKVVKRVETIFKNYSNHTRHESSNRKPEEFLDTLKQKLALKVHRLRRYMKAQQRKNDNATFAMNEKVFYRNLQKTHTDITIENSTDAPSKEHLETFWSSIWEEQVQHNDKATWITEEETKWRLIDEMEFKEITETDITNITARLHNWKSPGIDKIQNFWYKKLTTLHKTIAKNLTSIILGQQNIPEFIATGITYMLPKTTYTTQPSQYRPITCLPTIYKILTSAITTKINSHVEHHNIIAEEQKGCRRGHMGCKEQLIIDSTIHKHATTKNRNLHCTYIDYQKAFDSIPHSWLIKILEIYKINSKIIDFLRIIMPHWKTTLQLNNHHTSLITRQISIRKGIYQGDSLSPLWFCLALNPLSHLLRHCQAGYNLKHNAEETVISHLIYMDDIKLYAKTEQEMKKLIEVTTEFSQDINMKFGLDKCKTLHIIKGKIKPGSYTVNDTDTIAAMEPTDLYKYLGYKQLKGLDHTSIKQTLNTEYRRRINAVCKTQLSGKHLIKALNTFAIPILTYSFGIIKWSKTNIEQLERTTRTVLSKHNNLHPKSAIERLTIKRQNGGRGLIDIHHLWQKQITRLKTFFYSKSRSSDIHKAISLNDLNYTPLNLNEQNIQDSNNPDPQNQKIENWKKKVLHGRHPHDLEQSHINIVASNKWLKIGNLFPETEGFIIAIQDQIINTKNYRKFIIKDPTTTNDKCRRCHIQSETIQHITGACIALTQTDYTHRHNQVANIIHQKLALKHNLIQNSNTPYYKYTPQTILENDTHKMYYDRAILTDRTIHYNRPDITLQDKIEKITYLIDIAVPNTHNLQKTIAEKISKYADLKEEVTRIWRQEKVYVIPIVLSTTGVIPNHLLRSLKSIDLEESVYINLQKAAILNTCRIVRKFMQLDEEHTPSS

SEQ ID NO: 20900 - protein, 1293 aa, Hecatera dysodea
METRSKNKRIVSLPGGDRRGAPGADAGCLSMRTVSGEELNRRAPTGKDVTAEITDDTDRLTDRTNTPVEPYSPSTVSYTPSRRSSPSIPSSPPITSFNVAQSTSGSDVAREVSTFLPASTKAGKPRIRMRWSKEVNLFIMRTYFLITKLETDMTTYRQQLHAIFTRQYPEITVSEQRISDQRRAIIRNKLISHKEIDELKDEVRTQLIQAENYGDTSNTTQNTHENRLSEQLQSLTESQPYNSQTFNTFTQTESLTLTLENDIETVAVDPNPITDIYVTEILDKFRTTLTQYSGMDPAARPKLPKLKNTPNLFRLVNLFNEIILKQFLSDDTQLIDIHTLVYCTAVVIAEELNFKITEHTINIRFRKNVKPAWQLRLEKDIEKLRADCGRLTQYIKGCRSQKVVRRVEAIFNINTTHTRHENNNRKPKEYLDTLKQKLALKVHRLRRYKKAQQRKNDNAIFATNEKVFYRNLQNPHPNSTMENEMEMPSKEVLETFWSNIWEEQVHHNDKANWITEEETKWRAIDEMEFNEISESDIANITARLHNWKSPGLDKIQNFWFKKLTILHKSIAKNCTDIVLGKQNIPEFIATGITYMLPKSKHTSDPSQYRPITCLPTIYKILTSVLTNKINSHIEHHKIIAEEQKGCRRGHMGCKEQLIIDSTIHKHATTKNRNLHCTYIDYQKAFDSIPHSWLVHILEIYKINTKIIEFLRKAMTRWKTTLQLNNHLSTLVTRQINIRKGIYQGDSLSPLWFCLALNPLSHLLNRCRGGYNFKQNTDETTVSHLIYMDDIKLYSKTEKEMKILIETTTKFSQDINMQFGLDKCRTLHIIRGKIKPGNYMINDTDAIAAMEPNDLYKYLGYKQLKALDHTSIKQTLSTEYRRRMNAIYKTHLSGKHLTKALNTFAIPILTYSFGVVKWSKTDIEQLERVTRTTLTKYNYLHPKSAIERLTIKRQNGGRGLIDIRHLWQKQIARLKTFFYTKSHTSDIHRAITYNDFNYTPLNLSEQILQDTIDIDPQKQKIENWKNKVLHGRHPHDLEQTHVNLAASNKWLKIGNLFPETEGFMIAIQDQIINTKNYRKYIIKDPTLTNDKCRKCHIQSETIQHITGACTTLTQTDYTHRHNQVANIIHQKLAIKHSLIENSSTPYYNYKPETILENDTHKLYYDRAILTDKTIHYNRPDIMLQDKIKRITYLIDIAVPNTHNLQKTIAEKISKYAELKDEVTRIWRQEKVYIIPIVLSTTGVIPNYLLQSLKLLDLKETLYIVLQKAAILNTCRIVRKFMQIEDNVGPHHTTQ

SEQ ID NO: 20901 - protein, 1314 aa, Hydraecia micacea
METRSKRKRIGPLPGGDRRGTLGADAECLSMRTVSGEELNRRAPTDKDATAEVIDDGDRMTNRTDTPIEPYSPSTVSYAPSRTSSPSIPSSPIPSSSPITRFNTVSPAPALNVAREVSTFLPASTKAGKTRVRMRWSKEVNLFIMRTYLHITKLETDMTTYRQQLHERFSRQYPEISVSEQRISDQRRTIVRNKLLSQVEIDQLKEKVRTQLQQESENYADTNTIILTQNTNVNIIQEQPQSQTESLTQLHPNSQYLTNNQSQPYTQTAHISTQTESLTLTLENDIETLVVADQNLTTDTYIQDIHDKFRTTITQYSGMDPAARPKLPKLKYTPNLFRLVNLFNENILIQFISDDTQLIDIHLLIYCTAVVISEELNFKITDHTRTTRTSRIVKPAWQQRLEKDIEMLRADCGRLTHYINGIRSNKVVKRVETIFKNYSNHTRHESSNRKPEEFLDTLKQKLALKVHRLRRYMKAQQRKNDNATFAMNEKVFYRNLQKTHTDITIENSTDAPSKEHLETFWSSIWEEQVQHNDKATWITEEETKWRLIDEMEFKEITETDITNITARLHNWKSPGIDKIQNFWYKKLTTLHKTIAKNLTAIILGQQNIPKFIATGITYMLPKTTYTTQPSQYRPITCLPTIYKILTSAITTKINSHVEHHNIIAEEQKGCRRGHMGCKEQLIIDSTIHKHATTKNRNLHCTYIDYQKAFDSIPHSWLIKILEIYKINSKIIDFLRIIMPHWKTTLQLNNHHTSLITRQISIRKGIYQGDSLSPLWFCLALNPLSHLLRHCQAGYNLKHNAEETVISHLIYMDDIKLYAKTEKEMKKLIEVTTEFSQDINMKFGLDKCKTLHIIKGKIKPGSYTVNDTDTIAAMEPTDLYKYLGYKQLKGLDHTSIKQTLNTEYRRRINAVCKTQLSGKHLIKALNTFAIPILTYSFGIIKWSKTNIEQLERTTRTVLSKHNNLHPKSAIERLTIKRQNGGRGLIDIHHLWQKQITRLKTFFYSKSRSSDIHKAISLNDLNYTPLNLNEQNIQDSNNPDPQNQKIENWKKKVLHGRHPHDLEQSHINIVASNKWLKIGNLFPETEGFIIAIQDQIINTKNYRKCIIKDPTTTNDKCRRCHIQSETIQHITGACIALTQTDYTHRHNQVANIIHQKLALKHNLIQNSNTPYYKYTPQTILENDTHKIYYDRAILTDRTIHYNRPDITLQDKIGKITYLIDIAVPNTHNLQKTIAEKISKYADLKEEVTRIWRQEKVYVIPIVLSTTGVIPNHLLRSLKSIDLEESVYINLQKAAILNTCRIVRKFMQLDEEHTPSS

SEQ ID NO: 20902 - protein, 1294 aa, Hecatera dysodea
METRSKNKRIVSLPGGDRRGAPGADAGCLSMRTVSGEELSRRAPTDKDVTAEITDDTDRLTDRTNTPVEPYSPSTVSYTPSRRSSPSIPSSPPITSFNVAQSTTGSDVAREVSTFIPASTKAGKPRVRMRWSKEVNLFIMRTYFLITKLETDMTTYRQQLHAIFTRQYPEITVSEQRISDQRRAIIRNKLISLKEIDELKDEVRTQLMQAENYGDTSNTTQNTHENRLSEQLITLTESQPYNSQTFNTSTQTESLTLTLENDIETVAVDPNPITDIYVTEILDKFRTTLTQYSGMDPAARPKLPKLKNTPNLFRLVNLFNEIILKQFLSDDTQLIDIHTLIYCTAVVIAEELNFKITEHTINIRFRKNVKPAWQLRLEKDIEKLRADCGRLTQYIKGCRSQKVVRRVEAIFNINTTHTRHENNNRKPKEYLDTLKQKLALTVHRLRRYKKAHQRKNDNAIFATNEKVFYRNLQNPHPNSTTENEIEMPSKEVLETFWSNIWEEQVHHNDKANWITEEKTKWRAIDEMEFNEISESDIANITARLHNWKSSGLDKIQNFWFKKLTILHKSIAKNCTDIVLGKQNIPEFIATGITYMLPKSKHTSDPSQYRPITCLPTIYKILTSVLTNKINSHIEHHKIIAEEQKGCRRGHMGCKEQLIIDSTIHKHATTKNRNLHCTYIDYQKAFDSIPHSWLVHILEIYKINTKIIEFLRKVMTRWKTTLQLNTRHSTLVTRQINIRKGIYQGDSLSPLWFCLALNPLSHLLNRCRGGYNFKQNTDETTVSHLIYMDDIKLYSKTEKEMKILIETTTKFSQDINMQFGLDKCRTLHIIRGKIKPGNYMINDTDTIAAMEPNDLYKYLGYKQLKALDHTSIKQTLSTEYRRRMNAIYKTHLSGKHLTKALNTFAIPILTYSFGVVKWSKTDIEQLERVTRTTLTKYNYLHPKSAIERLTIKRQNGGRGLIDIRHLWQKQIARLKTFFYSKSRTSDIHRAITYNDFNYTPLNLSEQILQDTIDIDPQKQKIENWKKKVLHGRHPHDLEQTHVNLAASNKWLKIGNLFPETEGFMIAIQDQIINTKNYRKYIIKDPTLTNDKCRRCHIQSETIQHITGACTTLTQTDYTHRHNQVANIIHQKLAIEHNLIENSSTPYYNYKPETILENGTHKLYYDRAILTDKTIHYNRPDIMLQDKIKRITYLIDIAVPNTHNLQKTIAEKISKYAELKDEVTRIWRQEKVYIIPIVLSTTGVIPNYLLHSLKLLDLKETLYIILQKAAILNTCRIVRKFMQIEDNEVGPHHTTH

SEQ ID NO: 20903 - protein, 1298 aa, Mamestra brassicae
METRSKNKRIGPLPGGDRRGAPGADAGCLSMRTVSGEELSRRAPTDKDATAEITDDGDRLTDRTNTPVEPYSPSTVSYTPSRRSSLSIPSSPPITSLNVVQSTPASDVAREVSTFLPASTKAGKARVRMRWSKEVNLFIMRTYFLITKLETDMTTYRQQLHANFTRQYPEITVSEQRIADQRRTIVRNKLISHKEIDQLKEEVRTQLIQEENCGGTSDVTQNTHESSLLEQQQSLTLLQSLTESQPYNSQTSHTSTQTESLTLTLENDIEIVVVDQNPIADIYVTEILDKFRTTLTQYSGMDPAARPKLPKLKYSPTLFRLVNLFNENILKQFISDDTQLIDIHTLIYCTAVVIAEELNFKITEHTRNTRPRYNVKPAWQLRLEKDIEKLRADCGRLTQYIKGCRSQKVVRRVEAIFNINSTHTKHENNNRKPEEYLDTLKQKLALKVHRLRRYKKAQQRKNDNAIFATNEKVFYRNLQKPHTNNNSTTENDIEIPTKEVLETFWSSIWEEQIHHNDKAIWITEEKTKWRAIDEMEFNEITESDIANITARLHNWKSPGIDKIQNFWFKKLTTLHKSIAKNCTDIVLGKQNIPEFIATGITYMLPKSKHTSEPSQYRPITCLPTIYKILTSVITNKINAHIEHHKIIAEEQKGCRRGHMGCKEQLIIDSTIHKHATTKNRNLHCTYIDYQKAFDSIPHSWLVHILEIYKINPKIVDFLRTVMTRWKTTLQLNNHHSTLVTRQINIRKGIYQGDSLSPLWFCLALNPLSHLLNRCRAGYNFKHNTEETTVSHLIYMDDIKLYSKTEKEMKILIEATTKFSQDINMQFGLDKCKTLHIIRGKIKPGNYLINDTDTIAAMEPNDLYKYLGYKQLKGLDHTSIKQTLSTEYRRRINAICKTHLSGKHLTKAINTFAIPILTYSFGVVKWSKTDIEQLERITRTTLTKHNNLHPKSAIERLTIKRQNGGRGLIDIHLLWQKQIARLKTFFQLKSRTSDIHNAITYNDFNYTPLNLSEQLLLNTTETDPLNQKLENWKKKALHGRHPHDLEQSHVNLAASNKWLKIGNLFPETEGFMIAIQDQIINTKNYRKYIIKDPTLTNDKCRRCHIQSETIQHITGACTTLTQTDYTHRHNQVANIIHQRLAIKHSLIQNSSTPYYNYKPETILENDTYKLYYDRAILTDKTIHYNRPDITLQDKIKKITYLIDIAVPNTHNLQKTIAEKISKYAELKDEVTRIWRQEKVYVIPIVLSTTGVIPHHLLRSLKLLELEESVYINLQKAAILNTCRIVRKFMQLEDENTLSS

SEQ ID NO: 20904 - protein, 1314 aa, Hydraecia micacea
METRSKRKRIGPLPGGDRRGTLGADAECLSMRTVSGEELNRRAPTDKDATAEVIDDGDRMTNRTDTPIEPYSPSTVSYAPSRTSSPSIPSSPIPSSSPITRFNTVSPAPALNVAREVSTFLPASTKAGKTRVRMRWSKEVNLFIMRTYLHITKLETDMTTYRQQLHERFSRQYPEISVSEQRISDQRRTIVRNKLLSQVEIDQLKEKVRTQLQQESENYADTNTIILTQNTNVNIIQEQPQSQTESLTQLHPNSQYLTNNQSQPYTQTAHISTQTESLTLTLENDIETLVVADQNLTTDTYIQDIHDKFRTTITQYSGMDPAARPKLPKLKYTPNLFRLVNLFNENILIQFISDDTQLIDIHLLIYCTAVVISEELNFKITDHTRTTRTSRIVKPAWQQRLEKDIEMLRADCGRLTHYINGIRSNKVVKRVETIFKNYSNHTRHESSNRKPEEFLDTLKQKLALKVHRLRRYMKAQQRKNDNATFAMNEKVFYRNLQKTHTDITIENSTDAPSKEHLETFWSSIWEEQVQHNDKATWITEEETKWRLIDEMEFKEITETDITNITARLHNWKSPGIDKIQNFWYKKLTTLHKTIAKNLTAIILGQQNIPKFIATGITYMLPKTTYTTQPSQYRPITCLPTIYKILTSAITTKINSHVEHHNIIAEEQKGCRRGHMGCKEQLIIDSTIHKHATTKNRNLHCTYIDYQKAFDSIPHSWLIKILEIYKINSKIIDFLRIIMPHWKTTLQLNNHHTSLITRQISIRKGIYQGDSLSPLWFCLALNPLSHLLRHCQAGYNLKHNAEETVISHLIYMDDIKLYAKTEKEMKKLIEVTTEFSQDINMKFGLDKCKTLHIIKGKIKPGSYTVNDTDTIAAMEPTDLYKYLGYKQLKGLDHTSIKQTLNTEYRRRINAVCKTQLSGKHLIKALNTFAIPILTYSFGIIKWSKTNIEQLERTTRTVLSKHNNLHPKSAIERLTIKRQNGGRGLIDIHHLWQKQITRLKTFFYSKSRSSDIHKAISLNDLNYTPLNLNEQNIQDSNNPDPQNQKIENWKKKVLHGRHPHDLEQSHINIVASNKWLKIGNLFPETEGFIIAIQDQIINTKNYRKFIIKDPTTTNDKCRRCHIQSETIQHITGACIALTQTDYTHRHNQVANIIHQKLALKHNLIQNSNTPYYKYTPQTILENDTHKIYYDRAILTDRTIHYNRPDITLQDKIGKITYLIDIAVPNTHNLQKTIAEKISKYADLKEEVTRIWRQEKVYVIPIVLSTTGVIPNHLLRSLKSIDLEESVYINLQKAAILNTCRIVRKFMQLDEEHTPSS

SEQ ID NO: 20905 - protein, 1312 aa, Hydraecia micacea
METRSKRKRIGPLPGGDRRGTLGADAECLSMRTVSGEELNRRAPTDKDATAEVIDDGDRLTNRTDTPIEPYSPSTVSYAPSRTSSPSIPSSPIPSSSPITRFNTVSPAPALNVAREVSTFLPASTKAGKTRVRMRWSKEVNLFIMRTYLHITKLETDMTTYRQQLHERFSRQYPEISVSEQRISDQRRTIVRNKLLSQVEIDQLKEEVRTQLQQESENYADTIILTQNTNVNIIQEQPQSQTESLTQLHPNSQYLTNNQSQPYTQTAHISTQTESLTLTLENDIETLVVADQNLTTDTYIQDIHDKFRTTITQYSGMDPAARPKLPKLKYTPNLFRLVNLFNENILIQFISDDTQLIDIHLLIYCTAVVISEELNFKITDHTRTTRTSRIVKPAWQQRLEKDIEMLRADCGRLTHYINGIRSNKVVKRVETIFKNYSNHTRHESSNRKPEEFLDTLKQKLALKVHRLRRYMKAQQRKNDNATFAMNEKVFYRNLQKTHTDITIENSTDAPSKEHLETFWSSIWEEQVQHNDKATWITEEETKWRLIDEMEFKEITETDITNITARLHNWKSPGIDKIQNFWYKKLTTLHKTIAKNLTSIILGQQNIPEFIATGITYMLPKTTNTTQPSQYRPITCLPTIYKILTSAITTKINSHVEHHNIIAEEQKGCRRGHMGCKEQLIIDSTIHKHATTKNRNLHCTYIDYQKAFDSIPHSWLIKILEIYKINSKIIDFLRIIMPHWKTTLQLNNHHTSLITRQISIRKGIYQGDSLSPLWFCLALNPLSHLLRHCQAGYNLKHNAEETVISHLIYMDDIKLYAKTEKEMKKLIEVTTEFSQDINMKFGLDKCKTLHIIKGKIKPGSYTVNDTDTIAAMEPTDLYKYLGYKQLKGLDHTSIKQTLNTEYRRRINAVCKTQLSGKHLIKALNTFAIPILTYSFGIIKWSKTNIEQLERTTRTVLSKHNNLHPKSAIERLTIKRQNGGRGLIDIHHLWQKQITRLKTFFYSKSRSSDIHKAISLNDLNYTPLNLNEQNIQDSNNPDPQNQKIENWKKKVLHGRHPHDLEQSHINIVASNKWLKIGNLFPETEGFIIAIQDQIINTKNYRKFIIKDPTTTNDKCRRCHIQSETIQHITGACIALTQTDYTHRHNQVANIIHQKLALKHNLIQNSNTPYYKYTPQTILENDTHKMYYDRAILTDRTIHYNRPDITLQDKIEKITYLIDIAVPNTHNLQKTIAEKISKYADLKEEVTRIWRQEKVYVIPIVLSTTGVIPNHLLRSLKSIDLEESVYINLQKAAILNTCRIVRKFMQLDEEHTPSS

SEQ ID NO: 20906 - protein, 1310 aa, Cosmia trapezina
METRSKRKRLGPLPGGDRRGTPGADAGCLSMRTVSGEELNRRAPTDKVATAEVIDDGDRLTNRTDTPVEPYSPSTVSYAPSGTSSPSIPSSPIPSSPPITSVNTVSPTPALNVAREVSTFLPASTKAGKARFRMRWSKEVNLFIMRTYLHITKLETGMTTYRQQLHERFSRQYPEISVSEQRISDQRRTIVRNKLLSQVELDQLKEEVRTQLREESENYADTIILTQNTNENILQEQPQSLIYLHRNSQSLTNNQSQAYTQTTHTSTQTQTESLTLTLENDIEALIVADQNLTTDTYIQEINDKFRTTITQYSGMDPAVRPKLPKLKYTPNLFRLVNLFNENILVQFISDDTPLIDIHLLIYCTAVVISEELNFKITDHTGTTRTSRIVKPAWQQRLEKDIEKLRADCGRLTHYINGIRTNKVVRRVETIFKNYSNHTRHESNNRKPEEYLDTLKQKLALKVHRLRRYMKAQQRKNDNATFVTNEKVFYRNIQKTHTDTTIENNTDTPTKEHLETFWSSIWEEQVQHNEQATWITEEETKWRSIDEMEFKEITETDITNITARLHNWKSPGIDKIQNFWYKKLTILHKSIAKNLTAIILGQQNIPEFIATGITYMLPKTTYTTQPSQYRPITCLPTIYKILTSAITTKINSHIEHHNIIAEEQKGCRRGHMGCKEQLIIDSTIHKHATTKNRNLHCTYIDYQKAFDSIPHSWLIQILEIYKINSKIIDFLRIIMPHWKTTLQLNNRHTSLITRQIFIRKGIYQGDSLSPLWFCLALNPLSHLLRHCQAGYNLKHNTEETVISHLIYMDDIKLYAKTEKEMKKLIEVTTEFSQDINMKFGLDKCKTLHIIKGKIKTGSYTVNDTDTIAAMEPTDLYKYLGYKQLKGLDHTAIKQTLNTEYRRRINAVCKTQLSGKHLIKALNTFAIPILTYSFGVIKWSKTDIEQLERTTRTILSKHNNLHPKSAIERLTIKRQNGGRGLIDIHHLWQKQMTRLKTFFYSKSRTSDIHKAISLNDFNYTPLNLNEQNTQDTNNPDPQNQKIENWKKKVLHGRHPHDLEQSHINIVASNKWLKIGNLFPETEGFIIAIQDQIINTKNYRKFIIKDPTATNDKCRRCHIQSETIQHITGACTTLTQTDYTHRHNQVANIIHQKLALKHSLIQNSNTPYYKYTPQTILENDTHKIYYDRAILTDRTIHYNRPDITLQDKIRKITYLIDIAVPNTHNIQKTIAEKISKYADLKEEVTRIWRQEKVYVIPIVLSTTGVIPNHLLRSLKLIDLEESVYINLQKAAILNTCRIVRKFMQLDEENTPSS

SEQ ID NO: 20907 - protein, 932 aa, Hydraecia micacea
MGTCVLSSYLSIQINKIEVSVCNLYNNNNNNNNTHYINGIRSNKVVKRVETIFKNYSNHTRHESSNRKPEEFLDTLKQKLALKVHRLRRYMKAQQRKNDNATFAMNEKVFYRNLQKTHTDITIENSTDAPSKEHLETFWSSIWEEQVQHNDTATWITEEETKWRLIDEMEFKEITETDITNITARLHNWKSPGIDKIQNFWYKKLTTLHKTIAKNLTAIILGQQNIPEFIATGITYMLPKTTYTTQPSQYRPITCLPTIYKILTSAITTKINSHVEHHNIIAEEQKGCRRGHMGCKEQLIIDSTIHKHATTKNRNLHCTYIDYQKAFDSIPHSWLIKILEIYKINSKIIDFLRIIMPHWKTTLQLNNHHTSLITRQISIRKGIYQGDSLSPLWFCLALNPLSHLLRHCQAGYNLKHNAEETVISHLIYMDDIKLYAKTEKEMKKLIEVTTEFSQDINMKFGLDKCKTLHIIKGKIKPGSYTVNDTDTIAAMEPTDLYKYLGYKQLKGLDHTSIKQTLNTEYRRRINAVCKTQLSGKHLIKALNTFAIPILTYSFGIIKWSKTNIEQLERTTRTVLSKHNNLHPKSAIERLTIKRQNGGRGLIDIHHLWQKQITRLKTFFYSKSRSSDIHKAISLNDLNYTPLNLNEQNIQDSNNPDPQNQKIENWKKKVLHGRHPHDLEQSHINIVASNKWLKIGNLFPETEGFIIAIQDQIINTKNYRKFIIKDPTTTNDKCRRCHIQSETIQHITGACIALTQTDYTHRHNQVANIIHQKLALKHNLIQNSNTPYYKYTPQTILENDTHKMYYDRAILTDRTIHYNRPDITLQDKIEKITYLIDIAVPNTHNLQKTIAEKISKYADLKEEVTRIWRQEKVYVIPIVLSTTGVIPNHLLRSLKSIDLEESVYINLQKAAILNTCRIVRKFMQLDEEHTPSS

SEQ ID NO: 20908 - protein, 1310 aa, Cosmia trapezina
METRSKRKRLGPLPGGDRRGTPGADAGCLSMRTVSGEELNRRAPTDKVATAEVIDDGDRLTNRTDTPVEPYSPSTVSYAPSGTSSPSIPSSPIPSSPPITSVNTVSPTPALNVAREVSTFLPASTKAGKARVRMRWSKEVNLFIMRTYLHITKLETDMTTYRQQLHECFSRQYPEISVSEQRISDQRRTIVRNKLLSQVELDQLKEEVRTQLREESENYADTIILTQNTNENILQEQPQSLIYLHRNSQSLTNNQSQAYTQTTHTSTQTQTESLTLTLENDIEALIVADQNLTTDTYIQEIKDKFRTTITQYSGMDPAVRPKLPKLKYTPNLFRLVNLFNENILVKFISDDTQLIDIHLLIYCTAVVISEELNFKITDHTGTTRTSRIVKPAWQQRLEKDIEKLRADCGRLTHYINGIRTNKVVRRVETIFKNYSNHTRHESNNRKPEEYLDTLKQKLALKAHRLRRYMKAQQRKNDNATFATNEKVFYRNIQKTHTDTTIENNTDTPTKEHLETFWSSIWEEQVQHNEQATWITEEETKWRSIDEMEFKEITETDITNITARLHNWKSPGIDKIQNFWYKKLTILHKSIAKNLTAIILGQQNIPEFIATGITYMLPKTTYTTQPSQYRPITCLPTIYKILTSAITTKINSHIEHHNIIAEEQKGCRRGHMGCKEQLIIDSTIHKHATTKNRNLHCTYIDYQKAFDSIPHSWLIQILEIYKINSKIIDFLRIIMPHWKTTLQLNNRHTSLITRQIFIRKGIYQGDSLSPLWFCLALNPLSHLLRHCQAGYNLKHNTEETVISHLIYMDDIKLYAKTEKEMKKLIEVTTEFSQDINMKFGLDKCKTLHIIKGKIKPGSYTVNDTDTIAAMEPTDLYKYLGYKQLKGLDHTAIKQTLNTEYRRRINAVCKTQLSGKHLIKALNTFAIPILTYSFGVIKWSKTDIEQLERTTRTILSKHNNLHPKSAIERLTIKRQNGGRGLIDIHHLWQKQMTRLKTFFYSKSRTSDIHKAISLNDFNYTPLNLNEQNTQDTNNPDPQNQKIENWKKKVLHGRHPHDLEQSHINIVASNKWLKIGNLFPETEGFIIAIQDQIINTKNYRKFIIKDPTATNDKCRRCHIQSETIQHITGACTTLTQTDYTHRHNQVANIIHQKLALKHSLIQNSNTPYYKYTPQTILENDTHKIYYDRAILTDRTIHYNRPDITLQDKIRKVTYLIDIAVPNTHNIQKTIAEKISKYADLKEEVTRIWRQEKVYVIPIVLSTTGVIPNHLLRSLKLIDLEESVYINLQKAAILNTCRIVRKFMQLDEENTPSS

SEQ ID NO: 20909 - protein, 764 aa, Mamestra brassicae
MEFNEITESDIANITARLHNWKSPGIDKIQNFWFKKLTTLHKSIAKNCTDTVLGKQNIPEFIATGITYMLPKSKHTSEPSQYRPITCLPTIYKILTSVITNKINAHIEHHKIIAEEQKGCRRGHMGCKEQLIIDSTIHKHATTKNRNLHCTYIDYQKAFDSIPHSWLVHILEIYKINPKIVDFLRTVMTRWKTTLQLNNHHSTLVTRQINIRKGIYQGDSLSPLWFCLALNPLSHLLNRCRAGYNFKHNTEETTVSHLIYMDDIKLYSKTEKEMKILIEATTKFSQDINMQFGLDKCKTLHIIRGKIKPGNYIINDTDTIAAMEPNDLYKYLGYKQLKGLDHTSIKQTLSTEYRRRINAICKTHLSGKHLTKAINTFAIPILTYSFGVVKWSKTDIEQLERITRTTLTKHNNLHPKSAIERLTIKRQNGGRGLIDIHLLWQKQIARLKTFFQLKSRTSDIHNAITYNDFNYTPLNLSEQLLLNTTETDPLNQKLENWKKKALHGRHPHDLEQSHVNLAASNKWLKIGNLFPETEGFMIAIQDQIINTKNYRKYIIKDPTLTNDKCRRCHIQSETIQHITGACTTLTQTDYTHRHNQVANIIHQRLAIKHSLIQNSSTPYYNYKPETILENDTYKLYYDRAILTDKTIHYNRPDITLQDKIKKITYLIDIAVPNTHNLQKTIAEKISKYAELKDEVTRIWRQEKVYVIPIVLSTTGVIPHHLLRSLKLLELEESVYINLQKAAILNTCRIVRKFMQLEDENTLSS

SEQ ID NO: 20910 - protein, 1292 aa, Mamestra configurata
METRSKNKRIGPLPGGDCRGAPGADAATVSGEELSRRAPTDKDATAEITDDGDRLTDRTNTPVEPYSPSTVSYTPSRRSSLSIPSSPPITSLNVVQSTPASDVAREVSTFLPASTKAGKARVRMRWSKEVNLFIMRTYFLITKLETDMTTYRQQLHANFTRQYPEITVSEQRIADQRRTIVRNKLISHKEIDQLKEEVRTQLIQEENCGDTSDVTQNTHESSLLEQQQSLTLLQSLTESQPYNSQTSHTSTQTESLTLTLENDIEIVVVDQNPIADIYVTEILDKFRTTLTQYSGMDPAARPKLPKLKYSPTLFRLVNLFNENILKQFISDDTQLIDIHTLIYCTAVVISEELNFKITEHTRNTRPRYNVKPAWQLRLEKDIEKLRADCGRLTQYIKGCRSQKVVRRVEAIFNINSTHTRHENNNRKPEEYLDTLKQKLALKVHRLRRYKKAQQRKNDNAIFATNEKVFYRNLQKPHTNNNSTTENDIEIPTKEVLETFWSSIWEEQIHHNDKAIWITEEKTKWRAIDEMEFNEITESDIANITARLHNWKSPGIDKIQNFWFKKLTTLHKSIAKNCTDIVLGKQNIPEFIATGITYMLPKSKHTSEPSQYRPITCLPTIYKILTSVITNKINAHIEHHKIIAEEQKGCRRGHMGCKEQLIIDSTIHKHATTKNRNLHCTYIDYQKAFDSIPHSWLVHILEIYKINPKIVDFLRTVMTRWKTTLQLNNHHSTLVTRQINIRKGIYQGDSLSPLWFCLALNPLSHLLNRCRAGYNFKHNTEETTVSHLIYMDDIKLYSKTEKEMKILIEATTKFSQDINMQFGLDKCKTLHIIRGKIKPGNYIINDTDTIAAMEPNDLYKYLGYKQLKGLDHTSIKQTLSTEYRRRINTICKTHLSGKHLTKAINTFAIPILTYSFGVVKWSKTDIEQLERITRTTLTKHNNLHPKSAIERLTIKRQNGGRGLIDIHHLWQKQIARLKTFFQLKSRTSDIHNAITYNDFNYTPLNLSEQLLLNTTETDPLNQKLENWKKKALHGRHPHDLEQSHVNLAASNKWLKIGNLFPETEGFMIAIQDQIINTKNYRKYIIKDPTLTNDKCRRCHIQSETIQHITGACTTLTQTDYTHRHNQVANIIHQRLAIKHSLIQNSSTPYYNYKPETILENETYKLYYDRAILTDKTIHYNRPDITLQDKIKKITYLIDIAVPNTHNLQKTIAGKISKYAELKDEVTRIWRQEKVYVIPIVLSTTGVIPHHLLRSLKLLELEESVYINLQKAAILNTCKVRKFMQLEDENTLSS

SEQ ID NO: 20911 - protein, 1310 aa, Agrochola circellaris
METRSKRKRIGPLPGGDRRGAPGADAGCLSMRTVSGEELNRRALTDKDVTAEADDGDRLTNRTDTPVEPYSPSTVSYAPSRTSSPSIPSSPIPSSPPITSFNTVSPTPALNVAREVSTFLPASTKAGKARVRMKWSKEVNLFIMRTYLHITKVETDMTTYRQQLHERFSLQYPEISVSEQRISDQRRTIVRNKLLSQVELDQLKEEVRTQLRQESENHADTNTITLTQNTNENILQEQPQSLTQLYPNSQPLTYEYNQSQAYTQTAHTSTQTESLTLTLENDIETLVVADQNLTTDTYIQEIHDKFRTTITQYSGMDPAVRPKLPKLKYTRNLFRLVNLFNENILIQFISDDTQLIDIHLLIYCTAVVISEELNFKITNHTGNTRTSHIVKPAWQQRLEKDIEKLRADCGRLTQYINGIRSNKVVKRVETIFKNYSNHTRHESNNRKPEEFLDTLKQKLALKVHRLRRYMKAQQRKNDNATFAMNEKVFYRNIQKTHNDTTIENNTDTPSKEHLETFWSSIWEEQVQHNDKATWITEEETKWRLIDEMEFKEITEPDITNITAKLHNWKSPGIDKIQNFWYKKLTTLHKSIAKNLTAIILGQQNIPEFIATGITYMLPKTTYTTQPSQYRPITCLPTIYKILTSVITTKINSHIEHHSIIAEEQKGCRRGHMGCKEQLIIDSTIHKHATTKNRNLHCTYIDYQKAFDSIPHSWLIKILEIYKINSKIIDFLRIIMPHWKTTLQLNNRHTSLITRQISIRKGIYQGDSLSPLWFCLALNPLSHLLRQCQAGYNFKNNTGDTVISHLIYMDDIKLYAKTEKEMKKLIEVTTEFSQDINMKFGLDKCKTLHIIRGKIKPGTYTVNDTDTIAAMEPTDLYKYLGYKQLKGIDHTAIKQTLNTEYRRRTNAVCKTQLSGKHLIKALNTFAIPILTYSFGVIKWSKTDIEQLERTTRTILTKHHNLHPKSAIERLTIKRQSGGRGLIDIHHLWQKQITRLKTFFYSKSRTSDIHKAICLNDLNYTPLNLNEQNIHTNNSDPQNQKIENWKKKVLHGRHPHDLEQSHINIVASNKWLMIGNLFPETEGFMIAIQDQIINTKNYRKFIIKDPTTTNDKCRRCHIQSETIQHITGACTTLTQTDYTHRHNQVANIIHQKLALKHSLIQNSNTPYYKYTPQTILENETHKMYYDRAILTDRTIHYNRPDITLQDKIRKITYLIDIAVPNTHNLQKTITEKISKYADLKEEVTRIWRQEKVYVIPIVLSTTGVIPNHLLRSLKLIDLEESVYINLQKAAILNTCRIVRKFMQLEEENTPSS

SEQ ID NO: 20912 - protein, 1308 aa, Agrochola circellaris
METRSKRKRIGPLPGGDRRGAPGADAGCLSMRTVSGEELNRRAPTDKDATAEADDGDRLTNRTDTPVEPYSPSTVSYAPSRTSSPSIPSSPIPSSPLITSFNTVSPTPALNVAREVSTFLPASTKAGKARVRMKWSKEVNLFIMRTYLHITKVETDMTTYRQQLHERFSLQYPEISVSEQRISDQRRTIVRNKLLSQVELDQLKEEVRTQLRQESENHADTNTITLTQNTNENILQEQPQSLTQLYPNSQPLTYNQSQAYTQTAHTSTQTESLTLTLENDIETLVVADQNLTTDTYIQEIHDKFRTTITQYSGMDAAARPKLPKLKYTRNLFRLVNLFNENILIQFISDDTQLIDINLLIYCTAVVISEELNFKITNHTGNTRTSHIVKPAWQQRLEKDIEKLRADCGRLTQYINGIRSNKVVKRVETIFKNYSNHTRHESNNRKPEEFLDTLKQKLALKVHRLRRYMKAQQRKNDNATFAMNEKVFYRNIQKTHNDTTIENNTDTPSKEHLETFWSSIWEEQVQHNDKATWITEEETKWGLIDEMEFKEITEPDITNITAKLHNWKSPGIDKIQNFWYKKLTTLHKSIAKNLTAIILGQQNIPEFIATGITYMLPKTTYTTQPSQYRPITCLPTIYKILTSVITTKINSHIEHHNIIAEEQKGCRRGHMGCKEQLIIDSTIHKHATTKNRNLHCTYIDYQKAFDSIPHSWLIKILEIYKINSKIIDFLRIIMPHWKTTLQLNNRHTSLITRQISIRKGIYQGDSLSPLWFCLALNPLSHLLRHCQAGYNFKHNTEDTVISHLIYMDDIKLYAKTEKDMKKLIEVTTEFSQDINMKFGLDKCKTLHIIRGKIKPGSYTVNDTDTIAAMEPTDLYKYLGYKQLKGLDHTAIKQTLNTEYRRRTNAVCKTQLSGKHLIKALNTFAIPILTYSFGVIKWSKTDIEQLERTTRTILSKHHNLHPKSAIERLTIKRQSGGRGLIDIHHLWQKQITRLKTFFYSKSRTSDIHKAICLNDLNYTPLNLNEQNIHTNNSDPQNQKIENWKKKVLHGRHPHDLEQSHINIVASNKWLMIGNLFPETEGFIIAIQDQIINTKNYRKFIIKDPTTTNDKCRRCHIQSETIQHITGACTTLTQTDYTHRHNQVANIIHQKLALKHSLIQNFNTPYYKYTPQTILENETHKMYYDRAILTDRTIHYNRPDITLQDKIRKITYLIDIAVPNTHNLQKTITEKISKYADLKEEVTRIWRQEKVYVIPIALSTTGVIPNHLLRSLKLIDLEESVYITLQKAAILNTCRIVRKFMQLEEENTPSS

SEQ ID NO: 20913 - protein, 1308 aa, Agrochola circellaris
METRSKRKRIGPLPGGDRRGAPGADAGCLSMRTVSGEELNRRTPTDKDATAEADDGDRLTNRTDTPVEPYSPSTVSYAPSRTSSPSIPSSPIPSSPPIISFNTVSPTPALNVAREVSTFLPASTKAGKARVRMKWSKEVNLFIMRTYLHITKVETDMTTYRQQLHERFSLQYPEISVSEQRISDQRRTIVRNKLLSQVELDQLKEEVRTQLRQELENHADTNTITLTQNTNENILQEQPQSLTQLYPNSQPLTYNQSQAYTQTAHTSTQTESLTLTLENDIETLVVADQNLTTDTYIQEIHDKFRTTITQYSGMDPAIRPKLPKLKYTRNLFRLVNLFNENILIQFISDDTQLIDIHLLIYCTAVVISEELNFKITNHTGNTRTSHIVKPAWQQRLEKDIEKLRADCGRLTQYINGIRSNKVVKRVETIFKNYSNHTRHESNNRKPEEFLDTLKQKLALKVHRLRRYMKAQQRKNDNATFAMNEKVFYRNIQKTHNDTTIENNTDTPSKEHLETFWSSIWEEQVQHNDKATWITEEETKWRLIDEMEFKEITEPDITNITAKLHNWKSPGIDKIHNFWYKKLTTLHKSIAKNLTAIILGQQNIPEFIATGITYMLPKTTYTTQPSQYRPITCLPTIYKILTSVITTKINSHIEHHSIIAEEQKGCRRGHMGCKEQLIIDSTIHKHATTKNRNLHCTYIDYQKAFDSIPHSWLIKILEIYKINSKIIDFLRIIMPHWKTTLQLNNRHTSLITRQISIRKGIYQGDSLSPLWFCLALNPLSHLLRHCQAGYNLKHNTEDTVISHLIYMDDIKLYAKTEKDMKKLIEVTTEFSQDINMKFGLDKCKTLHIIRGKIKPGSYTVNDTDTIAAMEPTDLYKYLGYKQLKGLDHTAIKQTLNTEYRRRTNAVCKTQLSGKHLIKALNTFAIPILTYSFGVIKWSKTDIEQLERTTRTILSKHHNLHPKSAIERLTIKRQSGGRGLIDIHHLWQKQITRLKTFFYSKSHTSDIHKAICLNDLNYTPLNLNEQNIHTNNSDPQNQKIENWKKKVLHGRHPHDLEQSHINIVASNKWLMIGNLFPETEGFMIAIQDQIINTKNYRKFIIKDPTTTNDKCRRCHIQSETIQHITGACTTLTQTDYTHRHNQVANIIHQKLALKHSLIQNSNTPYYKYTPQTILENETHKMYYDRAILTDRTIHYNRPDITLQDKIRKITYLIDIAVPNTHNLQKTITEKISKYADLKEEVTRIWRQEKVYVIPIVLSTTGVIPNHLLRSLKLIDLEESVYINLQKAAILNTCRIVRKFMQLDEENTPLS

SEQ ID NO: 20914 - protein, 1308 aa, Agrochola circellaris
METRSKRKRIGPLPGGDRRGAPGADAGCLSMRTVSGEELNRRAPTDKDATAEADDGDRLTNRTDTPVEPYSPSTVSYAPSRTSSPSMPSSPIPSSPPITSFNTVSPTPALNVAREVSTFLPASTKAGKARVRMKWSKEVNLFIMRTYLHITKVETDMTTYRQQLHERFSLQYPEISVSEQRISDQRRTIVRNKLLSQVELDQLKEEVRTQLRQESEHHADTNTITLTQNINENILQEQPQSLTQLYPSSQPLTYNQSQAYTQTAHSSTQTESLTLTLENDIETLVVADQNLTTDTYIQEIHDKFRTTITQYSGMDPAARPKLPKLKYTRNLFRLVNLFNENILIQFISDDTQLIDINLLIYCTAVVISEELNFKITNHTGNTRTSHIVKPAWQQRLEKDIEKLRADCGRLTQYINGIRSNKVVKRVETIFKNYSNHTRHESSNRKPEEFLDTLKQKLALKVHRLRRYMKAQQRKNDNATFAMNEKLFYRNIQKTHNDTTIENNTDTPSKEHLETFWSSIWEEQVQHNDKATWITEEETKWRLIDEMEFKEITEPDITNITAKLHNWKSPGIDKIQNFWYKKLTTLHKSIAKNLTAIILGQQNIPEFIATGITYMLPKTTYTTQPSQYRPITCLPTIYKILTSVITTKINSHIEHHSIIAEEQKGCRRGHMGCKEQLIIDSTIHKHATTKNRNLHCTYIDYQKAFDSIPHSWLIKILEIYKINSKIIDFLRIIMPHWKTTLQLNNRHTSLITRQISIRKGIYQGDSLSPLWFCLALNPLSHLLRHCQAGYNFKHNTEDTVISHLIYMDDIKLYAKTEKDMKKLIEVTTEFSQDINMKFGLDKCKTLHIIRGKIKPGSYTVNDTDTIAAMEPTDLYKYLGYKQLKGLDHTAIKQTLHTEYRRRTNAVCKTQLSGKHLIKALNTFAIPILTYSFGVIKWSKTDIEQLERTTRTILSKHHNLHPKSAIERLTIKRQSGGRGLIDIHHLWQKQITRLKTFFYSKSHTSDIHKAICLNDLNYTPLNLNEQNIHTNISDPQNQKIENWKKKVLHGRHPHDLEQSHINIMASNKWLMIGNLFPETEGFMIAIQDQIINTKNYRKFIIKDPTTTNDKCRRCHIQSETIQHITGACTTLTQTDYTHRHNQVANIIHQKLALKHSLIQNFNTPYYKYTPQTILENETHKMYYDRAILTDRTIHYNRPDITLQDKIRKITYLIDIAVPNTHNLQKTITEKISKYADLKEEVTRIWRQEKVYVIPIVLSTTGVIPNHLLRSLKLIDLEESVYINLQKAAILNTCRIVRKFMQLEEENTPSS

SEQ ID NO: 20915 - protein, 1308 aa, Agrochola circellaris
METRSKRKRIGPLPGGDRRGAPGADAGCLSMRTVSGEELNRRAPTDKDATAEADDGDRLTNRTDTPVEPYSPSTVSYAPSRTSSPSIPSSPIPSSPLITSFNTVSPTPALNVAREVSTFLPASTKAGKARVRMKWSKEVNLFIMRTYLHITKVETDMTTYRQQLHERFSLQYPEISVSEQRISDQRRTIVRNKLLSQVELDQLKEEVRTQLRQESENHADTNTITLTQNTNENILQEQPQSLTQLYPNSQPLTYNQSQAYTQTAHTSTQTESLTLTLENDIETLVVADQNLTTDTYIQEIHDKFRTTITQYSGMDAAARPKLPKLKYTRNLFRLVNLFNENILIQFISDDTQLIDINLLIYCTAVVISEELNFKITNHTGNTRTSHIVKPAWQQRLEKDIEKLRADCGRLTQYINGIRSNKVVKRVETIFKNYSNHTRHESNNRKPEEFLDTLKQKLALKVHRLRRYMKAQQRKNDNATFAMNEKVFYRNIQKTHNDTTIENNTDTPSKEHLETFWSSIWEEQVQHNDKATWITEEVTKWGLIDEMEFEEITEPDITNITAKLHNWKSPGIDKIQNFWYKKLTTLHKSIAKNLTAIILGQQNIPEFIATGITYMLPKTTYTTQPSQYRPITCLPTIYKILTSVITTKINSHIEHHNIIAEEQKGCRRGHMGCKEQLIIDSTIHKHATTKNRNLHCTYIDYQKAFDSIPHSWLIKILEIYKINSKIIDFLRIIMPHWKTTLQLNNRHTSLITRQISIRKGIYQGDSLSPLWFCLALNPLSHLLRHCQAGYNFKHNTEDTVISHLIYMDDIKLYAKTEKDMKKLIEVTTEFSQDINMKFGLDKCKTLHIIRGKIKPGSYAVNDTDTIAAMEPTDLYKYLGYKQLKGLDHTAIKQTLNTEYRRRTNAVCKTQLSGKHLIKALNTFAIPILTYSFGVIKWSKTDIEQLERTTRTILSKHHNLHPKSAIERLTIKRQSGGRGLIDIHHLWQKQITRLKTFFYSKSRTSDIHKAICLNDLNYTPLNLNEQNIHTNNSDPQNQKIENWKKKVLHGRHPHDLEQSHINIVASNKWLMIGNLFPETEGFMIAIQDQIINTKNYRKFIIKDPTTTNDKCRRCHIQSETIQHITGACTTLTQTDYTHRHNQVANIIHQKLALKHSLIQNFNTPYYKYTPQTILENETHKMYYDRAILTDRTIHYNRPDITLQDKIRKITYLIDIAVPNTHNLQKTITEKISKYADLKEEVTRIWRQEKVYVIPIVLSTTGVIPNHLLRSLKLIDLEESVYITLQKAAILNTCRIVRKFMQLEEENTPSS

SEQ ID NO: 20916 - protein, 1308 aa, Agrochola circellaris
METRSKRKRIGPLPGGDRRGAPGADAGCLSMRTVSGEELNRRAPTDKDATAEADDGDRLTNRTDTPVEPYSPSTVSYAPSRTSSPSMPSSPIPSSPPITSFNTVSPTPALNVAREVSTFLPASTKAGKARVRMKWSKEVNLFIMRTYLHITKVETDMTTYRQQLHERFSLQYPDISVSEQRISDQRRTIVRNKLLSQVELDQLKEEVRTQLRQESEHHADTNTITLTQNINENILQEQPQSLTQLYPSSQPLTYNQSQAYTQTAHTSTQTESLTLTLENDIETLVVADQNLTTDTYIQEIHDKFRTTITQYSGMDPAARPKLPKLKYTRNLFRLINLFNENILIQFISDDTQLIDINLLIYCTAVVISEELNFKITNHTGNTRTSHIVKPAWQQRLEKDIEKLRADCGRLTQYINGIRSNKVVKRVETIFKNYSNHTRHESSNRKPEEFLDTLKQKLALKVHRLRRYMKAQQRKNDNATFAMNEKLFYRNIQKTHNDTTIENNTDTPSKEHLETFWSSIWEEQVQHNDKATWITEEETKWRLIDEMEFKEITEPDITNITAKLHNWKSPGIDKIQNFWYKKLTTLHKSIAKNLTAIILGQQNIPEFIATGITYMLPKTTYTTQPSQYRPITCLPTIYKILTSVITTKISSHIEHHSIIAEEQKGCRRGHMGCKEQLIIDSTIHKHATTKNRNLHCTYIDYQKAFDSIPHSWLIKILEIYKINSKIIDFLRIIMPHWKTTLQLNNRHTSLITRQISIRKGIYQGDSLSPLWFCLALNPLSHLLRHCQAGYNFKHNTEDTVISHLIYMDDIKLYAKTEKDMKKLIEVTTEFSQDINMKFGLDKCKTLHIIRGKIKPGSYTVNDTDTIAAMEPTDLYKYLGYKQLKGLDHTAIKQTLNTEYRRRTNAVCKTQLSGKHLIKALNTFAIPILTYSFGVIKWSKTDIEQLERTTRTILSKHHNLHPKSAIERLTIKRQSGGRGLIDIHHLWQKQITRLKTFFYSKSHTSDIHKAICLNDLNYTPLNLNEQNIHTNNSDPQNQKIENWKKKVLHGRHPHDLEQSHINIMASNKWLMIGNLFPETEGFMIAIQDQIINTKNYRKFIIKDPTTTNDKCRRCHIQSETIQHITGACTTLTQTDYTHRHNQVANIIHQKLALKHSLIQNFNTPYYKYTPQTILENETHKMYYDRAILTDRTIHYNRPDITLQDKIRKITYLIDIAVPNTHNLQKTITEKISKYADLKEEVTRIWRQEKVYVIPIVLSTTGVIPNHLLRSLKLIDLEESVYINLQKAAILNTCRIVRKFMQLEEENTPSS

SEQ ID NO: 20917 - protein, 1308 aa, Agrochola circellaris
METRSKRKRIGPLPGGDRRGAPGADAGCLSMRTVSGEELNRRAPTDKDATAEADDGDRLTNRTDTPVEPYSPSTVSYAPSRTSSPSMPSSPIPSSPPITSFNTVSPTPALNVAREVSTFLPASTKAGKARVRMKWSKEVNLFIMRTYLHITKVETDMTTYRQQLHERFSLQYPEISVSEQRISDQRRTIVRNKLLSQVELDQLKEEVRTQLRQESEHHADTNTITLTQNINENILQEQPQSLTQLYPSSQPLTYNQSQAYTQTAHSSTQTESLTLTLENDIETLVVADQNLTTDTYIQEIHDKFRTTITQYSGMDPAARPKLPKLKYTRNLFRLVNLFNENILIQFISDDTQLIDINLLIYCTAVVISEELNFKITNHTGNTRTSHIVKPAWQQRLEKDIEKLRADCGRLTQYINGIRSNKVVKRVETIFKNYSNHTRHESSNRKPEEFLDTLKQKLALKVHRLRRYMKAQQRKNDNATFAMNEKLFYRNIQKTHNDTTIENNTDTPSKEHLETFWSSIWEEQVQHNDKATWITEEETKWRLIDEMEFKEITEPDITNITAKLHNWKSPGIDKIQNFWYKKLTTLHKSIAKNLTAIILGQQNIPEFIATGITYMLPKTTYTTQPSQYRPITCLPTIYKILTSVITTKINSHIEHHSIIAEEQKGCRRGHMGCKEQLIIDSTIHKHATTKNRNLHCTYIDYQKAFDSIPHSWLIKILEIYKINSKIIDFLRIIMPHWKTTLQLNNRHTSLITRQISIRKGIYQGDSLSPLWFCLALNPLSHLLRHCQAGYNFKHNTEDTVISHLIYMDDIKLYAKTEKDMKKLIEVTTEFSQDINMKFGLDKCKTLHIIRGKIKPGSYTVNDTDTIAAMEPTDLYKYLGYKQLKGLDHTAIKQTLHTEYRRRTNAVCKTQLSGKHLIKALNTFAIPILTYSFGVIKWSKTDIEQLERTTRTILSKHHNLHPKSAIERLTIKRQSGGRGLIDIHHLWQKQITRLKTFFYSKSHTSDIHKAICLNDLNYTPLNLNEQNIHTNNSDPQNQKIENWKKKVLHGRHPHDLEQSHINIMASNKWLMIGNLFPETEGFMIAIQDQIINTKNYRKFIIKDPTTTNDKCRRCHIQSETIQHITGACTTLTQTDYTHRHNQVANIIHQKLALKHSLIQNFNTPYYKYTPQTILENETHKMYYDRAILTDRTIHYNRPDITLQDKIRKITYLIDIAVPNTHNLQKTITEKISKYADLKEEVTRIWRQEKVYVIPIVLSTTGVIPNHLLRSLKLIDLEESVYITLQKAAILNTCRIVRKFMQLEEENTPSS

SEQ ID NO: 20918 - protein, 995 aa, Agrochola circellaris
MDPAARPKLPKLKYTRNLFRLVNLFNENILIQFISDDTQLIDINLLIYCTAVVISEELNFKITNHTGNTRTSHIVKPAWQQRLEKDIEKLRADCGRLTQYINGIRSNKVVKRVETIFKNYSNHTRHESSNRKPEEFLDTLKQKLALKVHRLRRYMKAQQRKNDNATFAMNEKLFYRNIQKTHNDTTIENNTDTPSKEHLETFWSSIWEEQVQHNDKATWITEEETKWRLIDEMEFKEITEPDITNITAKLHNWKSPGIDKIQNFWYKKLTTLHKSIAKNLTAIILGQQNIPEFIATGITYMLPKTTYTTQPSQYRPITCLPTIYKILTSVITTKINSHIEHHSIIAEEQKGCRRGHMGCKEQLIIDSTIHKHATTKNRNLHCTYIDYQKAFDSIPHSWLIKILEIYKINSKIIDFLRIIMPHWKTTLQLNNRHTSLITRQISIRKGIYQGDSLSPLWFCLALNPLSHLLRHCQAGYNFKHNTEDTVISHLIYMDDIKLYAKTEKDMKKLIEVTTEFSQDINMKFGLDKCKTLHIIRGKINPGSYTVNDTDTIAAMEPTDLYKYLGYKQLKGLDHTAIKQTLNTEYRRRTNAVCKTQLSGKHLIKALNTFAIPILTYSFGVIKWSKTDIEQLERTTRTILSKHHNLHPKSAIERLTIKRQSGGRGLIDIHHLWQKQITRLKTFFYSKSHTSDIHKAICLNDLNYTPLNLNEQNIHTNNSDPQNQKIENWKKKVLHGRHPHDLEQSHINIMASNKWLMIGNLFPETEGFMIAIQDQIINTKNYRKFIIKDPTTTNDKCRRCHIQSETIQHITGACTTLTQTDYTHRHNQVANIIHQKLALKHSLIQNFNTPYYKYTPQTILENETHKMYYDRAILTDRTIHYNRPDITLQDKIRKITYLIDIAVPNTHNLQKTITEKISKYADLKEEVTRIWRQEKVYVIPIVLSTTGVIPNHLLRSLKLIDLEESVYINLQKAAILNTCRIVRKFMQLEEENTPSS

SEQ ID NO: 20919 - protein, 1308 aa, Agrochola circellaris
METRSKRKRIGPLPGGDRRGAPGADAGCLSMRTVSGEELNRRTPTDKDATAEADDGDRLTNRTDTPVEPYSPSTVSYAPSRTSSPSIPSSPIPSSPPIISFNTVSPTPALNVAREVSTFLPASTKAGKARVRMKWSKEVNLFIMRTYLHITKVETDMTTYRQQLHERFSLQYPEISVSEQRISDQRRTIVRNKLLSQVELDQLKEEVRTQLRQESENHADTNTITLTQNTNENILQEQPQSITQLYPNSQPLTYNQSQAYTQTAHTSTQTESLTLTLENDIETLVVADQNLTTDTYIQEIHDKFRTTITQYSGMDPAIRPKLPKLKYTRNLFRLVNLFNENILIQFISDDTQLIDIHLLIYCTAVVISEELNFKITNHTGNTRTSHIVKPAWQQRLEKDIEKLRADCGRLTQYINGIRSNKVVKRAETIFKNYSNHTRHESNNRKPEEFLDTLKQKLALKVHRLRRYMKAQQRKNDNATFAMNEKVFYRNIQKTHNDTTIENNTDTPSKEHLETFWSSIWEEQVQHNDKATWITEEETKWRLIDEMEFKEITEPDITNITAKLHNWKSPGIDKIQNFWYKKLTTLHKSIAKNLTAIILGQQNIPEFIATGITYMLPKTTYTTQPSQYRPITCLPTIYKILTSVITTKINSHIEHHSIIAEEQKGCRRGHMGCKEQLIIDSTIHKHATTKNRNLHCTYIDYQKAFDSIPHSWLIKILEIYKINSKIIDFLRIIMPHWKTTLQLNNRHTSLITRQISIRKGIYQGDSLSPLWFCLALNPLSHLLRHCQAGYNLKHNTEDTVISHLIYMDDIKLYAKTEKDMKKLIEVTTEFSQDINMKFGLDKCKTLHIIRGKIKPGSYTVNDTDTIAAMEPTDLYKYLGYKQLKGLDHTAIKQTLNTEYRRRTNAVCKTQLSGKHLIKALNTFAIPILTYSFGVIKWSKTDIEQLERTTRTILSKHHNLHPKSAIERLTIKRQSGGRGLIDIHHLWQKQITRLKTFFYSKSHTSDIHKAICLNDLNYTPLNLNEQNIHTNNSDPQNQKIENWKKKVLHGRHPHDLEQSHINIVASNKWLMIGNLFPETEGFMIAIQDQIINTKNYRKFIIKDPTTTNDKCRRCHIQSETIQHITGACTTLTQTDYTHRHNQVANIIHQKLALKHSLIQNSNTPYYKYTPQTILENETHKMYYDRAILTDRTIHYNRPDITLQDKIRKITYLIDIAVPNTHNLQKTITEKISKYADLKEEVTRIWRQEKVYVIPIVLSTTGVIPNHLLRSLKLIDLEESVYINLQKAAILNTCRIVRKFMQLEEENTPSS

SEQ ID NO: 20920 - protein, 1181 aa, Pholisora mejicanus
MRTYYYITKLETDLTAYRQQLHEHFSRQYPEIKVTEQRIADQRRTIVKNNRLSQETLNQLKDEVKLQLEEDDERNKYINASIPVDHRIDDVQVNSTHAYSILQKPSQSAIITHQPSKNNQLLHNTDTQTHSVTLTHENNIGLSEDYILHTTIYPQSTNAQEQELYEKFRTVLTQYSEMDPVVRPKLPKLRYSPKLFQLINIFNHKILSKVVSEDIQLTYIHTIIYCTALTISQELNYKITDCTQNVTPKGHDKPAWQIRLEKDIEKLRVECGRLTQYIKGNRSNKVIKYVQIIFKTRIIHTTHENNNRKPEEYLDTLKQKLALKVNRLKRYKKAQKRRNDNAIFSTNEKIFYRNLQKPQTVIENEPDIPTEEQLETFWSCIWEEKLQHNEKADWIREEETKWSTIEEMEFTQITETDITNITHRLHNWKSPGVDKIHNFWYKKLYTLHKPISKNLTDILLGRQSIPDFLATGITYMLPKSKYTSHPSQYRPITCLPTIYKILTSAITLKINKHIEQHDILAEEQKGCRRGHMGCKEQLIIDSTIHKHATSRHRNLHCTYIDYKKAFDSIPHSWLIKILHIYKINPKVIHFLQNIMKQWNTTLHLTTQNKSIKTRQIFIRKGIYQGDSLSPLWFCLALNPLSHLLHQCQVGYSLKRDTTDTIISHLVYMDDIKLYSKTEIGMKKLLDTTAQFSKDINMEFGLDKCKILHIKRGKILPGDYAINDTQTITAMEPTDLYKYLGYNQLKGLDHTTIKETLTTEYKKRINTLCKTQLSGKNLIKSLNTYAIPILTYSFGIIKWTITDIEKLERIARTTLTKHNKLHPKSAIERLTIKRQDGGRGLIDMCQLWRNQISKLKSFFYTKGQTTDIHKAIIQNDNNYTPLNLLLHKQTLTQYPQGNNIKAQKEKIEHWKKKVLHGRHPQDLAQPHIDTLASNKWLQIGNLFPETEGFMIAIQDQIINTKNYRKHIMKDPSLTNDKCRKCHAHSETIQHITGACITLTQTDYTHRHNQVTNIIHQKLALKHKLMNNSNTPYYNYTPQTILENKTHKLYYDRAILTDKTIHYNRPDIILQDKINRVTFLIDIAVPNTHNLQKTIIEKVTKYTELKEEVTRIWRQEKVYIVPIILSSTGVIPNYLRNSLKLLDLKENTYIILQKAVILNTCRIVRKFMQIDDREINTHHITPS

SEQ ID NO: 20921 - protein, 841 aa, Agrochola circellaris
MKAQQRKNDNATFAMNEKLFYRNIQKTHNDTTIENNTDTPSKEHLETFWSSIWEEQVQHNDKATWITEEETKWRLIDEMEFKEITEPDITNITAKLHNWKSPGIDKIQNFWYKKLTTLHKSIAKNLTAIILGQQNIPEFIATGITYMLPKTTYTTQPSQYRPITCLPTIYKILTSVITTKINSHIEHHNIIAEEQKGCRRGHMGCKEQLIIDSTIHKHATTKNRNLHCTYIDYQKAFDSIPHSWLIKILEIYKINSKIIDFLRMIMPHWKTTLQLNNRHTSLITRQISIRKGIYQGDSLSPLWFCLALNPLSHLLRHCQAGYNFKHNTEDTVISHLIYMDDIKLYAKTEKDMKKLIEVTTEFSQDINMKFGLDKCKTLHILRGKIKPGSYTVNDTDTIAAMEPTDLYKYLGYKQLKGLDHTAIKQTLNTEYRRRTNAVCKTQLSGKHLIKALNTFAIPILTYSFGVIKWSKTDIEQLERTTRTILSKHHNLHPKSAIERLTIKRQSGGRGLIDIHHLWQKQITRLKTFFYSKSRTSDIHKAVCLNDLNYTPLNLNEQNIHTNNSDPQNQKIENWKKKVLHGRHPHDLEQSHINIVASNKWLTIGNLFPETEGFMIAIQDQIINTKNYRKFIIKDSTTTNDKCRRCHIQSETIQHITGACTTLTQTDYTHRHNQVANIIHQKLALKHSLIQNSNTPYYKYTPQTILENETHKMYYDRAILTDRTIHYNRPDITLQDKTRKITYLIDIAVPNTHNLQKTITEKISKYADLKEEVTRIWRQEKVYVIPIVLSTTGVIPNHLLRSLKLIDLEESVYINLQKAAILNTCRIVRKFMQLEEENTPSS

SEQ ID NO: 20922 - protein, 1308 aa, Agrochola circellaris
METRSKRKRIGPLPGGDRRGAPGADAGCLSMRTVSGEELNRRAPTDKDATAEADDGDRLTNRTDTPVEPYSPSTVSYAPSRTSSPSIPSSPIPSSPLITSFNTVSPTPALNVAREVSTFLPASTKAGKARVRMKWSKEVNLFIMRTYLHITKVETDMTTYRQQLHERFSLQYPEISVSEQRISDQRRTIVRNKLLSQVELDQLKEEVRTQLRQESENHADTNTITLTQNTNENILQEQPQSLTQLYPNSQPLTYNQSQAYTQTAHTSTQTESLTLTLENDIETLVVADQNLTTDTYIQEIHDKFRTTITQYSGMDAAARPKLPKLKYTRNLFRLVNLFNENILIQFISDDTQLIDINLLIYCTAVVISEELNFKITNHTGNTRTSHIVKPAWQQRLEKDIEKLRADCGRLTQYINGIRSNKVVKRVETIFKNYSNHTRHESNNRKPEEFLDTLKQKLALKVHRLRRYMKAQQRKNDNATFAMNEKVFYRNIQKTHNDTTIENNTDTPSKEHLETFWSSIWEEQVQHNDKATWITEEETKWGLIDEMEFKEITEPDITNITAKLHNWKSPGIDKIQNFWYKKLTTLHKSIAKNLTAIILGQQNIPEFIATGITYMLPKTTYTTQPSQYRPITCLPTIYKILTSVITTKINSHIEHHNIIAEEQKGCRRGHMGCKEQLIIDSTIHKHATTKNRNLHCTYIDYQKAFDSIPHSWLIKILEIYKINSKIIDFLRIIMPHWKTTLQLNNRHTSLITRQISIRKGIYQGDSLSPLWFCLALNPLSHLLRHCQAGYNFKHNTEDTVISHLIYMDDIKLYAKTEKDMKKLIEVTTEFSQDINMKFGLDKCKTLHIIRGKIKPGSYTVNDTDTIAAMEPTDLYKYLGYKQLKGLDHTAIKQTLNTEYRRRTNAVCKTQLSGKHLIKALNTFAIPILTYSFGVIKWSKTDIEQLERTTRTILSKHHNLHPKSAIERLTIKRQSGGRGLIDIHHLWQKQITRLKTFFYSKSRTSDIHKAICLNDLNYTPLNLNEQNIHTNNSDPQNQKIENWKKKVLHGRHPHDLEQSHINIVASNKWLMIGNLFPETEGFMIAIQDQIINTKNYRKFIIKDPTTTNDKCRRCHIQSETIQHITGACTTLTQTDYTHRHNQVANIIHQKLALKHSLIQNFNTPYYKYTPQTILENETHKMYYDRAILTDRTIHYNRPDITLQDKIRKITYLIDIAVPNTHNLQKTITEKISKYADLKEEVTRIWRQEKVYVIPIVLSTTGVIPNHLLRSLKLIDLEESVYITLQKAAILNTCRIVRKFMQLEEENTPSS

SEQ ID NO: 20923 - protein, 1308 aa, Agrochola circellaris
METRSKRKRIGPLPGGDRRGAPGADAGCLSMRTVSGEELNRRAPTDKDATAEADDGDRLTNRTDTPVEPYSPSTVSYAPSRTSSPSMPSSPIPSSPPITSFNTVSPTPALNVAREVSTFLPASTKAGKARVRMKWSKEVNLFIMRTYLHITKVETDMTTYRQQLHERFSLQYPEISVSEQRISDQRRTIVRNKLLSQVELDQLKEEVRTQLRQESEHHADTNTITLTQNINENILQEQPQSLTQLYPSSQPLTYNQSQAYTQTAHTSTQTESLTLTLENDIETLVVADQNLTTDTYIQEIHDKFRTTITQYSGMDPAARPKLPKLKYTRNLFRLVNLFNENILIQFISDDTQLIDINLLIYCTAVVISEELNFKITNHTGNTRTSHIVKPAWQQRLEKDIEKLRADCGRLTQYINGIRSNKVVKRVETIFKNYSNHTRHESSNRKPEEFLDTLKQKLALKVHRLRRYMKAQQRKNDNATFAMNEKLFYRNIQKTHNDTTIENNTDTPSKEHLETFWSSIWEEQVQHNDKATWITEEETKWRLIDEMEFKEITEPDITNITAKLHNWKSPGIDKIQNFWYKKLTTLHKSIAKNLTAIILGQQNIPEFIATGITYMLPKTTYTTQPSQYRPITCLPTIYKILTSVITTKINSHIEHHSIIAEEQKGCRRGHMGCKEQLIIDSTIHKHATTKNRNLHCTYIDYQKAFDSIPHSWLIKILEIYKINSKIIDFLRIIMPHWKTTLQLNNRHTSLITRQISIRKGIYQGDSLSPLWFCLALNPLSHLLRHCQAGYNFKHNTEDTVISHLIYMDDIKLYAKTEKDMKKLIEVTTEFSQDINMKFGLDKCKTLHIIRGKIKPGSYTVNDTDTIAAMEPTDLYKYLGYKQLKGLDHTAIKQTLNTEYRRRTNAVCKTQLSGKHLIKALNTFAIPILTYSFGVIKWSKTDIEQLERTTRTILSKHHNLHPKSAIERLTIKRQSGGRGLIDIHHLWQKQITRLKTFFYSKSHTSDIHKAICLNDLNYTPLNLNEQNIHTNNSDPQNQKIENWKKKVLHGRHPHDLEQSHINIMASNKWLMIGNLFPETEGFMIAIQDQIINTKNYRKFIIKDPTTTNDKCRRCHIQSESIQHITGACTTLTQTDYTHRHNQVANIIHQKLALKHSLIQNFNTPYYKYTPQTILENETHKMYYDRAILTDRTIHYNRPDITLQDKIRKITYLIDIAVPNTHNLQKTITEKISKYADLKEEVTRIWRQEKVYVIPIVLSTTGVIPNHLLHSLKLIDLEESVYINLQKAAILNTCRIVRKFMQLEEENTPSS

SEQ ID NO: 20924 - protein, 1308 aa, Agrochola circellaris
METRSKRKRIGPLPGGDRRGAPGADAGCLSMRTVSGEELNRRAPTDKDATAEADDGDRLTNRTDTPVEPYSPSTVSYAPSRTSSPSMPSSPIPSSPPITSFNTVSPTPALNVAREVSTFLPASTKAGKARVRMKWSKEVNLFIMRTYLHITKVETDMTTYRQQLHERFSLQYPEISVSEQRISDQRRTIVRNKLLSQVELDQLKEEVRTQLRQESEHHADTNTITLTQNINENILQEQPQSLTQLYPSSQPLTYNQSQAYTQTAHSSTQTESLTLTLENDIETLVVADQNLTTDTYIQEIHDKFRTTITQYSGMDPAARPKLPKLKYTRNLFRLVNLFNENILIQFISDDTQLIDINLLIYCTAVVISEELNFKITNHTGNTRTSHIVKPAWQQRLEKDIEKLRADCGRLTQYINGIRSNKVVKRVETIFKNYSNHTRHESSNRKPEEFLDTLKQKLALKVHRLRRYMKAQQRKNDNATFAMNEKLFYRNIQKTHNDTTIENNTDTPSKEHLETFWSSIWEEQVQHNDKATWITEEETKWRLIDEMEFKEITEPDITNITAKLHNWKSPGIDKIQNFWYKKLTTLHKSIAKNLTAIILGQQNIPEFIATGITYMLPKTTYTTQPSQYRPITCLPTIYKILTSVITTKINSHIEHHSIIAEEQKGCRRGHMGCKEQLIIDSTIHKHATTKNRNLHCTYIDYQKAFDSIPHSWLIKILEIYKINSKIIDFLRIIMPHWKTTLQLNNRHTSLITRQISIRKGIYQGDSLSPLWFCLALNPLSHLLRHCQAGYNFKHNTEDTVISHLIYMDDIKLYAKTEKDMKKLIEVTTEFSQDINMKFGLDKCKTLHIIRGKIKPGSYTVNDTDTIAAMEPTDLYKYLGYKQLKGLDHTAIKQTLHTEYRRRTNAVCKTQLSGKHLIKALNTFAIPILTYSFGVIKWSKTDIEQLERTTRTILSKHHNLHPKSAIERLTIKRQSGGRGLIDIHHLWQKQITRLKTFFYSKSHTSDIHKAICLNDLNYTPLNLNEQNIHTNNSDPQNQKIENWKKKVLHGRHPHDLEQSHINIMASNKWLMIGNLFPETEGFMIAIQDQIINTKNYRKFIIKDPTTTNDKCRRCHIQSETIQHITGACTTLTQTDYTHRHNQVANIIHQKLALKHSLIQNFNTPYYKYTPQTILENETHKMYYDRAILTDRTIHYNRPDITLQDKIRKITYLIDIAVPNTHNLQKTITEKISKYADLKEEVTRIWRQEKVYVIPIVLSTTGVIPNHLLRSLKLIDLEESVYINLQKAAILNTCRIVRKFMQLEEENTPSS

SEQ ID NO: 20925 - protein, 1308 aa, Agrochola circellaris
METRSKRKRIGPLPGGDRRGAPGADAGCLSMRTVSGEELNRRAPTDKDATAEADDGDRLTNRTDTPVEPYSPSTVSYAPSRTSSPSMPSSPIPSSPPITSFNTVSPTPALNVAREVSTFLPASTKAGKARVRMKWSKEVNLFIMRTYLHITKVETDMTTYRQQLHERFSLQYPEISVSEQRISDQRRTIVRNKLLSQVELDQLKEEVRTQLRQESEHHADTNTITLTQNINENILQEQPQSLTQLYPSSQPLTYNQSQAYTQTAHTSTQTESLTLTLENDIETLVVADQNLTTDTYIQEIHDKFRTTITQYSGMDPAARPKLPKLKYTRNLFRLVNLFNENILIQFISDDTQLIDINLLIYCTAVVISEELNFKITNHTGNTRTSHIVKPAWQQRLEKDIEKLRADCGRLTQYINGIRSNKVVKRVETIFKNYSNHTRHESSNRKPEEFLDTLKQKLALKVHRLRRYMKAQQRKNDNATFAMNEKLFYRNIQKTHNDTTIENNTDTPSKEHLETFWSSIWEEQVQHNDKATWITEEETKWRLIDEMEFKEITEPDITNITAKLHNWKSPGIDKIQNFWYKKLTTLHKSIAKNLTAIILGQQNIPEFIATGITYMLPKTTYTTQPSQYRPITCLPTIYKILTSVITTKINSHIEHHSIIAEEQKGCRRGHMGCKEQLIIDSTIHKHATTKNRNLHCTYIDYQKAFDSIPHSWLIKILEIYKINSKIIDFLRIIMPHWKTTLQLNNRHTSLITRQISIRKGIYQGDSLSPLWFCLALNPLSHLLRHCQAGYNFKHNTEDTVISHLIYMDDIKLYAKTEKDMKKLIEVTTEFSQDINMKFGLDKCKTLHIIRGKIKPGSYTVNDTDTIAAMEPTDLYKYLGYKQLKGLDHTAIKQTLHTEYRRRTNAVCKTQLSGKHLIKALNTFAIPILTYSFGVIKWSKTDIEQLERTTRTILSKHHNLHPKSAIERLTIKRQSGGRGLIDIHHLWQKQITRLKTFFYSKSHTSDIHKAICLNDLNYTPLNLNEQNIHTNNSDPQNQKIENWKKKVLHGRHPHDLEQSHINIMASNKWLMIGNLFPETEGFMIAIQDQIINTKNYRKFIIKDPTTTNDKCRRCHIQSETIQHITGACTTLTQTDYTHRHNQVANIIHQKLALKHSLIQNFNTPYYKYTPQTILENETHKMYYDRAILTDRTIHYNRPDITLQDKIRKITYLIDIAVPNTHNLQKTITEKISKYADLKEEVTRIWRQEKVYVIPIVLSTTGVIPNHLLRSLKLIDLEESVYINLQKAAILNTCRIVRKFMQLEEENTPSS

SEQ ID NO: 20926 - protein, 1308 aa, Agrochola circellaris
METRSKRKRIGPLPGGDRRGAPGADAGCLSMRTVSGEELNRRAPTDKDATAEADDGDRLTNRTDTPVEPYSPSTVSYAPSRTSSPSMPSSPIPSSPPITSFNTVSPTPALNVAREVSTFLPASTKAGKARVRMKWSKEVNLFIMRTYLHITKVETDMTTYRQQLHERFSLQYPEISVSEQRISDQRRTIVRNKLLSQVELDQLKEEVRTQLRQESEHHADTNTITLTQNINENILQEQPQSLTQLYPSSQPLTYNQSQAYTQTAHSSTQTESLTLTLENDIETLVVADQNLTTDTYIQEIHDKFRTTITQYSGMDPAARPKLPKLKYTRNLFRLVNLFNENILIQFISDDTQLIDINLLIYCTAIVISEELNFKITNHTGNTRTSHIVKPAWQQRLEKDIEKLRADCGRLTQYINGIRSNKVVKRVETIFKNYSNHTRHESSNRKPEEFLDTLKQKLALKVHRLRRYMKAQQRKNDNATFAMNEKLFYRNIQKTHNDTTIENNTDTPSKEHLETFWSSIWEEQVQHNDKATWITEEETKWRLIDEMEFKEITEPDITNITAKLHNWKSPGIDKIQNFWYKKLTTLHKSIAKNLTAIILGQQNIPEFIATGITYMLPKTTYTTQPSQYRPITCLPTIYKILTSVITTKINSHIDHHSIIAEEQKGCRRGHMGCKEQLIIDSTIHKHATTKNRNLHCTYIDYQKAFDSIPHSWLIKILEIYKINSKIIDFLRIIMPHWKTTLQLNNRHTSLITRQISIRKGIYQGDSLSPLWFCLALNPLSHLLRHCQAGYNFKHNTEDTVISHLIYMDDIKLYAKTEKDMKKLIEVTTEFSQDINMKFGLDKCKTLHIIRGKIKPGSYTVNDTDTIAAMEPTDLYKYLGYKQLKGLDHTAIKQTLHTEYRRRTNAVCKTPLSGKHLIKALNTFAIPILTYSFGVIKWSKTDIEQLERTTRTILSKHHNLHPKSAIERLTIKRQSGGRGLIDIHHLWQKQITRLKTFFYSKSHTSDIHKAICLNDLNYTPLNLNEQNIHTNNSDPQNQKIENWKKKVLHGRHPHDLEQSHINIMASNKWLMIGNLFPETEGFMIAIQDQIINTKNYRKFIIKDPTTTNDKCRRCHIQSETIQHITGACTTLTQTDYTHRHNQVANIIHQKLALKHSLIQNFNTPYYKYTPQTILENETHKMYYDRAILTDRTIHYNRPDITLQDKIRKITYLIDIAVPNTHNLQKTITEKISKYADLKEEVTRIWRQEKVYVIPIVLSTTGVIPNHLLRSLKLIDLEESVYINLQKAAILNTCRIVRKFMQLEEENTPSS

SEQ ID NO: 20927 - protein, 841 aa, Agrochola circellaris
MKAQQRKNDNATFAMNEKLFYRNIQKTHNDTTIENNTDTPSKEHLETFWSSIWEEQVQHNDKATWITEEETKWRLIDEMEFKEITEPDITNITAKLHNWKSPGIDKIQNFWYKKLTTLHKSIAKNLTAIILGQQNIPEFIATGITYMLPKTTYTTQPSQYRPITCLPTIYKILTSVITTKINSHIEHHSIIAEEQKGCRRGHMGCKEQLIIDSTIHKHATTKNRNLHCTYIDYQKAFDSIPHSWLIKILEIYKINSKIIDFLRIIMPHWKTTLQLNNRHTSLITRQISIRKGIYQGDSLSPLWFCLALNPLSHLLRHCQAGYNFKHNTEDTVISHLIYMDDIKLYAKTEKDMKKLIEVTTEFSQDINMKFGLDKCKTLHIIRGKIKLGSYTVNDTDTIAAMEPTDLYKYLGYKQLKGLDHTAIKQTLNTEYRRRTNAVCKTQLSGKHLIKALNTFAIPILTYSFGVIKWSKTDIEQLERTTRTILSKHHNLHPKSAIERLTIKRQSGGRGLIDIHHLWQKQITRLKTFFYSKSHTSDIHKAICLNDLNYTPLNLNEQNIHTNNSDPQNQKIENWKKKVLHGRHPHDLEQSHINIMASNKWLMIGNLFPETEGFMIAIQDQIINTKNYRKFIIKDPTTTNDKCRRCHIQSETIQHITGACTTLTQTDYTHRHNQVANIIHQKLALKHSLIQNFNTPYYKYTPQTILENETHKMYYDRAILTDRTIHYNRPDITLQDKIRKITYLIDIAVPNTHNLQKTITEKISKYADLKEEVTRIWRQEKVYVIPIVLSTTGVIPNHLLRSLKLIDLEESVYINLQKAAILNTCRIVRKFMQLEEENTPSS

SEQ ID NO: 20928 - protein, 1308 aa, Agrochola circellaris
METRSKRKRIGPLPGGDRRGAPGADAGCLSMRTVSGEELNRRAPTDKDATAEADDGDRLTNRTDTPVEPYSPSTVSYAPSRTSSPSMPSSPIPSSPPITSFNTVSPTPALNVAREVSTFLPASTKAGKARVRMKWSKEVNLFIMRTYLHITKVETDMTTYRQQLHERFSLQYPEISVSEQRISDQRRTIVRNKLLSQVELDQLKEEVRTQLRQESEHHADTNTITLTQNINENILQEQPQSLTQLYPSSQPLTYNQSQAYTQTAHTSTQTESLTLTLENDIETLVVADQNLTTDTYIQEIHDKFRTTITQYSGMDPAARPKLPKLKYTRNLFRLVNLFNENILIQFISDDTQLIDINLLIYCTAVVISEELNFKITNHTGNTRTSHIVKPAWQQRLEKDIEKLRADCGRLTQYINGIRSNKVVKRVETIFKNYSNHTRHESSNRKPEEFLDTLKQKLALKVHRLRRYMKAQQRKNDNATFAMNEKLFYRNIQKTHNDTTIENNTDTPSKEHLETFWSSIWEEQVQHNDKATWITEEETKWRLIDEMEFKEITEPDITNITAKLHNWKSPGIDKIQNFWYKKLTTLHKSIAKNLTAIILGQQNIPEFIATGITYMLPKTTYTTQPSQYRPITCLPTIYKILTSVITTKINSHIEHHSIIAEEQKGCRRGHMGCKEQLIIDSTIHKHATTKNRNLHCTYIDYQKAFDSIPHSWLIKILEIYKINSKIIDFLRTIMPHWKTTLQLNNRHTSLITRQISIRKGIYQGDSLSPLWFCLALNPLSHLLRHCQAGYNFKHNTEDTVISHLIYMDDIKLYAKTEKDMKKLIEVTTEFSQDINMKFGLDKCKTLHIIRGKIKPGSYTVNDTDTIAAMEPTDLYKYLGYKQLKGLDHTAIKQTLHTEYRRRTNAVCKTQLSGKHLIKALNTFAIPILTYSFGVIKWSKTDIEQLERTTRTILSKHHNLHPKSAIERLTIKRQSGGRGLIDIHHLWQKQITRLKTFFYSKSHTSDIHKAICLNDLNYTPLNLNEQNIHTNNSDPQNQKIENWKKKVLHGRHPHDLEQSHINIMASNKWLMIGNLFPETEGFMIAIQDQIINTKNYRKFIIKDPTTTNDKCRRCHIQSETIQHITGACTTLTQTDYTHRHNQVANIIHQKLALKHSLIQNFNTPYYKYTPQTILENETHKMYYDRAILTDRTIHYNRPDITLQDKIRKITYLIDIAVPNTHNLQKKITEKISKYADLKEEVTRIWRQEKVYVIPIVLSTTGVIPNHLLRSLKLIDLEESVYINLQKAAILNTCRIVRKFMQLEEKNTPSS

SEQ ID NO: 20929 - protein, 1308 aa, Agrochola circellaris
METRSKRKRIGPLPGGDRRGAPGADAGCLSMRTVSGEELNRRAPTDKDATAEADDGDRLTNRTDTPVEPYSPSTVSYAPSRTSSPSMPSSPIPSSPPITSFNTVSPTPALNVAREVSNFLPASTKAGKARVRMKWSKEVNLFIMRTYLHITKVETDMTTYRQQLHERFSLQYPEISVSEQRISDQRRTIVRNKLLSQVELDQLKEEVRTQLRQESEHHADTNTITLTQNINENILQEQPQSLTQLYPSSQPLTYNQSQAYTQTAHTSTQTESLTLTLENDIETLVVADQNLTTDTYIQEIHDKFRTTITQYSGMDPAARPKLPKLKYTRNLFRLVNLFNENILIQFISDDTQLIDINLLIYCTAVVISEELNFKITNHTGNTRTSHIVKPAWQQRLEKDIEKLRADCGRLTQYINGIRSNKVVKRVETIFKNYSNHTRHESSNRKPEEFLDTLKQKLALKVHRLRRYMKAQQRKNDNATFAMNEKLFYRNIQKTHNDTTIENNTDTPSKEHLETFWSSIWEEQVQHNDKATWITEEETKWRLIDEMEFKEITEPDITNITAKLHNWKSPGIDKIQNFWYKKLTTLHKSIAKNLTAIILGQQNIPEFIATGITYMLPKTTYTTQPSQYRPITCLPTIYKILTSVITTKINSHIEHHSIIAEEQKGCRRGHMGCKEQLIIDSTIHKHATTKNRNLHCTYIDYQKAFDSIPHSWLIKILEIYKINSKIIDFLRIIMPHWKTTLQLNNRHTSLITRQISIRKGIYQGDSLSPLWFCLALNPLSHLLRHCQAGYNFKHNTEDTVISHLIYMDDIKLYAKTEKDMKKLIEVTTEFSQDINMKFGLDKCKTLHIIRGKIKPGSYTVNDTDTIAAMEPTDLYKYLGYRQLKGLDHTAIKQTLNTEYRRRTNAVCKTQLSGKHLIKALNTFAIPILTYSFGVIKWSKTDIEQLERTTRTILSKHHNLHPKSAIERLTIKRQSGGRGLIDIHHLWQKQITRLKTFFYSKSHTSDIHKAICLNDLNYTPLNLNEQNIHTNNSDPQNQKIENWKKKVLHGRHPHDLEQSHINIMASNKWLMIGNLFPETEGFMIAIQDQIINTKNYRKFIIKDPTTTNDKCRRCHIQSETIQHITGACTTLTQTDYTHRHNQVANIIHQKLALKHSLIQNFNTPYYKYTPQTILENETHKMYYDRAILTDRTIHYNRPDITLQDKIRKITYLIDIAVPNTHNLQKTITEKISKYADLKEEVTRIWRQEKVYVIPIVLSTTGVIPNHLLRSLKLIDLEESVYINLQKAAILNTCRIVRKFMQLEEENTPSS

SEQ ID NO: 20930 - protein, 1301 aa, Mythimna impura
METRSKSKRIGPLPGGDRRGAPGADAGCHSMRTVSGEESSRRAPTDKDATAEITDDGDRLPDRTNTPVDPYSPSTVSYTPSSRSSPSIPSSPPIASFNSVRFTPAMDVAREVSTFLPASTKAGKARVRMRWSKEVNLFIMRTYLFITKLETDMTTYRPQLHAIFTRQYPEITVSEQRVSDQRRVIVRNKLISQEEIDQLKEEVRIQLIQEEDYGGTSNVTQNTHESQSERPQSLIQSQPLVESQSYNSQTSHTSTQTESITLTLENDIETVAVDPNPVTDTYVQEILDKFRTSLAQYSGMDPAARPKLPKLKYSLNLFRLVNLFNENILNKFLSDDVQLIDIHTLIYCTAVVIAEELNFRISKHTSNTRSRDHVKPPWQLRLEKDIDKLRADCGRLTQYIRGCRSQKVVKRVEAIFKINSTHTRHENNNRKPEEYLDTLKQKLALKVHRLRRYVKAQQRKIDNATFAMNEKIFYRNIQKPPRDTIMDNNTDIPSKEQLESFWSNIWEEQVQHNDKAIWITEEETKWEAIDEMEFKEITESDITNITVRLYNWKSPGIDKIQNFWYKKLTILHKYIAKNLTNIVLGQQNIPEFIATGITYMLPKTTYTTQPSQYRPITCLPTIYKILTSAITTKINAHIERHNIIAEEQKGCRRGHMGCKEQLIIDSTIHKHATCKNRNLHCTYIDYQKAFDSIPHSWLLKILEIYKINSKVILFLRTIMSYWKTTLHLHNRHSNLTTRQIFIRKGIYQGDSLSPLWFCLALNPLSHLLHRCQVGYNLKHNTEDTIISHLIYMDDIKLYSRTEKEMKKLIEITTKFSQDINMRFGLDKCKTLHIIRGKIKSGNYTINDTDTIAALEPTDLYKYLGYKQLKGLDHTAIKQTLSTEYRRRINAVCKTQLSGKHLIKALNTFAIPILTYSFGIIKWCKTDIEQLERTTRTTLTKHNNLHPKSAIERLTIKRQNGGRGLIDIGHLWQKQIIRLKTFFVTKSRTSVIHKAITLHDFNYTPLNLSDQNIQDTINTDPQNQKIENWKKKVLHGRHPHALDQPHVHKLASNKWLKIGNLFPETEGFMIAIQDQIINTKNYRKYIIKDPSVSNDKCRRCHMQPETIQHITGACTTLTQTDYTHRHNQVANVLHQKLAIKYALIQDTNTPYYNYTPQTILENDTHKLYYDRAILTDRTIHYNRPDIILQDKINKITYLIDIAVPNTHNIQKTITEKNSKYVELKEEITRIWRQEKVYVVPIVLSTTGVIPHHLLHSLKLLNLKDTLYIPLQKAAILNTCRIVRKFLQIDEREMGLLQNASTS

SEQ ID NO: 20931 - protein, 1300 aa, Mythimna impura
METRSKSKRIGPLPGGDRRGAPGADAGCHSMRTVSGEELSRRAPTDKDTTAEIIDDGDRLTDRTNTPVEPYSPSTVSYTPSSRSSPSIPSSPPNISSSTVRPTPDLDVAREVSTFLPASTKAGKARVRMKWSKEVNLFIMRSYLYITKLETDMTTYRQQLHAIFSRQYPEINVSEQRISDQRRIIVRNKLLSQEVIDQVKEEVRTQLLQEESENYVGTGYVTQNIHENSLPEPPQSLTLPHLNVESQHYQPQTLHTSTQTETLTLTLENDIETVAVDQNPITDNTYVQEIHDKFSITLTQYSGMDPAARPKLPKLKYTPNLFRLINLFNENILKPYLSDDTQLIDIHTLIYCTAVVIAEEFNFKITDHARTPRSRENVKPPWQLRLEKDIEKLRADCGRLTHYINGCRSRKVIKKVEAIFNNNSVHTRHENNNKKPEEYLDTLKQKLALKVHRLRRYIKAQQRKNDNALFATNEKVFYRNLHKPHTDLTIGTHHIDTPSKELLETFWSSIWEEQVHHNDKATWITEEETKWREIDEMEFQEITESDIANITARLHNWKSPGIDNIQNFWFKKLTILHKYIAKNFTDIVLGKQNIPDFIATGVTYMLPKSKHTSEPSQYRPITCLPTIYKILTSVITNKINSHIEYHKIIAEEQKGCRRGHKGCKEQLVIDSTIHKHATTKNRNLHCTYIDYKKAFDSIPHSWLIHILEIYKINPKIIEFLRNVMTRWKTTLQLKNHLSTLVTRQIHIRKGIFQGDSLSPLWFCLALNPLSHLLNRCKAGYNFKHNSEETTVSHLIYMDDIKLYSKNEKEMKSLIEATTTFSQDINMQFGLDKCRTLHIIRGKVKPGNYMLNDTDTIAAMEPTDLYKYLGYQQLKGLDHISIKQTLNTEYRRRMNAICKTRLSGKHLIKALNTFAIPILTYSFGVIKWSKTDIERLQRITRTTLTKYNNLHPKSAIERLTIKRQNGGRGLIDIHDLWQKQIARLKTFFYSKSRTSDIHKAIICNDFNYTPLNLSDQSWPNTNDTNLQNQKIENWKKKVLHGRHPHDLEQSHINIAASNKWLKIGNLFPETEGFIIAIQDQIIHTKNYRKYIIKDPTITNDKCRRCHMQSETIQHITGACTTLTQTDYTHRHNQVTNIIHQKLAIKHSLIQNSGTPYYKYKPETILENDAYKLYYDRAILTDRTIHYNRPDITLQDKIKKVTYLIDIAVPNTHNLQKTISEKISKYAELKDEITRLWRQEKVYIIPIVLSTTGVIPNHLLSSLKLIDLDESVYINLQKAAILNTCRIVRKFMQLEDENTPPL

SEQ ID NO: 20932 - protein, 1301 aa, Mythimna impura
METRSKSKRIGPLPGGDRRGAPGADAGCHSMRTVSGEESSRRAPTDKDATAEITDDGDRLPDRTNTPVEPYSPSTVSYTPSSRSSPSIPSSPPIASFNSVRFTPAMDVAREVSTFLPASTKAGKARVRMRWSKEVNLFIMRTYLFITKLETDMTTYRPQLHAIFTRQYPEITVSEQRVSDQRRVIVRNKLISQEEIDQLKEEVRIQLIQEEDYGGTSNVTQNTHESQSERPQSLIQSQPLVESQSYNSQTSHTSTQTESITLTLENDIETVAVDPNPVTDTYVQEILDKFRTSLAQYSGMDPAARPKLPKLKYSLNLFRLVNLFNENILNKFLSDDVQLIDIHTLIYCTAVVIAEELNFRISEHTSNTRSRDHVKPPWQLRLEKDIDKLRADCGRLTQYIRGCRSQKVVKRVEAIFKINSTHTRHENNNRKPEEYLDTLKQKLALKVHRLRRYVKAQQRKIDNATFAMNEKLFYRNIQKPSRDTIMDNNTDIPSKEQLESFWSNIWEEQVQHNDKAIWITEEETKWEAIDEMEFKEITESDITNITVRLHNWKSPGIDKIQNFWYKKLTILHKYIAKNLTNIVLGQQNIPEFIATGITYMLPKTTYTTQPSQYRPITCLPTIYKILTSAITTKINAHIERHNIIAEEQKGCRRGHMGCKEQLIIDSTIHKHATCKNRNLHCTYIDYQKAFDSIPHSWLLKILEIYKINSKVILFLRTIMSYWKTTLHLHNRHSNLTTRQIFIRKGIYQGDSLSPLWFCLALNPLSHLLHRCQVGYNLKHNTEDTIISHLIYMDDIKLYSRTEKEMKKLIEITTKFSQDINMRFGLDKCKTLHIIRGKIKSGNYTINDTDTIAALEPTDLYKYLGYKQLKGLDHTAIKHTLSTEYRRRINAVCKTQLSGKHLIKALNTFAIPILTYSFGIIKWCKTDIEQLERTTRTTLTKHNNLHPKSAIERLTIKRQNGGRGLIDIGHLWQKQIIRLKTFFVTKSRTSVIHKAITLHDFNYTPLNLSDQNIQDTINTDPQNQKIENWKKKVLHGRHPHALDQPHVHKLASNKWLKIGNLFPETEGFMIAIQDQIINTKNYRKYIIKDPSVSNDKCRRCHMQPETIQHITGACTTLTQTDYTHRHNQVANVLHQKLAIKYALIQDTNTPYYNYTPQTILENDTHKLYYDRAILTDRTIHYNRPDIILQDKINKITYLIDIAVPNTHNIQKTITEKISKYVELKEEITRIWRQEKVYVVPIVLSTTGVIPHHLLHSLKLLNLKDTLYIPLQKAAILNTCRIVRKFLQIDEREMGLLQNASTT

SEQ ID NO: 20933 - protein, 1301 aa, Mythimna impura
METRSKSKRIGPLPGGDRRGAPGADAGCHSMRTVSGEESSRRAPTDKDATAEITDDGDRLPDRTNTPVEPYSPSTVSYTPSSRSSPSIPSSPPIASFNSVRFTPAMDVAREVSTFLPASTKAGKARVRMRWSKEVNLFIMRTYLFITKLETDMTTYRPQLHAIFTRQYPEITVSEQRVSDQRRVIVRNKLISQEEIDQLKEEVRIQLIQEEDYGGTSNVTQNTHESQSERPQSLIQSQPLVESQSYNSQTSHTSTQTESITLTLENDIETVAVDPNPVTDTYVQEILDKFRTSLAQYSGMDPAARPKLPKLKYSLNLFRLVNLFNENILNKFLSDDVQLIDIHTLIYCTAVVIAEELNFRISEHTSNTRSRDHVKPPWQLRLEKDIDKLRADCGRLTQYIRGCRSQKVVKRVEAIFKINSTHTRHENNNRKPEEYLDTLKQKLALKVHRLRRYVKAQQRKIDNATFAMNEKLFYRNIQKPPRDTIMDNNTDIPSKEQLESFWSNIWEEQVQHNDKAIWITEEETKWEAIDEMEFKEITESDITNITVRLHNWKSPGIDKIQNFWYKKLTILHKYIAKNLTNIVLGQQNIPEFIATGITYMLPKTTYTTQPSQYRPITCLPTIYKILTSAITTKINAHIERHNIIAEEQKGCRRGHMGCKEQLIIDSTIHKHATCKNRNLHCTYIDYQKAFDSIPHSWLLKILEIYKINSKVILFLRTIMSYWKTTLHLHNRHSNLTTRQIFIRKGIYQGDSLSPLWFCLALNPLSHLLHRCQVGYNLKHNTEDTIISHLIYMDDIKLYSRTEKEMKKLIEITTKFSQDINMRFGLDKCKTLHIIRGKIKSGNYTINDTDTIAALEPTDLYKYLGYKQLKGLDHTAIKHTLSTEYRRRINAVCKTQLSGKHLIKALNTFAIPILTYSFGIIKWCKTDIEQLERTTRTTLTKHNNLHPKSAIERLTIKRQNGGRGLIDIGHLWQKQIIRLKTFFVTKSRTSVIHKAITLHDFNYTPLNSSDQNIQDTINTDPQNQKIENWKKKVLHGRHPHALDQPHVHKLASNKWLKIGNLFPETEGFMIAIQDQIINTKNYRKYIIKDPSVSNDKCRRCHMQPETIQHITGACTTLTQTDYTHRHNQVANVLHQKLAIKYALIQDTNTPYYNYTPQTILENDTHKLYYDRAILTDRTIHYNRPDIILQDKINKITYLIDIAVPNTHNIQKTITEKISKYVELKEEITRIWRQEKVYVVPIVLSTTGVIPHHLLHSLKLLNLKDTLYIPLQKAAILNTCRIVRKFLQIDEREMGLLQNASTT

SEQ ID NO: 20934 - protein, 997 aa, Mythimna impura
MDPAARPKLPKLKYTPNLFRLINLFNENILKPYLSDDTQLIDIHTLIYCTAVVIAEEFNFKITDHARTPRSRENVKPPWQLRLEKDIEKLRADCGRLTHYINGCRSRKVIKKVEAIFNNNSVHTRHENNNKKPEEYLDTLKQKLALKVHRLRRYIKAQQRKNDNALFATNEKVFYRNLHKPHTDLTIGTHHIDTPSKELLETFWSSIWEEQVHHNDKATWITEEETKWREIDEMEFQEITESDIANITARLHNWKSPGIDNIQNFWFKKLTILHKYIAKNFTDIVLGKQNIPDFIATGVTYMLPKSKHTSEPSQYRPITCLPTIYKILTSVITNKINSHIEYHKIIAEEQKGCRRGHMGCKEQLVIDSTIHKHATTKNRNLHCTYIDYKKAFDSIPHSWLIHILEIYKINPKIIEFLRNVMTRWKTTLQLKNHLSTLVTRQIHIRKGIFQGDSLSPLWFCLALNPLSHLLNRCKAGYNFKHNSEETTVSHLISMDDIKLYSKNEKEMKSLIEATTTFSQDINMQFGLDKCRTLHIIRGKVKPGNYMLNDTDTIAAMEPTDLYKYLGYQQLKGLDHISIKQTLNTEYRRRMNAICKTRLSGKHLIKALNTFAIPILTYSFGVIKWSKTDIERLQRITRTTLTKYNNLHPKSAIERLTIKRQNGGRGLIDIHDLWQKQIARLKTFFYSKSRTSDIHKAIICNDFNYTPLNLSDQSWPNTNDTNLQNQKIENWKKKVLHGRHPHDLEQSHINIAASNKWLKIGNLFPETEGFIIAIQDQIIHTKNYRKYIIKDPTITNDKCRRCHMQSETIQHITGACTTLTQTDYTHRHNQVTNIIHQKLAIKHSLIQNSGTPYYKYKPETILENDAYKLYYDRAILTDRTIHYNRPDITLQDKIKKVTYLIDIAVPNTHNLQKTISEKISKYAELKDEITRLWRQEKVYIIPIVLSTTGVIPNHLLSSLKLIDLDESVYINLQKAAILNTCRIVRKFMQLEDENTPPL

SEQ ID NO: 20935 - protein, 1301 aa, Mythimna impura
METRSKSKRIGPLPGGDRRGAHGADAGCHSMRTVSGEESSRRAPTDKDAIAEITDDGDRLPDRTNTPVEPYSPSTVSYTPSSRSSPSIPSSPPIASFNSVRFTPAMDVAREVSTFLPASTKAGKARVRMRWSKEVNLFIMRTYLFITKLETDMTTYRPQLHAIFTRQYPEITVSEQRVSDQRRVIVRNKLISQEEIDQLKEEVRIQLIQEEDYGGTSNVTQNTHESQSERPQSLIQSQPLVESQSYNSQTSHTSTQTESITLTLENDIETVAVDPNPVTDTYVQEILDKFRTSLAQYSGMDPAARPKLPKLKYSLNLFRLVNLFNENILNKFLSDDVQLIDIHTLIYCTAVVIAEELNFRISEHTSNTRSRDHVKPPWQLRLEKDIDKLRADCGRLTQYIRGCRSQKVVKRVEAIFKINSTHTRHENNNRKPEEYLDTLKQKLALKVHRLRRYVKAQQRKIDNATFAMNEKIFYRNIQKPPRDSIMDNNTDIPSKEQLESFWSNIWEEQVQHNDKAIWITEEETKWEAIDEMEFKEITESDITNITVRLHNWKSPGIDKIQNFWYKKLTILHKYIAKNLTNIVLGQQNIPEFIATGITYMLPKTTYTTQPSQYRPITCLPTIYKILTSAITTKINAHIERHNIIAEEQKGCRRGHMGCKEQLIIDSTIHKHATCKNRNLHCTYIDYQKAFDSIPHSWLLKILEIYKINSKVILFLRTIMSYWKTTLHLHNRHSNLTTRQIFIRKGIYQGDSLSPLWFCLALNPLSHLLHRCQVGYNLKHNTEDTIISHLIYMDDIKLYSRTEKEMKKLIEITTKFSQDINMRFGLDKCKTLHIIRGKIKSGNYTINDTDTIAALEPTDLYKYLGYKQLKGLDHTAIKQTLSTEYRRRINAVCKTQLSGKHLIKALNTFAIPILTYSFGIIKWCKTDIEQLERTSRMTLTKHNNLHPKSAIERLTIKRQNGGRGLIDIGHLWQKQIIRLKTFFVTKSRTSVIHKAITLHDFNYTPLNLSDQNIQDTINTDPQNQKIENWKKKVLHGRHPHALDQPHVHKLASNKWLKIGNLFPETEGFMIAIQDQIINTKNYRKYIIKDPSVSNDKCRRCHMQPETIQHITGACTTLTQTDYTHRHNQVANVLHQKLAIKYALIQDTNTPYYNYTPQTILENDTHKLYYDRAILTDRTIHYNRPDIILQDKINKITYLIDIAVPNTHNIQKTITEKISKYVELKEEITRIWRQEKVYVVPIVLSTTGVIPHHLLHSLKLLNLKDTLYIPLQKAAILNTCRIVRKFLQIDEREMGLLQNASTT

SEQ ID NO: 20936 - protein, 1299 aa, Mythimna ferrago
METRSKSKRLGPLPGGDRRGAPGADAGCHSMRTVSGEGLSRRAPTDNDATAEITDDGDRLTDRTNTPVEPYSPSTVSYTPSSRSSPSIPSSPPNINLNTVRSTPVLDVAREVSTFLPASTKAGKARVRMKWSKEVNLFIMRSYFYITKLETNMTTYRQQLHAIFTRQYPEINVSEQRISDQRRTIVRNKLLSQEVIDQVKEEVRTQLLQEESENYVDIAYVTQNTHENSLLESPQSLTLSNLNVESQQYDQTQIQHTQTEILTLTLENDIETVAVDQNPIPNNIYVKEIHDKFSATLAQYSGMDPAARPKLPKLKYTPHLFRLVNLFNENILKQFLSDDTQLIDIHTLIYCTAVVIAEELNFKIIDHARTTRPRENVKLPWQIRLEKDIEKLRADCGRLTHYINGCRSRKLIKKVEAIFNNVSVHTRHENNNKKTEEYLDTLKQKLALKVHRLRRYIKAQQRKNDNAIFATNEKVFYRNLQKPHTDSTIGIHHINTPSKELLETFWSSIWEEQVHHNDKATWITEEETKWKEIDEMEFQEITESDIANITARLHNWKSPGIDKIQNFWFKKLTILHRFIAKSFTDIVLGKQNIPDFIATGVTYMLPKSIHTSEPSQYRPITCLPTIYKILTSVLTNKINSHIEYHKIIAEEQKGCRRGHMGCKEQLIIDSTIHKHATTKNRNLHCTYIDYQKAFDSIPHSWLIHILEIYKINPKIIEFLRTVMTRWKTTLQLNNHLSTLVTREIYIRKGIFQGDSLSPLWFCLALNPLSHLLNQCKAGYNFKHNSKETTVSHLIYMDDIKLYSKNEKEMKSLLKATTKFSHDINMIFGLNKCRTLHIIRGKVKPGNYIVNDSDTIAAMEPTDLYKYLGYKQLKGLDHISIKKTLNTEYQRRMNAICKTQLSGKHLIKALNTFAIPILTYSFGVIKWSKTDIEQLERITRTTLTKYNNLHPKSAIERLTIKRQNGGRGLIDIHHLWQKQISRLKTFFYSKSRTSDIHKAITCNDFNYTPLNLSDQSLPDINDSNPQNQKIENWKKKVLHGRHPHDLEQSHINIAASNKWLKIGSLFPETEGFMIAIQDQIINTRNYRKYIIKDPTITNDKCRRCHIQPETIQHITGSCTTLTQTDYTHRHNQVANIIHQKLAIKYSLIQNSGTPYYKYKPETILENDAYKLYYDRAILTDRTIHYNRPDITLQDKINKVTYLIDIAVPNTHNLQKTISEKISKYADLKDEITRLWRQDKVYVIPIVLSTTGVIPNHLLRSLKLIDLEESVYISLQKAAILNTCRIVRKFMQLEDDNTPLH

SEQ ID NO: 20937 - protein, 1301 aa, Mythimna impura
METRSKSKRIGPLPGGDRRGAPGADAGCHSMRTVSGEESSRRAPTDKDATAEITDDGDRLPDRTNTPVEPYSPSTVSYTPSSRSSPSIPSSPPIASFNSVRFTPAMDVAREVSTFLPASTKAGKARVRMRWSKEVNLFIMRTYLFITKLETDMTTYRPQLHAIFTRQYPEITVSEQRVSDQRRVIVRNKLISQEEIDQLKEEVRIQLIQEEDYGGTSNVTQNTHESQSERPQSLIQSQPLVESQSYNSQTSHTSTQTESITLTLENDIETVAVDPNPVTDTYVQEILDKFRTSLAQYSGMDPAARPKLPKLKYSLNLFRLVNLFNENILNKFLSDDVQLIDIHTLIYCTAVVIAEELNFRISEHTSNTRSRDHVKPPWQLRLEKDIDKLRADCGRLTQYIRGCRSQKVVKRVEAIFKINSTHTRHENNNRKPEEYLDTLKQKLALKVHRLRRYVKAQQRKIDNATFAMNEKIFYRNIQKPPRDTIMDNNTDIPSKEQLESFWSNIWEEQVQHNDKAIWITEEETKWEAIDEMEFKEITESDITNITVRLHNWKSPGIDKIQNFWYKKLTILHRYIAKNLTNIVLGQQNIPEFIATGITYMLPKTTYTTQPSQYRPITCLPTIYKILTSAITTKINAHIERHNIIAEEQKGCRRGHMGCKEQLIIDSTIHKHATCKNRNLHCTYIDYQKAFDSIPHSWLLKILEIYKINSKVILFLRTIMSYWKTTLHLHNRHSNLTTRQIFIRKGIYQGDSLSPLWFCLALNPLSHLLHRCQVGYNLKHNTEDTIISHLIYMDDIKLYSRTEKEMKKLIEITTKFSQDINMRFGLDKCKTLHIIRGKIKSGNYTINDTDTIAALEPTDLYKYLGYKQLKGLDHTAIKQTLSTEYRRRINAVCKTQLSGKHLIKALNTFAIPILTYSFGIIKWCKTDIEQLERTTRTTLTKHNNLHPKSAIERLTIKRQNGGRGLIDIDHLWQKQIIRLKTFFVTKSRTSVIHKAITLHDFNYTPLNLSDQNIQDTINTDPQNQKIENWKKKVLHGRHPHALDQPHVHKLASNKWLKIGNLFPETEGFMIAIQDQIINTKNYRKYIIKDPSVSNDKCRRCHMQPETIQHITGACTTLTQTDYTHRHNQVANVLHQKLAIKYALIQNTNTPYYNYTPQTILENDTHKLYYDRAILTDRTIHYNRPDIILQDKINKITYLIDIAVPNTHNIQKTITEKISKYVELKEEITRIWRQEKVYVVPIVLSTTGVIPHHLLHSLKLLNLKDTLYIPLQKAAILNTCRIVRKFLQIDEREMGLLQNASTT

SEQ ID NO: 20938 - protein, 1171 aa, Mythimna ferrago
MKWSKEVNLFIMRSYFYITKLETNMTTYRQQLHAIFTRQYPEINVSEQRISDQRRTIVRNKLLSQEVIDQVKEEVRTQLLQEESENYVDIAYVTQNTHENSLLESPQSLTLSNLNAESQQYDQTQIQHTQTEILTLTLENDIETVAVDQNPIPNNMYVKEIHDKFSATLAQYSGMDPAARPKLPKLKYTPHLFRLVNLFNENILKQFLSDDTQLIDIHTLIYCTAVVIAEELNFKIIDHARTTRPRENVKPPWQIRLEKDIEKLRADCGRLTHYINGCRSRKLIKKVEAIFNNVSVHTRHENNNKKPEEYLDTLKQKLALKVHRLRRYIKAQQRKNDNAIFATNEKVFYRNLQKPHTDSTIGIHHINTPSKELLETFWSSIWEEQVHHNDKATWITEEETKWKEIDEMEFQEITESDIANITARLHNWKSPGIDKIQNFWFKKLTILHRFIAKNFTDIVLGKQNIPDFIATGVTYMLPKSIHTSEPSQYRPITCLPTIYKILTSVLTNKINSHIEYHKIIAEEQKGCRRGHMGCKEQLIIDSTIHKHATTKNRNLHCTYIDYQKAFDSIPHSWLIHILEIYKINPKIIEFLRTVMTRWKTTLQLNNHLSTLVTREIYIRKGIFQGDSLSPLWFCLALNPLSHLLNQCKAGYNFKHNSKETTVSHLIYMDDIKLYSKNEKEMKSLLKATTKFSHDINMIFGLDKCRTLHIIRGKVKPGNYIVNDNDTIAAMEPTDLYKYLGYKQLKGLDHISIKKTLNTEYQRRMNAICKTQLSGKHLIKALNTFAIPILTYSFGVIKWSKTDIEQLERITRTTLTKYNNLHPKSAIERLTIKRQNGGRGLIDIHHLWQKQISRLKTFFYSKSRTSDIHKAITCNDFNYTPLNLSDQSLPDINDSNPQNQKIENWKKKVLHGRHPHDLEQSHINIAASNKWLKIGSLFPETEGFMIAIQDQIIKTRNYRKYIIKDPTITNDKCRRCHTQPETIQHITGSCTTLTQTDYTHRHNQVANIIHQKLAIKYSLIQNSGTPYYKYKPETILENDAYKLYYDRAILTDRTIHYNRPDITLQDKINKVTYLIDIAVPNTHNLQKTISEKISKYADLKDEITRLWRQDKVYVIPIVLSTTGVIPNHLLRSLKLIDLEESVYISLQKAAILNTCRIVRKFMQLEDDNTPLH

SEQ ID NO: 20939 - protein, 814 aa, Hyles vespertilio
MPKKEELESYWASLWEEQKQHNDGADWIKEETNTWNAIEEMEFDEVTEEDINLITTRLHNWKSPGIDKIHNFWFKKLTSLHKAIAKNFTEIILHKQNIPEFIATGITYMLPKDKITIQASQYRPITCLPTIYKILTAVISTKINAHIQNHNIIAEEQKGCRQGHMGCREQLVIDSVIHKHATTKNRSLHCTYIDYQKAFDSVPHSWLIQILKIYRINKNIIEFLQNIMKYWKTTLHLTSRNSSITTREISIRKGIYQGDSLSPLWFCLALNPLSRVLNNYRSGYHLKHMSGNITISHLIYMDDIKLYAKTEKDMKTLIDATSIFSKDINMNFGLDKCKTVHIIRGKIRPGDYIVNQSEIITAMEPTDLYKYLGYKQLKGIDHTNIKNSLSAEYQRRINAICKTQLSGKHLIKALNSYAIPILTYSFGVIKWSKTDIEKIERTTRTTLTKHNHLHPKAAVERLTIKRETGGRGLIDIYHLWLKQLFNLKTFFITKSHTSNLHNAITHNDNNFTPLNLQDQTNLQNPNDIDRQQKKIEDWKKKVLHGRHPHDLEQTHIDKIASNKWLKIGNIFPETEGFMMAIQDQIINTKNYRKFIIKDPTITIDKCRRCHAQSETIQHITGACISLTQTDYTHRHNQIAYIIHQSLARKYALIQDTNTPYYKYKPEIILENSSYKLYFDRAILTDRTIHYNRPDITLQDKINKTTYLIDIAVPNTHNIQKTIAEKNNKYGELKDEVTRIWKQEKVYIVPIVLSTTGVIPKHLHHSIKLLSLNKSIYITLQKASILNTCRIVRKFMQIDENEITQHSTSTTIPLP

SEQ ID NO: 20940 - protein, 1341 aa, Hemaris fuciformis
METRSKKKLRGPLPGGDRRGTPGADAGCYSMQTVSGEELSRRAPTGSPESITAANDFDRLTDSNTNSPIEPYSPSTKSYTPSTCTSPSIPTSSPHNSFRDPSTLAADVPREVNTFLPAATKAGKPRVRMSWSKDVNTFIMRTYYYITKLETDMTTYRKQLHEHFSQKYPSVKVTEQRLSDQKRAIERNKLLPQDVLDEIKEEVRNQLNEQIDNNDRNRHVHISSHDHNETQSLHQSFITCSGTQLLPQLSYTMPHNIDNLTDLELHTVNLPHNQSTQISHVSTQTETITLTIESDIDKLTELNIPSDTYIKDLQDRLTTNLTLYAGLDPESRPKLPKLKYSRKLTSLLKIFNENILHEYLNESTNLVDIHTLIYCTALIISEELDVKIRGTKNTVYIKQGQNSKPAWQYRLEKDIEKLRADCGRLTQYINNNRTKKIVKKVEEIFKNQTIHTKHEENNKKPEEFLDTLKQKLALKAQRLKRYKKAQQRRQDNHLFATNEKIFYRQLGSKFKNGNCEKFDNAPSKEDLESFWAEIWEDPVRHNDKADWIKEEEIRWSTIEEMEFTEITESDIKLTTAKLHNWKSPGIDKIHNFWYKKLTSLHRAIAKNLTDIILRRQSIPDYLATGITYMIPKDKPTSYPSQYRPITCLPTIYKILTSVISYKINTHIENHNILAEEQKGCRRGHMGCKEQLVIDSTIHKHAATKSRNLHCTYIDYKKAFDSIPHSWLIQILKIYKINRNLVEFLQNIMPYWKTTLHLNNHINSVKTRQVHIKKGIYQGDSLSPLWFCLALNPISYILNNCRAGYRLENKSENTNISHLIYMDDIKLYAKNEKDMKKLIEVTTQFSKDINMQLGLDKCKTLHIIKGKVRPGDYTISNEETITAMEPTDLYKYLGYKQLKGLDHTNIKHTLTAEYRKRINAICKSQLSGKNLIKAINTYAIPILTYSFGIIKWTKTDIEQIERTTRTTLTKHNHHHPKSAIERLTIKRELGGRGLIDVYHLWQKQIFSLRTFFHTKSHTSNIHNTIAQNDHNFTPLNLHDETNQNNPNNSNQQELKLSDWKKKVLHGRHPHDLEKPHIDSIGSNKWLKIGNLFPETEGFIVAIQDQIINTKNYRKFIIKDPKLTNDKCRRCHTQPETIQHITGACTRLAQTDYTHRHNQIVNIIHQSLAIKYSLIENTKTPYYRYTPETVLENSSHKMYYDRAILTDRTIHYNRPDITLQDKINKITYVIDIAVPNTHNILKTIAEKSSKYLDLKDEITRIWRQEKVYVVPIVLSTTGVIPNHLHHSLSLLKLNKSLYISLQKAAILNTCRIVRKFMQIEENEIVQQNTNPNHDATILPFHNT

SEQ ID NO: 20941 - protein, 1348 aa, Hemaris fuciformis
MISTVSDSHIYLLLVLVSFLYSIQDGVKMGRNNNNNNKPPKNQPHVLIDHLITWGAETRFDNYWRGQRGSGNPFNMETRSKKKLRGPLPGGDRRGTPGADAGCYSMQTVSGEELSRRAPTGSPESITAANLTDRQTDSRSNSPIEPYSPSTKSYTPSTCTSPSVSTSPPTSNFIDPITPALDVTREVNTFLPASTKAGKPRVRMSWSKDVNLFIMRTYYYITKLETDMTIYRKQLHEHFSQRYPNIKVTEQRLSDQKRAIERNKLLPQDVLDKLKEEVRRQLNEEVENTDSETLLNLRNHDHNETQYHITYQQTQNPIHNTQTSHTSTQTETLTLTLENDVDKLVDTNSPTDLHIKELQDKLTTTLTLYSGLDPGSRPKLPKLKYSPKLNVLVKNFNENILKDFLLESTQLTDLHTLIYCTAFVITEELGYKIIENRNTVIKPRKNNKPAWQQRLEKDIEKLRADLGRLTQYINNNRSNKIVNKVKEIFKNHSVHTRHEENNKTPEEFLDTLKQKLALKAQRLKRYKKSEQRRKDNNLFNNNEKMFYKKLQNKYKNSPNENTEHTPSKENLENFWAGIWEESVQHNDKADWIKEEENRWSTIEEMEFTEVTESDIKLTTIRLHNWKSPGIDKIHNFWYKKLTSLHKIIAKNLTDVILFKQNIPHFITTGITYMLPKDKTSSQPSQYRPITCLPTLYKILTSVISFKINSHIENHNIIAEEQKGCRRGHMGCKEQLIIDSTIHKQATTKSRNLHCTYIDYKKAFDSIPHSWLIQILKIYRINKNIVDFLQNIMTQWRTTLHLNNHINPIVSRQIHIRKGIYQGDSLSPLWFCLALNPLSHILNRCRAGYRLENSSENTNISHLIYMDDLKLYAKNEKDMEKLLDATTTFSQDINMQFGLDKCKTVHIVKGKIQPGDYTVNDSEIIAAMEPTDLYKYLGFKQLKGLDHTNIKHTLTVEYQNRVKSISKSQLSGKNLIKALNTYAIPILTYSFGIIKWSKTDIEHIERITRTTLTKHNHLHPKSAIERLTLKRELGGRGLIDIFNLWQKQIYNLQTFFHEKSHSSNIHNAIARNDKNFTPLNLHEETNLYNPNAINRQEQKLGDWKKKVLHGRHPHDLEQTHIDAIGSNKWLTIGYLFPETEGFLIAIQDQIINTKNYRKFIIKDPTMTNDKCRRCHAQPETIQHITGACISLTQTDYTHRHNQVANIIHRALALKYSLIENRKIPYYKYSPETVLENASHKLYYDRAILTDRTIHYNRPDIVLQDKKNKTTYLIDISVPNTHNIQKTIAEKNNKYIELKDEVKRVWKQDKVYVVPIVLSTTGIIPKHLHHSLNLLTLNKTCIVHYRRQQF

SEQ ID NO: 20942 - protein, 1309 aa, Deilephila porcellus
METRSKKKLRGPLPGGDRRGTPGADAGCSSVRTVSGEELIRRTPTGSPENTTADNNLDRLTDSRSNSPIEPYSPSTISYTPSTCESPSIPSSPPSNNIRDPPILALDVAREVNTFLPVTTKAGKPRVRMSWSKEVNLYIMRTYYYVTKLETDMTIYRKQLHEHFSRQYPDIKVTEQRLSDQKRAIERNKLLSQDILNQLKEEVRKQLDEEENIHENINSVSPRNRGQCDLSYYSQTLPIPQNNLEPLTLNLITQTSHRSTQTDTISLTLENDVDSLVEPNTITDTHIQEIHDKFITVLTLYSGLDPASRPRLPKLKYSPKLNSLIQIFNQNILNNFLTESTKLVDIHTLIYCTALVISEELDYKITEYTRKDIRPKYNKPSWQYRLEKDIEKLRADCGRLTQYINNNRSKKVVKRVEEIFKNNRIHTKHENNNRKPEEFLDTLKQKLALKAQRLKRYKKTQQRKKDNILFTTNEKMFYRQLRSPQTDTSTQNTETIPTKEELESYWASLWEEQKQHNDQADWINEERNRWNTIEEMEFDEVTEGDIKIITTKLHNWKSPGIDKIHNFWFKKLTSLHKAIAKNFTEIILHKQNIPEFIATGITYMLPKDKVTTHASQYRPITCLPTIYKILTAVISSKINIHIENHNIIAEEQKGCRRGHMGCKEQLVIDSVIHKHATNKNRNLHCTYIDYKKAFDSIPHSWLIQILKIYRINKNIIDFLQNIMKYWKTTLHLTSRDRSVTTREISIRKGIYQGDSLSPLWFCLALNPLSQILNNYRTGYHLKHASDNITISHLIYMDDIKLYAKSEKDMKTLLEATSTFSKDINMHFGLDKCKTVHTVRGKIRPGDYTINDSDSITALEPTDLYKYLGYKQLKGIDHTKIKNSLSVEYQRRINTICKTQLSGKHLIKALNSYAIPIMTYSFGIIKWSKTDIEKIERTTRTTLTKHNYLHPKAAVERLTIKRETGGRGLIDIYHLWLKQLYKLKTFFITKSHTSSIHNAITHNDNNFTPLNLHDPTNLQNPNDIDRQQKKIEDWKKKVLHGRHPHDLEQTHIDKIASNKWLKIGNIFPETEGFMMAIQDQIINTKNYRKFIIKDPTITIDKCRRCHAQPETIQHITGACISLTQTDYTHRHNQIANIIHQSLARKYSLIQDSNTPYYKYKPEIILENPSYKLYFDRAILTDRTIHYNRPDITLQDKRNKTTYLIDIAVPNTHNIQKTIAEKNNKYAELKDEVTRIWKQEKVYVVPIVLSTTGVIPKHLHHSLKLLNLNKSIYITLQKASILNTCRIVRKFMQIDENEITHHNNSTTVPLP

SEQ ID NO: 20943 - protein, 834 aa, Deilephila porcellus
MFYRQLRSPQTDTSNQNTETIPTKEELESYWASLWEEQKQHNDQADWINEEKNRWNTIEEMEFDEVTEGDIKIITTKLHNWKSPGIDKIHNFWFKKLTSLHKAIAKNFTEVILHKQNIPEFIATGITYMLPKDKVTTHASQYRPITCLPTIYKILTAVISSKINIHIENHNIIAEEQKGCRRGHMGCKEQLVIDSVIHKHATNKNRNLHCTYIDYKKAFDSIPHSWLIQILKIYRINKNIIDFLQNIMKYWKTTLHLTSRNRSVTTREISIRKGIYQGDSLSPLWFCLALNPLSQILNNYRTGYHLKHASDNITISHLIYMDDIKLYAKSEKDMKTLLEATSTFSKDINMHFGLDKCKTVHIVRGKIRPGDYTINDSDSITALEPTDLYKYLGYKQLKGIDHTKIKNSLSVEYQRRINTICKTQLSGKHLIKALNSYAIPIMTYSFGIIKWSKTDIEKIERTTRTTLTKHNYLHPKAAVERLTIKRETGGRGLIDIYHLWLKQLYKLKTFFITKSHTSSIHNAITHNDNNFTPLNLHDPTNLQNPNDIDRQQKKIEDWKKKVLHGRHPHDLEQTYIDKIASNKWLKIGNIFPETEGFMMAIQDQIINTKNYRKFIIKDPTIIIDKCRRCHAQPETIQHITGACISLTQTDYTHRHNQIANIIHQSLARKYSLIQDSNTPYYKYKPEIILENPSYKLYFDRAILTDRTIHYNRPDITLQDKRNKTTYLIDIAVPNTHNIQKTIAEKNNKYAELKDEVTRIWKQEKVYVVPIVLSTTGVIPKHLHHSLKLLNLNKSIYITLQKASILNTCRIVRKFMQIDENEITHHNNSTTVPLP

SEQ ID NO: 20944 - protein, 1292 aa, Hemaris fuciformis
METRSKKKLRGPLPGGDRRGTPGADAGCYSMQTVSGEELSRRAPTGSPESITAANLTDRQTDSRSNSPIEPYSPSTKSYTSSTCTSPSVSTSPPTSNFIDPITPALDVTREVNTFLPASTKAGKPRVRMSWSKDVNLFIMRTYYYITKLETDMTIYRKQLHEHFSQQYPNIKVTEQRLSDQKRAIERNKLLPQDVLDKLKEEVRRQLNEEVENTDSETHLNVRNHDHNETQNHITCQQTQNPIHITQTSHISTQTEILTLTLENDIDKFVDTNSPTDIYIKELQDKLTTTLTLYSGLDPGSRPKLPKLKYSPKLNLLVKIFNENILKDFILESTQLIDLHTLIYCTAFVITEELDYKITEIRNTVTKPRKNNKPAWQHRLEKDIEKLRADCGRLTQYINNNRSNKIVNKVKEIFKNHSVHTRHEENNKTPEEFLDTLKQKLALKAQRLKRYKKSEQRRKDNNLFNNNEKMFYKQLQNKYKNSPNENNEHTPSKENLENFWAGIWEESVQHNDKADWIKEEENRWSTIGEMEFTEVTESDIKLTTIRLHNWKSPGIDKIHNFWYKKLTSLHKTIAKNLTDVILFKQNIPHFITTGITYMLPKDKTSSQPSQYRPITCLPTLYKILTSVISFKINSHIENHNIIAEEQKGCRRGHMGCKEQLIIDSTIHKQATTKSRNLHCTYIDYKKAFDSIPHSWLIQILKIYRINKNIVDFLQNIMTQWRTTLHLNNHINPIITREIHIRKGIYQGDSLSPLWFCLALNPLSHILHRCRAGYRLEHSSEDTNISHLIYMDDLKLYAKNEKDMEKLLDATTTFSQDINMQFGLDKCKTVHIVKGKIQPGDYTVNNSEIIAAMEPTDLYKYLGFKQLKGLDHTKIKHTLTVEYQNRVKSISKSQLSGKNLIKALNTYAIPILTYSFGIIKWSKTDIENIERITRTTLTKHNHLHPKSAIERLTLKRELGGRGLIDIFNLWQKQIYNLQTFFHEKSRSSSIHNAIARNDKNFTPLNLHEQTNLNNPNEINRQEQKLRDWKKKVLHGRHPHDLEQTHIDAIGSNKWLTIGNLFPETEGFVIAIQDQIINTKNYRKFIIKDPTMTNDKCRRCHAQPETIQHITGACISLTQTDYTHRHNQVANIIHRALALKYSLIENRKTPYYKYTPETVLENASHKLYYDRAILTDRTIHYNRPDIVLQDKKNKTTYLIDISVPNTHNIQKTIAEKNNKYIELKDEVTRVWKQEKVYVVPIVLSTTGVIPKHLHHSLKLLTLNKNIYCTLQKAAILNTCRIVRKFMQLDENEVV

SEQ ID NO: 20945 - protein, 1309 aa, Deilephila porcellus
METRSKKKLRGPLPGGDRRGTPGADAGCSSVRTVSGEELIRRTPTGSPENTTADNNLDRLTDSRSNSPIEPYSPSTISYTPSTCESPSIPSSPPSNNIRDPPILALDVAREVNTFLPVTTKAGKPRVRMSWSKEVNLYIMRTYYYVTKLETDMTIYRKQLHEHFSRQYPDIKVTEQRLSDQKRAIERNKLLSQDILNQLKEEVKKQLDEEENIHENINSVSPTNRGQCDLSYYSQTLPVPQNNLEPLTLNLITQTSHRSTQTDTISLTLENDVDSLVEPNTITDTHIQEIHNKFITVLTLYSGLDPASRPRLPKLKYSPKLNSLIQIFNQNILNNFLTESTKLVDIHTLIYCTALVISEELDYKITEYTRKDIRPKYNKPSWQYRLEKDIEKLRADCGRLTQYINNNRSKKVVKRVEEIFKNNRIHTKHENNNRKPEEFLDTLKQKLALKAQRLKRYKKTQQRKKDNILFTTNEKMFYRQLRSPQTDTSTQNTETIPTKEELESYWASLWEEQKHHNDQADWINEEKNRWNTIEEMEFDEVTEGDIKIITTKLHNWKSPGIDKIHNFWFKKLTSLHKAIAKNFTEIILHKQNIPEFIATGITYMLPKDKVTTHASQYRPITCLPTIYKILTAVISSKINIHIENHNIIAEEQKGCRRGHMGCKEQLVIDSVIHKHATNKNRNLHCTYIDYKKAFDSIPHSWLIQILKIYRINKNIIDFLQNIMKYWKTTLHLTSRNRSVTTREINIRKGIYQGDSLSPLWLCLALNPLSQILNNYQTGYHLKHASDNITISHLIYMDDIKLYAKSEKDMKILLEATSTFSKDINMHFGLDKCKTVHIVRGKIRPGDYTINDSDSITALEPTDLYKYLGYKQLKGIDHTKIKNSLSVEYQRRINTICKTQLSGKHLIKALNSYAIPIMTYSFGIIKWSKTDIEKIERTTRTTLTKHNYLHPKAAVERLTIKRETGGRGLIDIYHLWLKQLYKLKKFFITKSHTSSIHNAITHNDNNFTPLNLHDPTNLQNPNDIDRQQKKIEDWKKKVLHGRHPHDLEQTHIDKIASNKWLKIGNIFPETEGFMMAIQDQIINTKNYRKFIIKDPTITIDKCRRCHAQPETIQHITGACISLTQTDYTHRHNQIANIIHQSLARKYSLIQDSNAPYYKYKPEIILENSSYKLYFDRAILTDRTIHYNRPNITLQDKRNKTTYLIDIAVPNTHNIQKTIAEKNNKYAELKDEVTRIWKQEKVYVVPIVLSTTGVIPKHLHHSLKLLNLNKSIYITLQKASILNTCRIVRKFMQIDENEITHHNNSTTVPLP

SEQ ID NO: 20946 - protein, 1343 aa, Hemaris fuciformis
MSTCNNNNNNNNNKPPKNQPHVLIDHLITWGAETRFDNYWRGQRGSGNPFNMETRSKKKLRGPLPGGDRRGTPGADAGCYSMQTVSGEELSRRAPTGSPESITAANLTDRQTDSRSNSPIEPYSPSTKSYTPSTCTSPSVSTSPPTSNFIDPITPALDVTREVNTFLPASTKAGKPRVRMSWSKDVNLFIMRTYYYITKLETDMTIYRKQLHEHFSQQYPNIKVTEQRLSDQKRAIERNKLLPQDVLDKLKEEVRRQLNEEVENTDSETHLNVRNHDHNETQNHITCQQTQNPIHITQTSHISTQTEILTLTLENDIDKFVDTNSPTDIYIKELQDKLTTTLTLYSGLDPGSRPKLPKLKYSPKLNLLVKIFNENILKDFILESTQLIDLHTLIYCTAFVITEELDYKITEIRNTVTKPRKNNKPAWQHRLEKDIEKLRADCGRLTQYINNNRSNKIVNKVKEIFKNHSVHTRHEENNKTPEEFLDTLKQKLALKAQRLKRYKKSEQRRKDNNLFNNNEKMFYKQLQNKYKNSPNENNEHTPSKENLENFWAGIWEESVQHNDKADWIKEEENRWSTIGEMEFTEVTESDIKLTTIRLHNWKSPGIDKIHNFWYKKLTSLHKTIAKNLTDVILFKQNIPHFITTGITYMLPKDKTSSQPSQYRPITCLPTLYKILTSVISFKINSHIENHNIIAEEQKGCRRGHMGCKEQLIIDSTIHKQATTKSRNLHCTYIDYKKAFDSIPHSWLIQILKIYRINKNIVDFLQNIMTQWRTTLHLNNHINPIITREIHIRKGIYQGDSLSPLWFCLALNPLSHILHRCRAGYRLEHSSEDTNISHLIYMDDLKLYAKNEKDMEKLLDATTTFSQDINMQFGLDKCKTVHIVKGKIQPGDYTVNNSEIIAAMEPTDLYKYLGFKQLKGLDHTKIKHTLTVEYQNRVKSISKSQLSGKNLIKALNTYAIPILTYSFGIIKWSKTDIENIERITRTTLTKHNHLHPKSAIERLTLKRELGGRGLIDIFNLWQKQIYNLQTFFHEKSRSSSIHNAIARNDKNFTPLNLHEQTNLNNPNEINRQEQKLRDWKKKVLHGRHPHDLEQTHIDAIGSNKWLTIGNLFPETEGFVIAIQDQIINTKNYRKFIIKDPTMTNDKCRRCHAQPETIQHITGACISLTQTDYTHRHNQVANIIHRALALKYSLIENRKTPYYKYTPETVLENASHKLYYDRAILTDRTIHYNRPDIVLQDKKNKTTYLIDISVPNTHNIQKTIAEKNNKYIELKDEVTRVWKQEKVYVVPIVLSTTGVIPKHLHHSLKLLTLNKNIYCTLQKAAILNTCRIVRKFMQLDENEVV

SEQ ID NO: 20947 - protein, 1295 aa, Hyles vespertilio
MRGPLPGGDRRGTPGADAGCSSIRTVSGEELSRRTPTGSPENITADNDRLTDSRSNSPIEPYSPSTISYTPSIPDTLSLPSSPPTTRDPPILALDAAREVNTFLPVTTKAGKPRVRMSWSKEVNLFIMRTYYYVTKLETDMTIYRKQLHEHFSRQYPDIKVTEQRLSDQKRAIERNKLLSQDMLDQLKEEVRKQLNEEENRNENVNSVTPTNRGRIDNYRPTLPLQQNNSEPSTPNVITQLSDRSTQTETISFTLENEVDTLVEPNTITDTHIQDMQNKFITALTLYSGLDPASRPRLPKLKYTPKLNSLIQIFNQNILNNFLSESTKLVDLHTLIYCTALVISEELNYTITEYTRKDTRPKHNKPPWQYRLEKDIEKLRADCGRLTQYINKNRSNKVVKRVEEIFKNNKVHTKHENNNRKPEEFLDTLKQKLALKAQRLKRYKKTQQRKQDNILFTTNEKRFYRQLRSPQTDISSQHNESMPTKEELESYWGSLWEEQKQHNDGADWIKEETNTWNAIEEMEFDEVTEGDINIITTRLHNWKSPGIDKIHNFWFKKLTSLHKAIAKNFTEIILHKQNIPEFIATGITYMLPKDKITIQASQYRPITCLPTIYKILTAVISTKINAHIQNHNIIAEEQKGCRQGHMGCKEQLVIDSVIHKHATTKNRNLHCTYIDYQKAFDSVPHSWLIQILKIYKINKNIIDFLQNIMKYWKTTLHLTSQNSSITTREISIRKGIYQGDSLSPLWFCLALNPLSRILNNYRSGYHLKHMSGNITISHLIYMDDIKLYAKTEKDMKILIDATSTFSKDINMNFGLDKCKTVHIIRGKIRPGDYIVNQTEIITAMEPTDLYKYLGYKQLKGIDHTNIKNSLSAEYHRRINAICKTQLSGKHLIKALNTYAVPILTYSFGVIKWSKTDIEKIERTTRTTLTKHNHLHPKSAVERLTIKRETGGRGLIDIYHLWLKQLFNLKTFFITKSHTSNLHNAITHNDNNFTPLNLQDQTNLQNPNDIDRQQKKIEDWKKKVLHGRHPHDLEQTHIDKIASNKWLKIGNIFPETEGFMMAIQDQIINTKNYRKFIIKDPTITIDKCRRCHAQSETIQHITGACISLTQTDYTHRHNQIANIIHQSLARKYSLIKDNNTPYYKYKPETILENASYKLYFDRAILTDKTIHYNRPDITLQDKINKTTYLIDIAVPNTHNIQKTIAEKNNKYAELKDEVTRIWKQEKVYIVPIVLSTTGVIPKHLHHSIKLLSLNKSIYITLQKASILNTCRIVRKFMQIDENEITQHSNSTTIPLP

SEQ ID NO: 20948 - protein, 1316 aa, Laothoe populi
METRSKKKLRGPLPGGDRRGTPGADAGCFSIRSVSGEELSRRTPTGLPEIVTADIDQLDGLTDSRTNSRIEPYSPSTTSYVPSTRSSPSIPSSPPSNNFIDPPTSALDVAREVKTFLPASTKAGKPRVRMSWSKEVNMFIMRTYYYITKLETDMTIYRKHLHERFSQQYPDIKVTEQRVSDQRRAIERNKLLSPDILDKLKQEVNRQLQAELDETEDVDITNTINQNQIDLQVLTQYSQSLTCPETRTQNLSYYNATNQTAHTSTQTETITCTLENDVETLVEPNLITDTFIQEMQEKLTTSLTLYSGLDPAVRPKLPKLRYSPKLTKLIQVFNCKILNQYLSEDTQLIDIHTLIYCSAVVISEELGYRITEHTTRKNRLRHNNKPSWQHRLEKDIEKLRADCGRLTQYINNNRSRKVVKRVEEIFKTKMTHTRHENRNNKPEEYLDTLKQKLALKVNRLRRYKKALQRKQDNILFVTNEKTFYRNLRKPRTETEENNENTPTKENLETFWANIWEEQIQHNDKATWIKEEEKRWTAIEEMEFTEVTELDIKFITTKLNNWKSPGIDKIHNYWFKKLTSLHRAIATNFTRIILGKQNIPPFIATGITYMLPKDKISSNPSQYRPITCLPTIYKILTAVISHKINKHIEHHNIIAEEQKGCRRGHRGCKEQLVIDSTIHKHATTKNRNLHCTYIDYKKAFDSIPHSWLIQTLKIYKINNYIIEFLQNIMSQWKTTLYLNNYRNTVMTRQINIRRGIYQGDSLSPLWFCLAMNPLSHQLHLCRAGYHLKDATTETIISHLIYMDDIKLYAKTDKDMRKLIETTSNFSKDISMQFGLDKCKTIHIIRGKIRPGDYVTGYSDTITAMEPSDLYKYLGYEQLKGLNHTNIKHTLFTEYQKRINVICKTQLSGKFLIKALNTYAIPILTYSFGIIKWSKTDIEKIERTTRTTLTKHSHLHPKSAIERLNIKRQDGGRGLIDIHNLWQKQLFNLYTFFHEKSLTSNLHRAIVTNDHNFTPLNLHDRTNLENTINNDLLKQKFEDWKKKTIHGRHPHDLEQNHVDKIASNKWLTVGNLFPETEGFIIAIQDQVINTKNYRKYIIKDTTISNDKCRRCHTQPETIQHITGACTSLTQTDYTHRHNQIANIIHQTLATKYTLIPNTNTPYYKYNPETVLENQSYKLYYDRAILTDRTIHYNRPDITLQDKTNKITYLIDIAVPNTHNVQKTIIEKISKYADLKEEVARIWKQNKVYVVPIVLSTTGIIPKHLHHSLGLLNLNKSIYIKIQKAAILNTCRIVRKFMQIDENEIAQHNTTVNTGIRVS

SEQ ID NO: 20949 - protein, 1041 aa, Hyles vespertilio
MTIYRKQLHEHFSRQYPDIKVTEQRLSDQKRAIERNKLLSQDMLDQLKEEVRKQLNEEENRNENVNSVTPTNRGRIDNYRPTLPLQQNNSEPSTPNVITQLSDRSTQTETISFTLENEVDTLVEPNTITDTHIQDMQNKFITALTLYSGLDPASRPRLPKLKYTPKLNSLIQIFNQNILNNFLSESTKLVDLHTLIYCTALVISEELNYTITEYTRKDTRPKHNKPPWQYRLEKDIEKLRADCGRLTQYINKNRSNKVVKRVEEIFKNNKVHTKHENNNRKPEEFLDTLKQKLALKAQRLKRYKKTQQRKQDNILFTTNEKRFYRQLRSPQTDISSQHNESMPTKEELESYWGSLWEEQKQHNDGADWIKEETNTWNAIEEMEFDEVTEGDINIITTRLHNWKSPGIDKIHNFWFKKLTSLHKAIAKNFTEIILHKQNIPEFIATGITYMLPKDKITIQASQYRPITCLPTIYKTLTAVISTKINAHIQNHNIIAEEQKGCRQGHMGCKEQLVIDSVIHKHATTKNRNLHCTYIDYQKAFDSVPHSWLIQILKIYKINKNIIDFLQNIMKYWKTTLHLTSQNSSITTREISIRKGIYQGDSLSPLWFCLALNPLSRILNNYRSGYHLKHMSGNITISHLIYMDDIKLYAKTEKDMKILIDATSTFSKDINMNFGLDKCKTVHIIRGKIRPGDYIVNQTEIITAMEPTDLYKYLGYKQLKGIDHTNIKNILSAEYYRRINAICKTQISGKHLIKALNTYAVPILTYSFGVIKWSKTDIEKIERTTRTTLTKHNHLHPKSAVERLTIKRETGGRGLIDIYHLWLKQLFNLKTFFITKSHTSNLHNAITHNDNNFTPLNLQDQTNLQNPNDIDRQQKKIEDWKKKVLHGRHPHDLEQTHIDKIASNKWLKIGNIFPETEGFMMAIQNQIINTKNYRKFIIKDPTITIDKCRRCHAQSETIQHITGACISLTQTDYTHRHNQIANIIHQSLARKYSLIKDNNTPYYKYKPETILVMPHINFISTVLFSLIKRFIIIGPISLCRIR

SEQ ID NO: 20950 - protein, 1305 aa, Hyles vespertilio
METRYRKKMRGPLPGGDRRGTPGADAGCSSIRTVSGEELSRRTPTGSPENITADNDRLTDSRSNSPIEPYSPSTISYTPSIPDTLSLPSSPPTTRDPPILALDAAREVNTFLPVITKAGKPRVRMSWSKEVNLFIMRTYYYVTKLETDMTIYRKQLHEHFSRQYPDIKVTEQRLSDQKRAIERNKLLSQDMLDQLKEEVRKQLNEEENINENVNSVTPINRGQCNLPYYRSTLPLQQNNSEPSTPNVITQISDRSTQTETISFTLENEVDTLVEHNTITDTHIQDIQNKFITALTLYSGLDPASRPRLPKLKYTPKLNSLIQIFNQNILNNFLSESTKLVDLHTLIYCTALVISEELNYTITEYTRKDTRPKHNKPPWQYRLEKDIEKLRADCGRLTQYINKNRSNKVVKRVEEIFKNNKVHTKHENNNRKPEEFLDTLKQKLALKAQRLKRYKKTQQRKQDNILFTTNEKRFYRQLRSPQTDISSQHNESMPTKEELESYWGSLWEEQKQHNDGADWIKEETNTWNAIEEMEFDEVTEGDINIITTRLHNWKSPGIDKIHNFWFKKLTSLHKAIAKNFTEIILHKQNIPEFIAAGITYMLPKDKITIQASQYRPITCLPTIYKILTAVISTKINAHIQNHNIIAEEQKGCRQGHMGCKEQLVIDSVIHKHATTKNRNLHCTYIDYQKAFDSVPHSWLIQILKIYKINKNIIDFLQNIMKYWKTTLHLTSQNSSITTREISIRKGIYQGDSLSPLWFCLALNPLSRILNNYRSGYHLKHMSGNITISHLIYMDDIKLYAKTEKDMKILIDATSTFSKDINMNFGLDKCKTVHIIRGKIRPGDYIVNQTEIITAMEPTDLYKYLGYKQLKGIDHTNIKNSLSAEYHRRINAICKTQLSGKHLIKALNTYAVPILTYSFGVIKWSKTDIEKIERTTRTTLTKHNHLHPKSAVERLTIKRETGGRGLIDIYHLWLKQLFNLKTFFITKSHTSNLHNAITHNDNNFTPLNLQDQTNLQNPNDIDRQQKKIEDWKKKVLHGRHPHDLEQTHIDKIASNKWLKIGNIFPETEGFMMAIQDQIINTKNYRKFIIKDPTITIDKCRRCHAQSETIQHITGACISLTQTDYTHRHNQIANIIHQSLARKYSLIQDTNTPYYKYKPEIILENSSYKLYFDRAILTDRTIHYNRPDITLQDKINKTTYLIDIAVPNTHNIQKTIAEKNNKYGELKDEVTRIWKQEKVYIVPIVLSTTGVIPKHLHHSIKLLSLNKSIYITLQKASILNTCRIVRKFMQIDENEITQHSTSTTIPLP

SEQ ID NO: 20951 - protein, 1303 aa, Hyles vespertilio
METRYRKKMRGPLPGGDRRGTPGADAGCSSIRTVSGEELSRRTPTGSPENITADNDRLTDSRSNSPIEPYSPSTISYTPSIPDTLSLPSSPPTTRDPPILALDAAREVNTFLPVTTKAGKPRVRMSWSKEVNLFIMRTYYYVTKLETDMTIYRKQLHEHFSRQYPDIKVTEQRLSDQKRAIERNKLLSQDMFDQLKEEVRKQLNEEENRNENVNSVTPTNRGRIDNYRPTLPLQQNNSEPSTPNVITQLSDRSTQTETISFTLENEVDTLVEPNTITDTHIQDMQNKFITALTLYSGLDPASRPRLPKLKYTPKLNSLIQILNQNILNNFLSESTKLVDLHTLIYCTALVISEELNYTITEYTRKDTRPKHNKPPWQYRLEKDIEKLRADCGRLTQYINKNRSNKVVKRVEEIFKNNKVHTKHENNNRKPEEFLDTLKQKLALKAQRLKRYKKTQQRKQDNILFTTNEKRFYRQLRSPQTDISSQHNESMPTKEELESYWGSLWEEQKQHNDGADWIKEETNTWNAIEEMEFDEVTEGDINIITTRLHNWKSPGIDKIHNFWFKKLTSLHKAIAKNFTEIILHKQNIPEFIATGITYMLPKDKITIQASQYRPITCLPTIYKILTAVISTKINTHIQNHNIIAEEQKGCRQGHMGCKEQLVIDSVIHKHATTKNRNLHCTYIDYQKAFDSVPHSWLIQILKIYKINKNIIDFLQNIMKYWKTTLHLTSQNSSITTREISIRKGIYQGDSLSPLWFCLALNPLSRILNNYRSGYHLKHMSGNITISHLIYMDDIKLYAKTEKDMKILIDATSTFSKDINMNFGLDKCKTVHIIRGKIRPGDYIVNQTEIITAMEPTDLYKYLGYKQLKGIDHTNIKNSLSAEYHRRINAICKTQLSGKHLIKALNTYAVPILKYSFGVIKWSKTDIEKIERTTRTTLTKHNHLHPKSAVERLTIKRETGGRGLIDIYHLWLKQLFNLKTFFITKSHTSNLHNAITHNDNNFTPLNLQDQTNLQNPNDIDRQQKKIEDWKKKVLHGRHPHDLEQTHIDKIASNKWLKIGNIFPETEGFMMAIQDQIINTKNYRKFIIKDPTITIDKCRRCHAQSETIQHITGACISLTQTDYTHRHNQIANIIHQSLARKYSLIKDNNTPYYKYKPETILENASYKLYFDRAILTDKTIHYNRPDITLQDKINKTTYLIDIAVPNTHNIQKTIAEKNNKYAELKDEVTRIWKQEKVYIVPIVLSTTGVIPKHLHHSIKLLSLNKSIYITLQKASILNTCRIVRKFMQIDENEITQHSNSTTIPLP

SEQ ID NO: 20952 - protein, 1309 aa, Deilephila porcellus
METRSKKKLRGPLPGGDRRGTPGADAGCSSVRTVSGEELIRRTPTGSPENTTADNNLDRLTDSRSNSPIEPYSPSTISYTPSTCESPSIPSSPPSNNIRDPPILALDVAREVNTFLPVTTKAGKPRVRMSWSKEVNLYIMRTYYYVTKLETDMTIYRKQLHEHFSRQYPDIKVTEQRLSDQKRAIERNKLLSQDILNQLKEEVRKQLDEEENIHENINSVSPTNRGQCDLFYYSQTLPVPQNNLEPLTLNLITQTSHRSTQTDTISLTLENDVDSLVEPNTITDTHIQEIHNKFITVLTLYSGLDPASRPRLPKLKYSPKLNSLIQIFNQNILNNFLTESTKLVDIHTLIYCTALVISEELDYKITEYTRKDIRPKYNKPSWQYRLEKDIEKLRADCGRLTQYINNNRSKKVVKRVEEIFKNNRIHTKHENNNRKPEEFLDTLKQKLVLKAQRLKRYKKTQQRKKDNILFTTNEKMFYRQLRSPQTNTSTQNTETIPTKEELESYWASLWEEQKQHNDQADWINEERNRWNTIEEMEFDEVTEGDIKIITTKLHNWKSPGIDKIHNFWFKKLTSLHKAIAKNFTEIILHKQNIPEFIATGITYMLPKDKVTTHASQYRPITCLPTIYKILTAVISSKINIHIENHNIIAEEQKGCRRGHMGCKEQLVIDSVIHKHATNKNRNLHCTYIDYKKAFDSIPHSWLIQILKIYRINKNIIDFLQNIMKYWKTTLHLTSRNRSVTTREISIRKGIYQGDSLSPLWFCLALNPLSQILNNYRTGYHLKHASDNITISHLIYMDDIKLYAKSEKDMKTLLEATSTFSKDINMHFGLDKCKTVHIVRGKIRPGDYTINDSDSITALEPTDLYKYLGYKQLKGIDHTKIKNSLSVEYQRRINTICKTQLSGKHLIKALNSYAIPIMTYSFGIIKWSKTDIEKIERTTRTTLTKHNYLHPKAAVERLTIKRETGGRGLIDIYHLWLKQLYKLKTFFITKSHTSTIHNAITHNDNNFTPLNLHDATNLQNPNDIDRQQKKIEDWKKKVLHGRHPHDLEQTHIDKIASNKWLKIGNIFPETEGFMMAIQDQIINTKNYRKFIIKDPTITTDKCRRCHAQPETIQHITGACISLTQTDYTHRHNQIANIIHQSLARKYSLIQDSNTPYYKYKPEIILENPSYKLYFDRAILTDRTIHYNRPDITLQDKRNKTTYLIDIAVPNTHNIQKTIAEKNNKYAELKDEVTRIWKQEKVYVVPIVLSTTGVIPKHLHHSLKLLNLNKSIYITLQKASILNTCRIVRKFMQIDENEITHHNNSTTVPLP

SEQ ID NO: 20953 - protein, 1275 aa, Protographium marcellus
METRSKKKLRGPLPGGNRRGTPGADAGCFSLRSVSGVELSRRAPAGLPENVTAENFKIDSSTNCVEVSYIERSSPNLQQPNSATNLLRPMPALDVAREGNAFLSASTKAGKPRVRMKWSKDVNIFIMRTYYLITKLETDMTTYRKQLHEIFSQKYPEVNVTEQRLSDQRRAIVRNNLLSPRMLDDLKEEAQRQLLGQDELSQPTANLFQADRRYSQSLSPDQPCSTNIWTSQFTQTETVTLLIENEIETLPGDCNIITEKYVQEIYDKLLTTLKQYSGIDPTLRPRLPKLKYIPKLFELIKIFNENILDLFHSEDTQLTDTHTLIYCTAVVISKELGYKINENVTISRKLRKNSKPPWQIRLENEINKLRADCGRLTQYINKNRSRKVVKRVEEIFKNRAIHTRHEDNNKDPKEFLDTLKQKLTLKAHRLKRYLKAQQRRDDNNLFKNSEKSFYRNIQSQRNNRIPVENSEDIPSKEHLENFWAGIWEEQVTHNDNATWIKEEIARWNAIEEMSFTGITEYDIKLTTARLSNWKSPGVDKIHNFWYKKLTTLHKIIAKHLTDLILGHQNIPEFIATGITFMLPKTATLSSQPSQYRPITCLPTIYKVLTSVIAFKINKHIENNNIIAEEQKGCRRGHMGCKEQLVIDSTIHKHATAKNRNLHCTYIDYKKAFDSIPHTWLVKILQVYKINQNIITFLQHIMTHWKTTLHIKNSNKSMVTRQIFIKKGIYQGDSLSPLWFCLAMNPLSNQLNLCQVGYNLKYAAQNTRISHLIYMDDIKLYTSTERDMKRLIDTTTNFSKDINMQFGLDKCKILHILRGKVQPGNYVIDRTEVITAMEPCDLYKYLGYKQLKGLHHATIKQTLINEYKNRLTLICKTQLTGKNLTKAINTYAIPILTYSFGIIKWSKTDIEKLERTTRTTLTKNNYLHPKSAIERLTIKRQDGGRGVIDIQNLWQKQILALKNFFLKKSDTSKIHKAVMLNDYNFTPLGLSEHSHFQDPNSNDTYNVKIENWKRKALHGRHPHDLQQTHIDTSASNKWLKIGNLFPETEGFMIAIQDQVINTKNYRKYIIKDPTISNDQCRKCHSQSETIQHITGACTTLTQSDYTYRHNQIANIIHQNLALKHSLIEDTNTPYYKYTPQNVLENSEFKLYYDRAILTDKTIQYNRPDIVLKDKTNKITYLIDIAVPNTHNIQKTIAEKIHKYTELKDEVTRIWKQSKVYVVPIVLSTTGVIPKHLHNSLSLLNFEKSLYVSLQKAAILNTCRIVRKFLQIDEFAT

SEQ ID NO: 20954 - protein, 1297 aa, Leptidea sinapis
METRSMKKRKIGPLPGGDRRGTPGAGAGCLSMRTVSGEELNRRAPTGSSENTTAENDRLTDRTTPTEPYSPCTISYTPSIPSSPLSSRYSPTPTLDAARKANAFLLASTKAGKPRVRMKWSKEMNLFIMRTYYYITKLETDLTTYRKQLHELFLQKYPDLNVTEQRIADQRRVIVKNKLLNQETLNQIKEEIKSQLEIENENQFHINISEPTNDVIPCSSTQTIPNTQHNQSLNTFTYNIQSSQTFSYITQTSHNMSTQTEFVTIMMENDIDTVLDHNPGTNTEIEEICYKFKTALTQYSGMDPLVRPKLPKLRYNSHLFQLVNMFNSDILSRFISDDTKLTDIHTIVYCVALVISEELNYKVTEYIRSTRPKDCYKPPWQIRLEKDIEKLRADCGRLTQYINNNRSRKIIKHVKAIFKTGNTHTKHENSNIKPEEFLDTLKQKLALKVHRLKRYKKAQERKNDNTMFSTNEKNFYRNLHKLKTDTVKNPNVPTQEQLETFWSGIWEQQVHHNDKADWIIEEENKWNAIEEMDFTEITETDINNITARLHNWKSPGIDKIHNFWYKKLFSLHKIMAKNITDIIIGKQKIPDFIATGITYMLPKLQISPLPSQYRPITCLPTIYKILTSAITTKINKHVEHYNIIAEEQKGCRRGHMGCKEQLIIDSTIHKNATSKNRNLHCTYIDYKKAFDSIPHSWLIKILQIYKINPKIINFLHDIMSRWKTTLYLNTNQNTITTREIAIRKGIYQGDSLSPLWFCLALNPLSHLLRDCRAGYRLKHDIQETIVSHLIYMDDIKLYGKTEMEMKKLIDTTAQFSKDINMEFGLDKCRTLHIKRGKIRPGDYAVNDIDIIRAMEQTELYKYLGYKQLRGLDHTEIKNTLTIEFKKRINALCKTQLTSKHLIKSLNTYAIPILTYSFGIIKWTKTDIEQIERTIRTTLTKHNNLHPKSAIERLTIKREYGGRGLIDLNHLCQKQVGNLKDFFHLKSQTSEIHKAIVKNDINFTPLNLHEDINSQNTRRNDPQIQKLDSWKRKVLHGRHPHDLEQSHINTAASNKWLKIGNLFPETEGFIIAIQDQVVNTKNYRKFIIKDPSVSNDKCRKCHVQPETIQHITGGCTTLTQTDYTHRHNQVVNIIHQKLALKHKLIQNTNTPYYKYKPQTVLENDTYKLYFDRAILTDRTIHYNRPDITLKDKLNEITYLIDIAVPNTHNLQKTISEKINKYTELKDEVARIWNQKKVYVIPIVLSTTGVIPNHLLHSLKLLELKETLYITLQKVAILNTCRIVRKFLQIDEHDISPYT

SEQ ID NO: 20955 - protein, 1297 aa, Ophraella communa
METRAKITRIRPLPGGIRRGTPGAGAGCDSIRPIGGEELSRRVPPDKITTAEANDDGDELIDSTNSPTETFSQSTASHALTRSSSPSIISSSSVSLNPPIPTLSVAREASSFLSAPTKAGKPRVRMRWTKEVNTFIMRAYYYTTKLETDMTTYRQKLHELFSQQYPEIKVTEQRISDQRRTIVRNKLISTEMLHQLKEEVRMQLEVFNNIGNHPSPLIQESDESNTFVQSIINVAQEPGTQSQIYTQTYPYIQNTQKSSTCTQTEPMILTLENDVKTIIDQNFITELKEQEIHDKFISTLTQYSGMDPESRPKLPKLKYNPKLVKLIQLFNNKILKQYITEDTLFVDLHTIIYCTAVVISEELNYKITEHTGYKASKNKSKPAWQQRLEKDIAILRADCGRLTQYINNNRSGKVVKRVEAIFKNSSTHTSHELGNKKPEEYLDTLKQKLALKAHRLKRYKKAQQRKDDNIIFTTNEKAFYRNLKNPQNSTSDEVNIDTPTKEQLEIFWSGIWEEKTQHNVKAPWITEEETRWSTIEEMEFAQITESDITNTTAQLHNWKSPGVDKIHNFWYKKLFSVHKSLAKNLTDIIFGHQNSPDFLTSGITFMLPKTNYSSQPSQYRPITCLPTIYKILTAIITKKINSHVEKHKIIAEEQKGCRRGHMGCKEQLIIDSIIHKHATTKNRNLHCTYIDYQKAFDSISHSWLIEILKIYKINSKLVKFLQRTMSQWKTTLYLNTRHSALTTRQIAIKKGIFQGDSLSPLWFCLALNPLSHVLHQCGAGYNLKHPTHETTISHLIYMDDIKLYSKSETDMKKLIEITSRFSQDINMHFGLDKCKTLHIIKGKIKPGDYKINITDTITAMDSTDFYKYLGYQQLKGLDHKSIKQILNAEYKKRINAVCKTQLSGKNLIKAINAFAIPILTYSFGLIKWSGTDIEQIERITRTTLTKHNNLHPKSAIERLTIKRQDGGRGLIDIRNLWQNQINRLKIFFHTKAPASSIHRAITLHDMNITPLNLHEHKDTQITYSNDSQKQNIVNWKKKVLHGRHPHDLEQPHINAIASNKWLKIGNLFPETEGFMIAIQDQIINTKNYRKYIIKDSTVTNDKCRRCQAQPETIQHITGACTTLTQTDYTHRHNQVANIIHQKLALKHSLIQNTNTPYYKYKPQTILENTTHKLYYDRAILTDKTIQCNRPDIILQDKINKTTYLIDIAVPNTHNLQKTISEKINKYADLKEEVTRIWKQNIVYIIPIVLSTTGVVPHHLLKSLKLIELNESTYITLQKAAILNTCRIVRKFMQADEN

SEQ ID NO: 20956 - protein, 1298 aa, Spialia ferax
METRSKSKRKGPLPGGDRRGTPGADAGCLSMRTVSGEELNRRTPTDKNTTAETHTPTDRLTPIEPYSPSTVSYTPSLPTSPTSSLRSITPTLDVARGANAFLPTSTKAGKPRVRMRWSKEVNLFIMRTYYYITKLETDLTTYRKQLHELFLQKYPEVNVTEQRIADQRRVIVRNNLLNQETLNQIQEEVKEQLEADNEIHNDRSITTHQTTQNPLLIPQITSQSQPFTQNSHSSLTSTHNTQSICTLSHNSQSHISTQTEHITLMLENDIETIIDHNPNTDTFVHEITDKFRTTLTQYSGMDPLVRPKLPKLRYSPRLFQLLHIFNYNILYQFITDDIQLIDIHTIIYSVALVIAEELNYKITNYIRSTKHKDGNKPSWEIRLEKDIERLRVDCGRLTQYINNNRSSKVVKHVEIIFKTQNTHTRHENNNRKPEEFLDTLKQKLALKVHRLRRYKKAQKRKNDNIIFSTSEKTFYRNLHKPQKDIENDTNLPTQEQLETFWSGIWEQQVNHNDEAKWIGDEEIKWNTINEMEFIEITETDITNITARLHNWKSPGIDKIHNFWYKKLFSLHKVIAKNLTDIVLGKQNIPDFIATGITYMLPKSQFTSQPSQYRPITCLPTIYKILTAVITTKITKHIEQHNIIAEEQKGCRRGHMGCKEQLIIDSTIHKHATSRNRNLHCTYIDYKKAFDSIPHSWLIKILQIYKINSKIIHFLSNIMSRWKTTLHLTTNRTSIITREIVIKKGIYQGDSLSPLWFCLALNPLSSLLHGCRAGYCLKYDTQDTTISHLIYMDDIKLYSKTETEMKKLIDTTTKFSKDINMEFGLEKCRTLHIKRGKVQPGDYEINETDIITAMGPTEMYKYLGYKQLKGLDHTEIKNTLISEFKKRINSLCKTQLTGKHLIKSLNSYAIPILTYSFGIIKWTKTDLEQIERTIRTTLTKHNNLHPKSAVERLTIKRENGGRGLIDINQLWQKQINRLKSFFHSKTQTSTIHKAIVQNDSNYTPLNLKEDTEILNTQNNDPQTQKVDDWKRKVLHGRHPHDLEQSHINSIASNKWLKIGNLFPETEGFIIAIQDQIINTKNYRKFIIKDPSITDDKCRKCHNQPETIQHITGACTTLTQTDYTHRHNQVANIIHQKLALKHRLIQNTNTPYYKYTPQTVLENDTHKLYYDRAILTDRTIHFNRPDITLRDKINNTTYLIDIAVPNTHNLQKTISEKISKYTELKEEVSRIWKQNKVYIVPIVLSTTGIIPNHLLHSLKQLELKETLYITLQKAVILNTCRIVRKFLQIDENNSPYTSLT

SEQ ID NO: 20957 - protein, 1297 aa, Ophraella communa
METRAKITRIRPLPGGIRRGTPGAGAGCDSIRPIGGEELSRRVPPDKITTAEANDDGDELIDSTNSPTETFSQSTASHALTRSSSPSIISSSSVSLNPPIPTLSVAREASSFLSAPTKAGKPRVRMRWTKEVNTFIMRAYYYTTKLETDMTTYRQKLHELFSQQYPEIKVTEQRISDQRRTIVRNKLISTEMLHQLKEEVRMQLEVFNNIGNHPSPLIQESDESNTFVQSIINVAQEPGTQSQIYTQTYTSIQNTQKSSTCTQTEPMILTLENDVKTIIDQNFITELKEQEIHDKFISTLTQYSGMDPESRPKLPKLKYNPKLVKLIQLFNNKILKQYITEDTLFVDLHTIIYCTAVVISEELNYKITEHTGYKASKNKSKPAWQQRLEKDIAILRADCGRLTQYINNNRSGKVVKRVEAIFKNSSTHTSHELGNKKPEEYLDTLKQKLALKAHRLKRYKKAQQRKDDNIIFTTNEKAFYRNLKNPQNSTSDEVNIDTPTKEQLEIFWSGIWEEKTQHNAKAPWITEEETRWSTIEEMEFAQITESDITNTTAQLHNWKSPGVDKIHNFWYKKLFSVHKSLAKNLTDIIFGHQNSPDFLTSGITFMLPKTNYSSQPSQYRPITCLPTIYKILTAIITKKINSHVEKHKIIAEEQKGCRRGHMGCKEQLIIDSIIHKHATTKNRNLHCTYIDYQKAFDSISHSWLIEILKIYKINSKLVKFLQRTMSQWKTTLYLNTRHSALTTRQIAIKKGIFQGDSLSPLWFCLALNPLSHVLHQCGAGYNLKHPTHETTISHLIYMDDIKLYSKSETDMKKLIEITSRFSQDINMHFGLDKCKTLHIIKGKIKPGDYKINITDTITAMDSTDFYKYLGYQQLKGLDHKSIKQILNAEYKKRINAVCKTQLSGKNLIKAINAFAIPILTYSFGLIKWSGTDIEQIERITRTTLTKHNNLHPKSAIERLTIKRQDGGRGLIDIRNLWQNQINRLKIFFHTKAPASSIHRAITLHDMNITPLNLHEHKDTQITYSNDSQKQNIVNWKKKVLHGRHPHDLEQPHINAIASNKWLKIGNLFPETEGFMIAIQDQIINTKNYRKYIIKDSTVTNDKCRRCQAQPETIQHITGACTTLTQTDYTHRHNQVANIIHQKLALKHSLIQNTNTPYYKYKPQTILENTTHKLYYDRAILTDKTIQCNRPDIILQDKINKTTYLIDIAVPNTHNLQKTISEKINKYADLKEEVTRIWKQNIVYIIPIVLSTTGVVPHNLLKSLKLIELNESTYITLQKAAILNTCRIVRKFMQADEN

SEQ ID NO: 20958 - protein, 1172 aa, Ophraella communa
MRWTKEVNTFIMRAYYYTTKLETDMTTYRQKLHELFSQQYPEIKVTEQRISDQRRTIVRNKLISTEMLHQLKEEVRMQLEVFNNIGNHPSPLIQESDESNTFVQSIINVAQEPGTQSQIYTQTYPYIQNTQKSSTCTQTEPMILTLENDVKTIIDQNFITELKEQEIHDKFISTLTQYSGMDPESRPKLPKLKYNPKLVKLIQLFNNKILKQYITEDTLFVDLHTIIYCTAVVISEELNYKITEHTGYKASKNKSKPAWQQRLEKDIAILRADCGRLTQYINNNRSGKVVKRVEAIFKNSSTHTSHELGNKKPEEYLDTLKQKLALKAHRLKRYKKAQQRKDDNIIFTTNEKAFYRNLKNPQNSTSDEVNIDTPTKEQLEIFWSGIWEEKTQHNVKAPWITEEETRWSTIEEMEFAQITESDITNTTAQLHNWKSPGVDKIHNFWYKKLFSVHKSLAKNLTDIIFGHQNSPDFLTSGITFMLPKTNYSSQPSQYRPITCLPTIYKILTAIITKKINSHVEKHKIIAEEQKGCRRGHMGCKEQLIIDSIIHKHATTKNRNLHCTYIDYQKAFDSISHSWLIEILKIYKINSKLVKFLQRTMSQWKTTLYLNTRHSALTTRQIAIKKGIFQGDSLSPLWFCLALNPLSHVLHQCGAGYNLKHPTHETTISHLIYMDDIKLYSKSETDMKKLIEITSRFSQDINMHFGLDKCKTLHIIKGKIKPGDYKINITDTITAMDSTDFYKYLGYQQLKGLDHKSIKQILNAEYKKRINAVCKTQLSGKNLIKAINAFAIPILTYSFGLIKWSGTDIEQIERITRTTLTKHNNLHPKSAIERLTIKRQDGGRGLIDIRNLWQNQINRLKIFFHTKAPASSIHRAITLHDMNITPLNLHEHKDTQITYSNDSQKQNIVNWKKKVLHGRHPHDLEQPHINAIASNKWLKIGNLFPETEGFMIAIQDQIINTKNYRKYIIKDSTVTNDKCRRCQAQPETIQHITGACTTLTQTDYTHRHNQVANIIHQKLALKHSLIQNTNTPYYKYKPQTILENTTHKLYYDRAILTDKTIQCNRPDIILQDKINKTTYLIDIAVPNTHNLQKTISEKINKYADLKEEVTRIWKQNIVYIIPIVLSTTGVVPHHLLKSLKLIELNESTYITLQKAAILNTCRIVRKFMQADEN

SEQ ID NO: 20959 - protein, 1297 aa, Ophraella communa
METRAKITRIRPLPGGIRRGTPGAGAGCDSIRPIGGEELSRRVPPDKITTAEANDDGDELIDSTNSPTETFSQSTASHALTRSSSPSIISSSSVSLNPPIPTLSVAREASSFLSAPTKAGKPRVRMRWTKEVNTFIMRAYYYTTKLETDMTTYRQKLHELFSQQYPEIKVTEQRISDQRRTIVRNKLISTEMLHQLKEEVRMQLEVFNNIGNHPSPLIQESDESNTFVQSIINVAQEPGTQSQIYTQTYPSIQNTQKSSTCTQTEPMILTLENDVKTIIDQNFITELKEQEIHDKFISTLTQYSGMDPESRPKLPKLKYNPKLVKLIQLFNNKILKQYITEDTLFVDLHTIIYCTAVVISEELNYKITEHTGYKASKNKSKPAWQQRLEKDIAILRADCGRLTQYINNNRSGKVVKRVEAIFKNSSTHTSHELGNKKPEEYLDTLKQKLALKAHRLKRYKKAQQRKDDNIIFTTNEKAFYRNLKNPQNSTSDEVNIDTPTKEQLEIFWSGIWEEKTQHNVKAPWITEEETRWSTIEEMEFAQITESDITNTTAQLHNWKSPGVDKIHNFWYKKLFSVHKSLAKNLTDIIFGHQNSPDFLTSGITFMLPKTNYSSQPSQYRPITCLPTIYKILTAIITKKINSHVEKHKIIAEEQKGCRRGHMGCKEQLIIDSIIHKQATTKNRNLHCTYIDYQKAFDSISHSWLIEILKIYKINSKLVKFLQRTMSQWKTTLYLNTRHSALTTRQIAIKKGIFQGDSLSPLWFCLALNPLSHVLHQCGAGYNLKHPTHETTISHLIYMDDIKLYSKSETDMKKLIEITSRFSQDINMHFGLDKCKTLHIIKGKIKPGDYKINITDTITAMDSTDFYKYLGYQQLKGLDHKSIKQILNAEYKKRINAVCKTQLSGKNLIKAINAFAIPILTYSFGLIKWSGTDIEQIERITRTTLTKHNNLHPKSAIERLTIKRQDGGRGLIDIRNLWQNQINRLKIFFHTKAPASSIHRAITLHDMNITPLNLHEHKDTQITYSNDSQKQNIVNWKKKVLHGRHPHDLEQPHINAIASNKWLKIGNLFPETEGFMIAIQDQIINTKNYRKYIIKDSTVTNDKCRRCQAQPETIQHITGACTTLTQTDYTHRHNQVANIIHQKLALKHSLIQNTNTPYYKYKPQTILENTTHKLYYDRAILTDKTIQCNRPDIILQDKINKTTYLIDIAVPNTHNLQKTISEKINKYADLKEEVTRIWKQNIVYIIPIVLSTTGVVPHHLLKSLKLIELNESTYITLQKAAILNTCRIVRKFMQADEN

SEQ ID NO: 20960 - protein, 1302 aa, Endotricha flammealis
MRNNKRKQSTQSQAVVAESSTQNLPVDHPQTVSDQTYELTNSNPIRRSSRKTCNRYRSPSPTNSDIQEPFSPSTVSYTPSLETVDEEETLTPNLDVAQEGNPLLPASTKAGKTRVRMKWSQDVNRFIMRTYLYITKNETDLTMYRKKLHELFCQEYPDVNVSEQRVSDQKRAIVNNKYISETELNRLKEEVSKELERNTDGEQADTETNIQPTTLDTVIQTYQVTQSNTSDHYEPFIFTNDSTRITQTSNICTQTENTTILLENEIECLDTPGHTDNIAEQMYEKLLSTLTQYRGIDPTARPKLPKLSYSNNLTRLLNLFNEQILNRFISNDLQLTDTHTLVYCTALTISQELGYKVEQSRHGPSHTKRGRPAWQIRLERDIVVLRADIGRVTQYINNNRSRNVVEHVEEIFRNMKKHTKYDSDNKKPEDFLDTLKQRLALKVNRLARYKKSLRRKNDNKLFKTSEKSFYRSLGSENSDNDDNAEIPTKEGLETFWASIWETDVQHNTEADWIAEEENRWKELTEMKLEEINELDIQNITDRLHNWKSPGVDNIHNFWFKKLYILHKTLANNITDIIHGKQNIPQFITKGLTYMIPKGTYSAQPSQYRPITCLPTIYKIITSIITAKINTHIDQNNILAEEQKGCRKGHMGCKEQLLIDSVIHKHAATHKRNLHCTYIDYQKAFDSIPHSWLLHILKIYKIDPHVISFLQNTMSQWKTTICLSNRQNTITSREICIKKGIYQGDSLSPLWFCLALNPLSHLLNSQRVGYCLKHENTQTPITHLIYMDDIKLYAKTEREIHKLIDTTTTFSKDINMRFGLDKCKLLHIVKGKIRSGGYTLNETDIIAAMEPNDLYKYLGYHQLKGLDHTRIKKTLQDEYRRRVTKIAKSQLTGKHLIKAINTYCIPILTYSFGVIKWSKSNILKIERLTRTTLTKYNHLHPKSAIERMVIKRENGGRGLINLSALWKKQINTLQEFFYKKAITSNIHNAIVHNDNNYTPLNLIHRNPEAFNLDSTENERNKIEQWKKKVLHGRHPHDLQQAHIDTEASNKWLKVGALYPETEGFIIAIQDQVINTKNYKKYIIKDPNASDDRCRKCHIHSETIQHITGACPNLTQTDYTHRHNQIANIIHQKLALKHNLLESSHKHTPYYLYTPNPVLENSTHKIYYDRSILTDKTIHYNRPDITLQDKVNKITYIIDIAVPNTHNITKTITEKIHKYTDLKDEVARIWKQDKVFIVPIVMSSTGVIPKHLHHSLKLLDINPSTYINMQKAAILNTCRIVRKFMDASTDIENPTNQSINNDLP

SEQ ID NO: 20961 - protein, 1303 aa, Endotricha flammealis
MRNNKRKQSTQSQAVVAESSTQNLPVGHPQTASIDLTYELTNSNPIRRSNRKTFNRYRSTSPTNSDIQEPFSPSTVSYTPSLETVDEEETLTPNLDVAQEGNPLLPASTKAGKTRVRMKWSQDVNRFIMRTYFYITKNETDLTMYRKKLHELFCQEYPDVNVSEQRVSDQKRAIVNNKYISETELNRLKEEVSRELERNKEGEQADTETNIQPTTLDTVIQTYQVTQSNTTDHYDPFIFTNDSTHITQTSNICTQTENTTILLENEIECLDTPGHTDNIAEQMYEKLLSTLTQYRGIDPTARPKLPKLSYSNNLTRLLNLFNEQILNRFISNDLQLTDTHTLVYCTALTISQELGYKVEQSRHGPSHTKRGRPAWQIRLERDIVVLRADIGRVTQYINNNRSRNVVEHVEEIFRNMKKHTKYDSDNKKPEDFLDTLKQRLALKVNRLARYKKSLRRKNDNKLFKTSEKSFYRNLGSENSDNDDNAEIPTKEELETFWASIWETDVQHNTEADWIAEEENRWKELTEMKLEEINELDIKNITDRLHNWKSPGVDNIHNFWFKKLYILHKTLANNITDIIHGKQNIPQFITKGLTYMIPKGTYSAQPSQYRPITCLPTIYKIITSIITAKINTHIDQNNILAEEQKGCRKGHMGCKEQLLIDSVIHKHAATHKRNLHCTYIDYQKAFDSIPHSWLLHILKIYKIDPHVISFLQNTMSQWKTTLCLSNRQNTITSREICIKKGIYQGDSLSPLWFCLALNPLSHLLNSQRVGYCLKHENTQTPITHLIYMDDIKLYAKTEREIHKLIDTTTTFSKDINMRFGLDKCKLLHIVKGKIRSGGYTLNETDIIAAMEPNDLYKYLGYHQLKGLDHTRIKKTLQDEYRRRVTKIAKSQLTGKHLIKAINTYCIPILTYSFGVIKWSKSNIIKLERLTRTTLTKYNHLHPKSAIERMVIKRENGGRGLINLSALWKKQINTLQDFFYKKAITSNIHNAIVHNDTNYTPLNLIHRNPEAFNLESTENERNKIEQWKKKVLHGRHPHDLQQAHIDTEASNKWLKVGALYPETEGFIIAIQDQVINTKNYKKYIIKDPNATDDRCRKCHIHSETIQHITGACPNLTQTDYTHRHNQIANIIHQKLALKHNLLESSHKHTPYYLYTPNPVLENSTHKIYYDRSILTDKTIHYNRPDITLQDKVNKITYLIDIAVPNTHNITKTITEKIHKYTDLKDEVARIWKQDKVFIVPIVLSSTGVIPKHLHHSLKLLDINPSTYINMQKAAILNTCRIVRKFMDASTDIENPTNQAINNDLS

SEQ ID NO: 20962 - protein, 1353 aa, Chrysoteuchia culmella
MGKHSLKYANSGYLGTSSFKYPCRSKRGTAMVDILSLATRGNEMRRTKVKNTNKKTTQFLAVVAESMTQNTSSDYSQYPNVTPEQAISIPIRRSSRKTVNRYRSPSPSTSDIQEPYSPSSTASYNPSLDTVHENSSESQELNAIGPELDVTPEGNPLLPASTKTGKNRVRMKWSPEVNMFIMRSYYYVTKLETDMTTYRKKLHEHFCQQYPYVNVSEQRVSDQKRAITNNKYLSEEILNHLKEEAKRMIELANISENIANTQTQSETSNIVPLTQMPNTPALFTDSQHNHTENQNNLYLTILEGNTQTTHTSTQTENINVLLENEIECFDITEDNITSTIIQELYNKLLANITQYRGNDPTTRPKLPKLKHSQLLTQLLNAFNEQILKNFLSDDLQLIDIHLLIYATALTISQEIEPTLKPSNERSLNRNRGKPGWQIRLEKDVETLRASIGRLTQYINNNRSKRVTERVEEIFKTMSKHTRHDSNNKTPEEFLDTLKQKLALKVNRLRRYNKSLKRKADNKLFKTCEKSFYRNLNCDNAHKDYSEIPTTEDLESYWASIWERDTQHNDNADWIEKETTRWNEIEEMNIDEIIETDIQNITSKLHNWKSPGVDKIHNFWYKKLYVLHKTIGKNITDLIHGKQSLPEFFTKGQTYMIPKGSYTKQPSQYRPITCLPTIYKIVTSVITFKINIHLNHHNILAEEQKGCRKGHMGCKEQLIIDATIHKHAAAKRRNLHCTYIDYKKAFDSIPHSWLLKILKIYKIDPHIITFLQNSMKNWKTTLFLYNNQTTITTREISIKKGIYQGDSLSPLWFCLALNPLSHLLNTQKAGYCLKYEKKQTFLTHLIYMDDIKLYSKTTRENNKLIETTANFSKDIHMEFGIDKCRTLNIVKGKIRPGGYKLNDTDVIAAIEPSELYKYLGYRQQKGLDHIETRKILQKEYTKRLTKITKSQLNGKNLIKAINTYCIPILTYSFGIVKWTKTSLNKIERLTRTTLTKHKQLHPKSATERLVIKRHNGGRGLINILALWNKQIRTLKTFFYDKAKTSDIHDAVIHNDINYTPLNLTDKQVNTSCTNNTDEEKIKIEEWKKKALHGRHPHELQQQYIDAEASNKWLQIGALFPETEGFAVAIQDQVINTKNYKKYIIRDPNITDDKCRKCHKHTETIQHITGACPNLAQTDYTHRHNQVANIIHQNLVHKYRLLQDSHKHTPYYKYTPRPILENNTHKLYYDRSVLTDRTIHYNRPDIILQDKQNKTTYIIDIAVPNTHNITKTISEKIHKYTDLKDEVTRVWRQDKVYIVPIILSTTGVIPKHLHKSLQLLGLRPTTFINMQKAAILNTCRIVRKFLDIPENTIDS

SEQ ID NO: 20963 - protein, 1303 aa, Endotricha flammealis
MRNNKRKQSTQSQAVVAESSTQNLPVGHPQTASIDLTYELTNSNPIRRSNRKTFNRYRSTSPTNSDIQEPFSPSTVSYTPSLETVDEEETLTPNLDVAQEGNPLLPASTKAGKTRVRMKWSQDVNRFIMRTYFYITKNETDLTMYRKKLHELFCQEYPDVNVSEQRVSDQKRAIVNNKYISETELNRLKEEVSRELERNKEGEQADTETNIQPTTLDTVIQTYQVTQSNTSDHYDPFIFTNDSTHITQTSNICTQTENTTILLENEIECLDTPRHTDNIAEQMYEKLLSTLTQYRGIDPTARPKLPKLSYSNNLTRLLNLFNEQILNRFISNDLQLTDTHTLVYCTALTISQELGYKVEQSRHGSSHTKRGRPAWQIRLERDIVVLRADIGRVTQYINNNRSRNVVEHVEEIFRNMKKHTKYDSDNKKPEDYLDTMKQRLALKVNRLARYKKSLRRKNDNKLFKTSEKSFYRNLGSENSDNDDNAEIPTKEELETFWASIWETDVQHNTEADWIAEEENRWKELTEMKLEEINELDIKNITDRLHNWKSPGVDNIHNFWFKKLYILHKTLANNITDIIHGKQNIPQFITKGLTYMIPKGTYSAQPSQYRPITCLPTIYKIITSIITAKINTHIDQNNILAEEQKGCRKGHMGCKEQLLIDSVIHKHAATHKRNLHCTYIDYQKAFDSIPHSWLLHILKIYKIDPHVISFLQNTMSQWKTTLCLSNRQNTITSREICIKKGIYQGDSLSPLWFCLALNPLSHLLNTQRVGYCLKHENTQTPITHLIYMDDIKLYAKTEREIHKLIDTTTTFSKDINMRFGLDKCKLLHIVKGKIRSGGYTLNETDIIAAMEPNDLYKYLGYHQLKGLDHTRIKKTLQDEYRRRVTKIAKSQLTGKHLIKAINTYCIPILTYSFGVIKWSKSNILKLERLTRTTLTKYNHLHPKSAIERMVIKRENGGRGLINLSALWKKQINTLQDFFYKKAITSNIHNAIVHNDTNYTPLNLIHRNPEAFNLESTENERNKIEQWKKKVLHGRHPHDLQQAHIDTEASNKWLKVGALYPETEGFIIAIQDQVINTKNYKKYIIKDPNATDDRCRKCHIHSETIQHITGACPNLTQTDYTHRHNQIANIIHQKLALKHNLLESSHKHTPYYLYTPNPVLENSTHKIYYDRSILTDKTIHYNRPDITLQDKVNKITYLIDIAVPNTHNITKTITEKIHKYTDLKDEVARIWKQDKVFIVPIVMSSTGVIPKHLHHSLKLLDINPSTYINMQKSAILNTCRIVRKFMDASTDTENPTNQAINNDLS

SEQ ID NO: 20964 - protein, 1183 aa, Chrysoteuchia culmella
MKWSPEVNMFIMRSYYYVTKLETDMTTYRKKLHEHFCQQYPYVNVSEQRVSDQKRAITNNKYLSEEILNHLKEEAKRMIELANISENIANTQTQSETSNIVPLTQMPNTPALFTDSQHNHTENQNNLYLTILEGNTQTTHTSTQTENINVLLENEIECFDITEDNITSTIIQELYNKLLANITQYRGTDPTTRPKLPKLKHSQLLTQLLNAFNEQILKNFLSDDLQLIDIHLLIYATALTISQEIEPTLKPSNERSLNRNRGKPGWQIRLEKDVETLRASIGRLTQYINNNRSKRVTERVEEIFKTMSKHTRHDSNNKTPEEFLDTLKQKLALKVNRLRRYNKSLKRKADNKLFKTCEKSFYRNLSCDNAHKDYSEIPTTEDLESYWASIWERDTQHNDNADWIEKETTRWNEIEEMNIDEITETDIQNITSKLHNWKSPGVDKIHNFWYKKLYVLHKTIGKNITDLIHGKQSLPEFFTKGQTYMIPKGSYTKQPSQYRPITCLPTIYKIVTSVITFKINIHLNHHNILAEEQKGCRKGHMGCKEQLIIDATIHKHAAAKRRNLHCTYIDYKKAFDSIPHSWLLKILKIYKIDPHIITFLQNSMKNWKTTLFLYNNQTTITTREISIKKGIYQGDSLSPLWFCLALNPLSHLLNTQKAGYCLKYEKKQTFLTHLIYMDDIKLYSKTTRENNKLIETTANFSKDIHMEFGIDKCRTLNIVKGKIRPGGYKLNDTDVIAAIEPSELYKYLGYRQQKGLDHIETRKMLQKEYTKRLTKITKSQLNGKNLIKAINTYCIPILTYSFGIVKWTKTSLNKIERLTRTTLTKHKQLHPKSAIERLVIKRHNGGRGLINILALWNKQIRTLKTFFYDKAKTSDIHDAVIHNDINYTPLNLTDKQVNTSCTNNTDEEKIKIEEWKKKALHGRHPHELQQQYIDAEASNKWLQIGALFPETEGFAVAIQDQVINTKNYKKYIIRDPNITDDKCRKCHKHTETIQHITGACPNLTQTDYTHRHNQVANIIHQNLVHKYRLLQDSHKHTPYYKYTPRPILENNTHKLYYDRSVLTDRTIHYNRPDIILQDKQNKTTYIIDIAVPNTHNITKTISEKIHKYTDLKDEVTRVWRQNKVYIVPIILSTTGVIPKHLHKSLQLLGLRPTTFINMQKAAILNTCRIVRKFLDIPENTIDS

SEQ ID NO: 20965 - protein, 1311 aa, Spodoptera litura
METRSKRKRIGPLPGGDRRGTPGADAGCFSMRSVGGVELNRRAPINKQTTADITDDGGRLTDRTNTPVEPFSPSTASYVPSRSPSPSLPSSPILSSSLPIANLNTVYTNPTLTVAREVSTFLPASTKAGKTRVRMRWSKEVNLFIMRTYLHITKLETDMTTYRQQLHQLFSQQYPDVIVSEQRIADQRRVIVRNKLLSQDEIDQLKEEVRIQLELENVENLNNHNVLTPNIQEEQSSSYSLTPTIQSESNTQTFSIYQSQAQSHSIHTSTQTENLTITIENDIDTQADIHQNLLSDAHIQQLHDTFKTTLNLYSGMNPAVRPKLPKLRYSPKLQQLVNIFNKNILIQYTTEDTKLTDVHTLIYCTAVVISEELNYKITDYTGNTKTKTNKKPAWQIRLERDIEKLRADCSRLTQYINNNRSNKVIKRVEAIFRNKRYTTHTRHEKDNRKPEEFLDTLKQKLALKSHRLKRYKKAQERRTHNSTFAMNEKNFYRNLRTKAQTTLDTNIELPTTEQLEAFWSGIWEDEAQHNDKSDWISDEAARWSSLEEMDFVEVTESDITNITAKLHNWKSPGIDKIHNYWYKKLESLHKILAKNITDIILGKQNIPEFIATGITYMLPKTQYTSQPSQYRPITCLPTLYKIITSTITSKINKHIEQHNIIAEEQKGCRRGHMGCKEQLVIDSVIHKHAATKNKNLHCTYIDYKKAFDSIPHSWLIQIFQIYKISPTIITFLKNVMSQWKTTLQLNYRNNTVTTRQISIKKGIYQGDSLSPMWFCLALNPLSHLLHRSQAGYCLSNTTEITTISHLIYMDDIKLYSKTEKEMKTLIDITTKFSRDINMRFGLDKCKTIHIIRGKIKPGDYTINNNMDVITAMEPDDFYKYLGYRQLKGLDHKTIKNTLCNEYKNRVSALCKTQLSSKHLIKALNTYAIPILTYSFGVIKWSKTDIYQLERSTRTTLTKHNDLHPKSAIERLTIKRHHGGRGLIDIHHLWQKQITKLKLFFHAKSNTSNIHKAIVTNDTNYTPLNLHEPNLAYDVNNPQTQKLEDWKKKVLHGRHPHDLEQAHIDTVASNKWLKVGNLFPETEGFIIAIQDQIINTKNYRKFIIKDPTITNDKCRKCHIQPETIQHITGACSTLTQTDYTHRHNQLANIIHQNLAIKHKLIQDTNTPYYKYTPENVLENTTHKLYYDRAILTDRTIHYNRPDITLRDKINNITYLIDIAVPNTHNLLKTIGEKISKYAELKEEVARIWRQEKVYIVPIVVSTTGVIPKHLHNSLKLIDLKDNTYITLQKAAILNTCRIVRKFMQLEEDTTNI

SEQ ID NO: 20966 - protein, 1295 aa, Leptidea sinapis
METRSMKKRKIGPLPGGDRRGTPGAGASMRTVSGEELNRRAPTGSSENTTAENDRLTDRTTPTEPYSPCTISYTPSIPSSPLSSRYSPTPTLDVASTKAGKPRVRMKWSKEMNLFIMRTYYYITKLETDLTTYRKQLHELFLQKYPDLNVTEQRIADQRRVIVKNKLLNQETLNQIKEEIKSQLEIENENQFHINISEPTNDVIPCSSTQTIPNTQHNQSLNTFTYNIQSSQTFSYITQTSHNMSTQTEFVTIMMENDIDTVLDHNPGTNTEIEEICYKFKTALTQYSGMDPLVRPKLPKLRYNSHLFQLVNMFNSDILSRFISDDTKLTDIHTIVYCVALVISEELNYKVTEYIRSTRPKDCYKPPWQIRLEKDIEKLRADCKDIEKLRADCGRLTQYINNNRSRKIIKHVKAIFKTGNTHTKHENSNIKPEEFLDTLKQKLALKVHRLKRCKKAQERKNDNTMFSTNEKNFYRNLHKLKTDTVNNPNVPTQEQLETFWSGIWEQQVHHNDKADWIIEEENKWNAIEEMDFTEITETDINNITARLHNWKSPGIDKIHNFWYKKLFSLHKIMAKNITDIIIGKQKIPDFIATGITYMLPKLQISPLPSQYRPITCLPTIYKILTSAITTKINKHVEHYNIIAEEQKGCRRGHMGCKEQLIIDSTIHKHATSKNRNLHCTYIDYKKAFDSIPHSWLIKILQIYKINPKIINFLHDIMSRWKTTLYLNTNQNTITTREIAIRKGIYQGDSLSPLWFCLALNPLSHLLRDCRAGYRLKHDIQETIVSHLIYMDDIKLYGKTEMEMKKLIDTTAQFSKDINMEFGLDKCRTLHIKRGKIRPGDYAVNDIDIIRAMEQTELYKYLGYKQLRGLDHTEIKNTLTIEFKKRINSLCKTQLTSKHLIKSLNTYAIPILTYSFGIIKWTKTDIEQIERTIRTTLTKHNNLHPKSAIERLTIKREYGGRGLIDLNHLCQKQVGNLKDFFHLKSQTSEIHKAIVKNDINFTPLNLHEDISSQNTRRNDPQIQKLDSWKRKVLHGRHPHDLEQSHINTAASNKWLKIGNLFPETEGFIIAIQDQVVNTKKYRKFIIKDPSVSNDKCRKCHVQPETIQHITGGCTTLTQTDYTHRHNQVVNIIHQKLALKHKLIQNTNTPYYKYKPQTVLENDTYKLYFDRAILTDRTIHYNRPDITLKDKLNEITYLIDIAVPNTHNLQKTISEKINKYTELKDEVARIWNQKKVYVIPIVLSTTGVIPNHLLHSLKLLELKETLYITLQKVAILNTCRIVRKFLQIDEHDISPYT

SEQ ID NO: 20967 - protein, 1281 aa, Graphium sarpedon
MLYHLLFICSLFQLYIFYDQPSQSRYKKKITIIIISPLKSNHTSRSTIRSRGGRIHDIFNWRGRHGSGNPFNMETRSKKKLRGPLPGGDRRGTPGADAGCFSLRSVSGEELSRRAPTGLPENVTAENSEINEVCNQLTITSRNESRNLRNEPSHSSETPELRVAQVGNPFLPASTKAGKPRVRMRWSKEINLFIMRTYYFVTKLETDKTAYRKQLLEIFLQKYPEVNITEQRLSDQIRVIVRNKLLSQGTLDEIKHDVQIILQEKSQQNQENTQPSSIDVNAWQTPLQDVAFNPQVINAFTQTETITRTLENDIETVKDSENIPESYIKELHNKLTTTLTEYSGMNPILRPRLPILKYTSRLFELIKIFDEKILLFYHSEDSQLKDIHTLIYSTALVITRELKYTVDGTGTKNKKSLKTEKPPWMIRLEKDIENLRADCGRLTQYINNNRSRKVVKKVEEIFKRETIHTRHENYNKTPEEFLDTIKQKLFLKSNRLRRYKKSQQRKDHNNLFRNNERSFYRNLTKSQYNKHSYENTVNTPSKESLETFWAQIWEEQVPHNDNAEWIYKEKERWNSIESMKFDEITESDIKLTTMKISNWKSPGVDKIHNFWYKKLMSLHKIIARNFNDLIFERQVIPEFLGTGITHMFPKTSASSEPSQYRPITCLPTMYKILTSVIATKITAHIENNNILAEEQKGCRRGHMGCKEQLIIDSAIHKHAISKNRHIHCTYIDYKKAYDSIPHSWLLKILQIYRVNENIINFLEKIMSKWKTTLQIRSNGKYVTTRLININKGIYQGDSLSPLWFCLAINPLSHQLHQCQVGYHLKKDTDITKISHLIYMDDIKLYARNEKELKLLIDTVAMVSKDIKMQFGLEKCKILHIVKGKIQPGDYLVNGSELITAMGDSDIYKYLGYEQLKGLNHTSIKYSLKTEFKKRLSSVCRSQLSSKSLIKAINTFAMPILTYSFGIIKWTKTDIEELGRITRRTMTKHNYLHPKSSTERLTLKRQDGGRGLIDIQALWQKQIFLLKTFFYKKALSSKIHKAITENDDNSTPLNLSERTHLQTPNFSEAYKQKVINWKQKVLHGRHPHDLEQPHIDTVASNRWLQIGSLFPETEGFIIAIQDQVINTKNYRKYIIKDTTVKNDQCRKCHNQPETIQHITGACTTLTQSDYTHRHNQIANIIHQNLALKYALIQDTNTPYYKYVPQNVLENNSHKLYYDRAILTDRTIHYNRPDIVLQDKLNKITYLIDVAIPNTHNVQKTITEKIHKYTELKEELVNIWKQN

SEQ ID NO: 20968 - protein, 1245 aa, Sarangesa brigida
MRLRSANKLPQAGTGANRDGESRPEHPSSGCPTYSGGDTVSQISAQLTTVADKNKHNINITPSHSPTQIDDINSSFSSTTISEPYSPSTVSYIPTPVSSVDQNSREAPTPTLSVALEGNTFLPASTKAGKQRVRMRWSKEVNTFIMRTYYSITKLETDMTTYRKLLHELFSQQYPQVNVSEQRLSDQRRAIVRNRLLTQEILTQLKEEVRIKLQEHVLDNSTTITRNSADNFQHSQSPSLSHIRTRHHMLPISQTQAHSSTQISHTSTQTEPTEIITVENDTEILVDRNPSADTYTEKIYNKFRSALIKYAGMDPAARQKLPKLRYSPKLSKLIHIFNKNILTQFIPDNTQLVDVHTLIYCTAVVVAEEMNYKITDNIGLNRSQNCQKPAWQVRLEKDIDKLRADCGRLTQYINNNRSNKVIKAVEEIFRNRLTHTKHENKNKKPEEFLDTLKQKLALKVHRLRRYKKTQQRKLDNSLFSTNEKMFYRNLLKSHTDTPVAELPTKTQLESFWSSIWEEQAQHNDKASWIVQESNRWNSIDEMKFIEFTESDITNITARLHNWKSPGIDKIHNYWYKKLTTLHKPIARSLTDIVLGKQEIPEFIAQGITYMIPKTHCSPQPSQYRPITCLPTIYKILTSAIANKINAHIEHNHIIAEEQKGCRRGHMGCKEQLVIDSTIHKHATNNNRNLHCTYIDYKKAFDSVPHSWLLQILKIYKINPKIINFLRNIMSHWKTSLHLNSQGNTIVTRQIPIKKGIYQGDSLSPLWFCLALNPLSQLLNSCQAGYQLRTEQTRISHLIYMDDIKLYAKTNNEMKKLINTTTEFSKDINMEFGLDKCKILHIIKGNIKPGNYIIDDDNIITAMEITDMYKYLGYKQLKGLHHSTIKQTLTTEYKRRINAICNTQLSSKHLIKALNTYAVPILTYSFGIIKWSNTDIEQLGRITRTTLTKHHQLHPKSAVERLTIKRHAGGRGLIDIHHLWQKQIHSLRTFFHLKSSISKIHKAIVENDHNYTPLNLNENNNTANPTNYDPQAQKIDNWKKKTLHGRHPHDLEQTHIDPIASNKWLKIGNLFPETEGFIVAIQDQTINTKNYRKFIIKDPSISNDKCRKCHTQSETIQHITGACTSLTQTDYTHRHNQISNIIHQKLALKYNLIKNSNTPYYKYTSQTVLENATHKLYYDRAILTDKTIHYNRPDLILTNKISKITYLIDIAIPNTHNIQKTIAEKINKYEELKTEITRIWSQNKVY

SEQ ID NO: 20969 - protein, 1242 aa, Wahydra kenava
METRSKSKRLGPLPGGYRRGTPGADAGCFSMRTVSGEELNRRAPSGSLENITANQTDVNRSLNSPTSTIEPFSPSSASYIPSPVSLMDEMSREAPTPVLSVAQEVSTFLPASTKAGKPRVRMKWSKEVNIFIMRTYYFITKLETDMTTYRKQLHELFSQQYPEINVTEQRISDQRRTIVKNKRLSQEIIDQIKEEVRVKLQENTDRSNHDIGAEDIISSYQTPSCSESWTNLVSQTILRPFTQISHTSTQTESETLVLESDIEILVDSNPLIDIHIEEISSKLKSALINFSGTDPTTRPKLPKLKYSNKLSRLVDLFNKHILSQFLSDDAKLVDIHTLIYCTAVVITEELNYKIIEDASQSKIKPNSKPPWQIRLEKDIEKLRADCGRLTQYIKNNRSKKVVKRVEEIFKSRIMHTRHENNNRKPEEFLDTLKQKLAIKVHRLRRYNKAQQRRKDNLLFATNEKLFYRKLINKQNDTATTENLEIPTKTQLELFWAGIWEEETQHNEEADWIKKEEKRWETLKEMEFDEITEIDIAYITAKLHNWKSPGIDKIHNYWFKKLTSVHRYIAKNLTLIVLGKQIVPAFLATGITYMIPKTTCSPQPSQYRPITCLPTIYKILTSAIATKINKHIQGNDIVAEEQKGCRRDHMGCKEQLIIDSTIHKHAASKNRNLHCTYIDYKKAYDSIPHSWLLKTLQLYKINPTIVNFMRNIMSHWKTSLQVNANDNTITTRQIYIKRGIYQGDSLSPLWFCLALNPLSHLLHQCQTGYCFKNIREETFISHLIYMDDIKLYSQTSNDMKKLVDTTVEFSNDIKMEFGFDKCKTLHIVRGKIQPGDYAIEGSDTITALEHTDMYKYLGYRQLKGLDHTTLKQTLTTEYKRRINAICNTQLSGRHTIKAINTYAIPVLTYSFGVIKWSKTDIEQIERTSRTTLTKHNYLHPKSAIERLTIRRHKGGRGLIDIHHLWQKQIHHLKTFFHTKASTSNIHKAISLNDHNFTPLNLNDHLNIVDPRVIDPQEQKVENWKKKSLHGRHPYDLEQAHIDSEASNKWLKVGNLFAETEGFLIAIQDQIINTKNYKKFIIKDPSMTNDKCRKCHAQSETIQHITGACTTLTQTDYTHRHNQVANIIHQQLALKHNLIQDSSTPYYKYSPSTVLENSSYKLYYDRAILTDKTIHYNRPDITLQDKINKTTYLIDIAVPNTHNISKTISEKINKYAELKEEVSRIWKQDKVCVVPIVLSTTGVI

SEQ ID NO: 20970 - protein, 1285 aa, Ochlodes sylvanus
METRSKRKRLGPLPGGYRRGTPGADAGCFSMRTVSGEELNRRAPSGSPENTTANQPDDNSRLNSPISVSEPYSPSTASYIPTPVSSMDEMSRGAPSPVLSVAQEVNTFLPASTKAGKPRVRMRWSKDVNMFIMRTYYYITKLETDMTIYRQQLHELFSQQYPEIRVTEQRISDQRRTIIRNKLLSQEIIDQIKQEVRVKRQKNIDNNIDVDDQHQSNQLESFSQVYTYPIAQTPQRPFTQISHTSTQTESETLVLVDSNPLTDIYAEEIRTKLKSALINFSGMDPTVRPKLPKLKYSNKLSRLTDIFNKHILLQFLSDDTKLIDIHTLIYCTAVVISEELNYKINEHISPSKTKFNNKPPWQIRLEKDIEKLRADCGRLTQYIKNNRSKKVVKRVEEIFKSRITHTRHESNNKKPEEFLDTLKQKLAIKVHRLKRYNKAQKRKKDNILFATNEKQFYRKLLTKDTDTTPTENLDIPTKTQLELFWSNIWEGETQHNDKADWIMEEEKRWNSIEEMDFNEITEIDIANITAKLHNWKSPGIDKIHNYWFKKLTSLHKYIARNLTHIVLGKQNIPEFFATGMTYMIPKTSYSPQPSQYRPITCLPTIYKILTSAIATKISKHIEHNEILAEEQKGCRRGHMGCKEQLIIDSTIHKHATTKNRNLHCTYIDYKKAFDSIPHSWLLKILQIYKINPTLLNFMQNIMSHWKTSLQVNFNNNTVSTRQISIKRGIYQGDSLSPLWFCLALNPLSHILHQCQAGYSFKNSREETRISHLIYMDDIKLYSKTYNEMEKLVGTTAEFSNDIKMEFGIDKCKTLHIVRGKIQPGDFAIDDNYTITALEPTDMYKYLGYKQLKGLDHTVLKQSLTTEYKRRINAICNTQLSGRHTIKALNTYAIPVLTYSFGVIKWSKTDIEQIERTTRTTLTKHNYLHPKSAIERLTIRRHKGGTGLIDIHHLWKKQIYHLKTFFHTKSMKSKIHKAISQNDHNFTPLNLNEQSNIEDPRNTDPQEQKVENWKQKSLHGRHHYDLEQTHIDSTASNKWLKVGNLFPETEGFLIAIQDQIINTKNYKKIIIKDPTITSDKCRKCHTQSETIQHITGACTTLTQTDYTHRHNQITNIIHQQLALKHNLIEDTNTPYYRYTPQTVLENTLYKLYYDRGILTDKTIHYNRPDITLLDKAKKTTYLIDIAVPNTHNISKTITEKLSKYEELKEEVSRIWRQDKVFVVPIVLSTTGVIPKHLHHSLKQLDLKETLYVSLQKAAILNTCRIVRKFLQIDENSLTSNHTVHNS

SEQ ID NO: 20971 - protein, 1262 aa, Carystus phorcus
MRTVSGEELNRRAPSGYPENTTANQIDDNNSLNSSNSIVEPYSPSSDSYIPTPVSFSDETSREAPAPALSVAQGVNTFLPASTKAGKPRMRMSWNKDVNIFIMRTYYYITKLETDMTIYRKQLHELFSQKYPEINVTEQRISDQRRTIIRNKLLSQEILDRIKEEVRVKLQENIDNDVGADVVNPISQSHFATQAHTNSISQILLGLTTQSTHTSTQTETEILVLENDIEILVDNNPSIDVHITELHNLLKAALINFSGMDPTTRPKLPKLKYSRKLSSLVDLFNKHILPHFLSDDTKLVDVHTLIYCTAVVISEQLDYKINNNANHNKTKINSKPPWQIRLERDIEKLRADCGRLTQYIRNNRSKKVVKRVEEIFRSRTLHTRHEGSNKKPEEFLDTLKQKLAIKVHRLRRYNKAQQRKRDNILFVTNEKQFYRKLQTKQADMSSTNNIDIPTKTQLELFWASIWEEEIQHNDKAEWIKEEEKKWDSIKEMEFGEITSIDIANITGKLHNWKSPGIDKIHNYWFKKLTSVHSHIAKNFTHIILGQQSIPSFIATGITYMIPKTTYTPHPSQYRPITCLPTIYKILTSTIATKINRHIQQNEILAEEQKGCRRDHMGCKEQLIIDSTIHKHATTKNRNLHCTYIDYKKAFDSIPHSWLLKILQIYKINPTLLNFMSNIMSYWKTTLQINSSNNTVTTRQICIKRGIYQGDSLSPLWFCLALNPLSQLLHQCQVGYRFKNSRDETVISHLIYMDDIKLYSKTHNEMKKLVTTTVEFSNDIKMEFGFDKCKTLHIVRGKITPGDYAIDDNCAITAMEPSDMYKYLGYKQLKGLDHTTLKQTLITEYKRRINSICNTQLSGRHNIKALNTYAIPILTYSFGIIKWSKTDIEQIERITRTTLTKYNYLHPKSAIERLTIKRHDGGRGLIDIHHLWQKQIYHLKTFFHTKSHTSKLHKTITHNDHNLTPLNLSEHLNTIDPRNINPQEQKIESWKKKSLHGRHPYDLEQSHIDAIASNKWLKVGNLFAETEGFLIAIQDQIINTKNYKKFIIKDPSVKNDKCRKCHTQSETIQHITGACTTLTQTDYTHRHNQITNIIHLQLALKHNLIQNTNTPYYKYTPATVLENSLYKLYYDRAILTDKTIHYNRPDITLQDKHNKITYLIDIAVPNTHNIQKTIAEKISKYAELKDEVARIWRQDKVYVVPIVLSTTGVIPKHLHHSLKQIGLKETLYVSLQKAAILNTCRIVRKFMQIDENILTSHNTVPRN

SEQ ID NO: 20972 - protein, 1313 aa, Schrankia costaestrigalis
METRSKRKRIGPLPGGDRQGTPGADAGCYSMRTVSGEELNRRAPTNKDTTAEPSDDGDNLSHRTDTPIEPYSPSTLSYTPSGTSSPSIPSSPPSIINTVLPDPTLAVARGVSTFLPVSTKAGKPRVRMRWSKEVNTFIMRTYFRVTKLETDMTTYRKDMHEFFSRQYPDITVTEQRISDQRRIIVKNKLLPESLLNQLKEETRIHLQEQDNHTNSNFNSVLQNLNENTLHMQSQSQHQFVLNTHTQSYNHSQANTQTSHSATQTESITLTLENDIETLTFVDQNISVANIYNKFRTTLTLYSGMDPGSRPRLPKLKYTSNLFRLVNIFNTEILNDFISTDMQLVDIHTLIYCTAVVISEELNFKITEHTRNIKPKHTIKPPWQQRLEKDIEKLRVECGRLTQYIKHNRSNKVVKTVEAIFKNRSTHTRHENCNKTPEEFLDTLKQKLALKCNRLKRYNKAQQRKNDNIIFSTNEKLFYRTIHEKQINTNTDTNTTNTPTKEQFESFWAGIWEKQVHHNDKATWIEEEKIKWGDIVEMDFEEITETDIKSVTHRLHNWKSPGIDKIHNFWYKKLTFLHKFIAKSLTNIILGHQNIPEFIATGITYMLPKTNNSPQPSQYRPITCLPTIYKILTSAITAKINSHIEHHNIIAEEQKGCRRGHRGCKEQLIIDSTIHKHATTKNRNLHCTYIDYQKAFDSVPHSWLIQILKIYRINPRIINFLHNIMDKWKTTLQINNPNSTITTRQISIKKGIYQGDALSPLWFCLALNPLSRQLQDSQVGYCFKNPSMVTSISHLIYMDDIKLYAQTTKHMQDLIEITSNFSKDIHMQFGLDKCKTLHIIKGKVQPGDYAISNTETITAMQSNELYKYLGYTQSKVLDHTDIKNTLTTEYKRRLNALCKRQLSGKHLIKAINTYAIPILTYSFGVIKWTKTDTAQLERTTRTTLTKHNNLHPKSAIERLTINRQYGGRGLIDIEHLRQKQVNNLSTFFQLKSSTSNIHKAIVMNDHNYTPLNLSQPQTIQHNIDPHKQKHEEWKKKVLHGRHPHDLQQPHIHQLASNKWLKIGNLFPETEGFMIAIQDQVINTKNYRKFIIKDSSITNDKCRKCHTQSETIQHITGACTTLSPTDYTHRHNQIANIIHQNLALKYSLILDTKTPYYKYTPQTILENLSHKLYYDRAILTDKTIPCNRPDIILQDKINKFTYLIDIAVPNTHNLQKTITEKISKYLELKEEITRIWKQEKVYIVPIVLSTTGIIPNHLFHSLKLLNLKESVYITMQKAAILNTCRIVRKFMQIDENEIDPHHNTPSTLTYNTPTT

SEQ ID NO: 20973 - protein, 1277 aa, Apodemia walkeri
METRLRKKLKGPLPGGDRRGTPGADAGCFSMRTISGEELNRRASTDKLTTAEPYYRNDRQTDDTNIPNEPYSPSTISYTPSVTTSPSIDSVNSFSATPTLDVAREVNTFLPASTKAGKPRVRMKWSNSVNMFIMRTYYYITKLETDLTTYRKQLHELFEKQYPEVKVSEQRISDQRRTIVRNKLLSQETLNQLKEEVQMELQTESQLVFEPFTPIPNEIENTPQVQLSRQNTQLLNVSTQTESIIFTVENDIETLIQNNTTEDDQTQQIREKFRKTLLEYSGSDPIARPKLPKLKYSTQLDRLVSVFNNDILNQFITEATQLIDIHTMMYCTALVISEELHYKIQYDKQNVRRNNLEKPPWEVRLERDIEKLRADCGRLTQYINNNRSRKLVKKVEAIFNNRHIQIHTRHENHNRKPQEFLDTLKQKLALKVNRLKRYKKAQQKINDNKLFAKSEKQFYRNLQKIKPHTKGDLDMPTKEQLELFWSGIWEEQVEHNTNADWITVEKNKWSCIPEMEFCEVTESDIRNTTTRLHNWKSPGIDKIHNYWYKKLTILHKSIAKNFTDIILGHQNIPEFIATGITYMLPKTLHSTQPSQYRPITCLPTIYKILTSAIATKINTHIEQHNIIAEEQKGCRRGHMGCKEQLIIDSTIHKHATSKNKNLHCTYIDYKKAFDSIPHSWLIQILQIYKINPKLTDFLHNLMTHWKTTLQLNAHNKTVTTRQIHIKKGIYQGDSLSPLWFCLALNPLSHLLHSTQAGYYFKRNTKDTIVSHLIYMDDIKLYATAEKDMKTLIDITTKFSSDIKMEFGIEKCKTLHIIRGKVRPGDYEINQMETITAMESTDLYKYLGYKQLKGLDHTSIKKILTTEYKRRLNVLCKTELSSKSLIKSINTFAIPILTYSFGIIKWTKTDIEQIERTTRTTLTKHNNLHPKSATERLTIRRQDGGRGLIDIHHLWKKQIIKLKTFFYTKSQTSTIHKIITQCDQNYTPLNLNENNTPNIDSDPQKQKIEDWKKKVLHGRHPHDLEQSHIDRLASNKWLKIGNLFPETEGFMIAIQDQVINTKNFQKYIIKDPTIVNDKCRKCHTQPETIQHITGACTTLTQTDYTHRHNQVTNIIHQKLALKHKLIQNTNTPYYKYTPETILENENYKLYYDRAILTDKTIHYNRPDMTLQDKKNKTTYLIDIAVPNTHNLQKTISEKINKYADLKEEVLRIWRQDKVYIVPIVLSTTGVIPKHLNHSLKLIELDNNIHTMLQKAAILNTCRIVRKFMQIDEKENTPY

SEQ ID NO: 20974 - protein, 1030 aa, Blastobasis adustella
MSEQDTFTDATCEKLHEKLQSKIIEYSGIDPAVRPNLPKLKYTKNLTYLVKIVNENILPRYVTQDTQLHDIHTAIYCAAMIVSEELNYKITQNNTRRKDNNKPYWQIRLEKDIQKLRADIGRVTQYINNNRSERLLKKVQEIFKNNTKHSTHERDNIQSNEFLDTLKQKLALKCHRLRRYNKAQKRKVDNVKFKTNEKLFYRNLYESQPSASINNNSETPTKEMLENYWAGIWEDKVQHNDRAEWIEEETTKWNAIEEMGFEEITEVDISNITAKLHNWKSPGIDKVHNYWYKKLTYLHKHIAKNITDIIVGKQNIPEFIATGITYMIPKTKNSSQPSQYRPITCLPTIYKIITSAITSKITSHIEHNNILAEEQKGCRRGHMGCKEQLIIDSTIHKHANTKNRNLHCTYIDYKKAFDSIPHTWLIQILQIYKVNSVLIDFLRNIMKFWRTTLHLKHGNTSISTRQISIEKGIYQGDSLSPLWFCLALNPLSHLLHKCRAGYRFKNTAGETAISHLIYMDDIKLYAKTEKEMKSLVETTTEFSNDINMQFGLDKCKTLHIKKGKVQPGDYVINDSDIITAMEPTDLYKYLGYKQLKGLKHSEIKNTLIAEYKRRLSVICKTQLTGKNLIKAINTYAIPILTYSFGVIKWSKTDVEQTERITRATLTKNNHLHPKSAVERLTIKRQSGGRGAIDIHQLWQKQINRLKNFFYSKSQTSNIHRSIVQNDRHLTPLNLDDNTDPPSTDNLQEQKIETWKRKVIHGRHPHDLQQSHIDKIASNKWLKVGNLFPETEGFIIAIQDQVINTKNYRKYIIKDPNVTNDKCRRCRTQTETIQHITGACTNLSQTDYTYRHNQVANIIHQKLAIKHKLIDNDKTPYYKYTPQIILENCSYKMYYDRAILTDKTIHYNRPDITLKDKQNKITYLIDIAVPNTHNIQNTITEKINKYTELKDEVTRIWNQEKVYIVPIVLSTTGVVPNYLHHSLKLINLPDTSYIMLQKAAILNTCRIVRKFMQLPLDENVTTTPGVDPIQT

SEQ ID NO: 20975 - protein, 1144 aa, Apodemia murphyi
MRTYYYITKLETDLTTYRKQLHELFEKQYPEIKVSEQRISDQRRTIVRNKLLSEETLKQLKEEVQMQLQTESQLVFEPFTPIHSEIENTPQAQLLRQNTQLLHVSTQTESIIFTVENDIETLLENNTTEDDQTQQIREKFRKTLLEYSGSDPIVRPKLPKLKYSTQLDRLVSVFNTDILNQFITEATQLIDIHTMMYCTALVISEELHYKIQYNKQNLRRNNPEKPPWEVRLERDIEKLRADCGRLTQYINNNRSRKLVKKVEAIFNNRHIQIHTRHENQNRKPQECLDTLKQKLALKVNRLKRYKKAQQKIHDNKLFATSEKQFYRNLQKTKPHTKDDQDMPTKEQLELFWSGIWEKQVEHNTNADWITVEKNKWSFIPEMEFSEITESDIRNTTTRLHNWKSPGIDKIHNYWYKKLTILHKSIAKNFTDIILGHQNIPEFIATGITYMLPKTLHSTQPSQYRPITCLPTIYKILTSAIATKINTHIEQHNIIAEEQKGCRRGHMGCKEQLIIDSTIHKHATSKNKNLHCTYIDYKKAFDSIPHSWLIQILQIYKINPKLTDFLHNVMTHWKTTLQLNAHNKTVTTRQIHIKKGIYQGDSLSPLWFCLALNPLSHLLNSTQSGYYFKRNTKDTIISHLIYMDDIKLYATSVKDMKTLIDITTKFSSDIRMEFGIEKCKTLHIIRGKVRPGDYEINQMETITAMESTDLYKYLGYKQLKGLDHTLIKKILTTEYKRRLNVLCKTKLSSKFLIKSINTFAIPILTYSFGIIKWTKTDIEQIERTTRTTLTKHNNLHPKSAIERLTIRRQDGGRGLIDIHHLWKKQIIKLKTFFYTKSQTSTIHKIITQCDQNYTPLNLNENNTPNVDRDPQQQKIEDWKKKVLHGRHPHDLEQSHIDRLASNKWLKIGNLFPETEGFMIAIQDQVINTKNFQKYIIKDPTIINDKCRKCHTQPETIQHITGACTTLTQTDYTHRHNQVTNIIHQKLALKHKLIQNTNTPYYKYTPETILENENYKLYYDRAILTDKTIHYNRPDITLQDKNNKTTYLIDIAVPNTHNLQKTISEKINKYADLKEEVLRVWKQDKVYIVPIVLSATGVIPKHLNHSLKLIELDTSIHTILQKAAILNTCRIVRKFMQIDEKENTPY

SEQ ID NO: 20976 - protein, 973 aa, Schrankia costaestrigalis
MQLVDIHTLIYCTAVVISEELNFKITEHTRNIKPKHTIKPPWQQRLEKDIEKLRVECGRLTQYIEHNRSNKVVKTVEAIFKNRSTHTRHENCNKTPEEFLDTLKQKLALKCNRLKRYNKAQQRKNDNIIFSTNEKLFYRTIHEKQINTNTDTNTTNTPTKEQFESFWAGIWEKQVHHNDKATWIEEEKIKWGDIVEMDFEEITETDIKSVTHRLHNWKSPGIDKIHNFWYKKLTFLHKFIAKSLTNIILGHQNIPEFIATGITYMLPKTNNSLQPSQYRPITCLPTIYKILTSAITAKINSHIEHHNIIAEEQKGCRRGHRGCKEQLIIDSTIHKHATTKNRNLHCTYIDYQKAYESVPHSWLIQILKIYRINPRIINFLHNIMDKWKTTLQINNPNSAITTRQISIKKGIYQGDALSPLWFCLALNPLSRQLQDSQVGYCFKNHSMVTSISHLIYMDDIKLYAQTTKHMQDLIEITSNFSKDIHMQFGLDKCKTLHIIKGKVQPGDYAISNTETITAMQSNELYKYLGYTQSKVLDHTDIKNTLTTEYKRRLNALCKRQLSGKHLIKAINTYAIPILTYSFGVIKWTKTDTAQLERTTRTTLTKHNNLHPKSAIERLTINRQYGGRGLIDIEHLRQKQVNNLSTFFQLKSSTSNIHKAIVMNDHNYTPLNLSQPQTIQHNIDPHKQKHEEWKKKVLHGRHPHDLQQPHIHQLASNKWLKIGNLFPETEGFMIAIQDQVINTKNYRKFIIKDSSITNDKCRKCHTQSETIQHITGACTTLSPTDYTHRHNQIANIIHQNLALKYSLILDTKTPYYKYTPQTILENLSHKLYYDRAILTDKTIPCNRPDIILQDKINKFTYLIDIAVPNTHNLQKTITEKISKYLELKEEITRIWKQEKVYIVPIVLSTTGIIPNHLFHSLKLLNLKESVYITMQKAAILNTCRIVRKFMQIDENEIDPHHNTPSTLTYNTPTT

SEQ ID NO: 20977 - protein, 1274 aa, Blastobasis adustella
MRRSLRIKTKNSAQAGTVAENTTDTASRSSSPISSTHSLFNSPYSSPNSFERLLDTRSSTVSPISTDIDNETHVPTLDVAREANAFLPASTKAGKPRVRMKWNKEVNIFIMRTYYYITKLETDLTTYRKSLHELFSLQYPEIKVSEQRISDQRRMIVKNKYLSQETLDALKKEVVRQLQTNSEENSVNNVSTHVQAELTLESQTLTINLQENIIDSQHDTNTLTSNTTTETQLITLQTDNGSVNMSEQDTFTDATCEKLHEKLQSKIIEYSGIDPAVRPNLPKLKYTKNLTYLVKIVNENILPRYVTQDTQLHDIHTAIYCAAMIVSEELNYKITQNNTRRKDNKKPYWQIRLEKDIQKLRADIGRVTQYINNNRSERLLKKVQEIFKNNTKHSTHERDNIQSNEFLDTLKQKLALKCHRLRRYNKAQKRKVDNVKFKTNEKLFYRNLYESQPSASINNNSETPTKEMLENYWAGIWEDKVQHNDRAEWIEEETTKWNAIEEMGFEEITEVDISNITAKLHNWKSPGIDKVHNYWYKKLTYLHKHIAKNITDIIVGKQNIPEFIATGITYMIPKTKNSSQPSQYRPITCLPTIYKIITSAITSKITSHIEHNNILAEEQKGCRRGHMGCKEQLIIDSTIHKHANTKTRNLHCTYIDYKKAFDSIPHTWLIQILQIYKVNSVLIDFLRNIMKFWRTTLHLKHGNTSISTRQISIEKGIYQGDSLSPLWFCLALNPLSHLLHKCRAGYRFKNTAGETAISHLIYMDDIKLYAKTEKEMKSLVETTTEFSNDINMQFGLDKCKTLHIKKGKVQPGDYVINDSDIITAMEPTDLYKYLGYKQLKGLQHSEIKNTLIAEYKRRLSVICKTQLTGKNLIKAINTYAIPILTYSFGVIKWSKTDVEQTERITRATLTKNNHLHPKSAVERLTIKRQSGGRGAIDIHQLWQKQINRLKNFFYSKSQTSNIHRSIVQNDRHLTPLNLDDNTDPPSTDNLQEQKIETWKRKVIHGRHPHDLQQSHIDKIASNKWLKVGNLFPETEGFIIAIQDQVINTKNYRKYIIKDPNVTNDKCRRCRTQTETIQHITGACTNLSQTDYTYRHNQVANIIHQKLAIKHKLIDNDKTPYYKYTPQIILENCSYKMYYDRAILTDKTIHYNRPDITLKDKQNKITYLIDIAVPNTHNIQNTITEKINKYTELKDEVTRIWNQEKVYIVPIVLSTTGVVPNYLHHSLKLINLPDTSYIMLQKAAILNTCRIVRKFMQLPLDENVTTTPGVDPIQT

SEQ ID NO: 20978 - protein, 1210 aa, Atrytonopsis hianna
MDETSHETPTPVLSVAQEVNTFLPASTKAGKPRVRMRWTKEVNIFIMRTYYYITKLETDMTIYRKQLHELFSQRYPEIKVTEQRISDQRRTIIKNNRLSKEIIDQIKEEVRLKLLEETHNITNNDTCAYDVIPSYQLHSSSQPCTNSISQTPLPSFTQISHTATQTESETLLLESELEIIVNNNIPIDIHVEEIRTKLKSAIINFSGMDPTTRPKLPKLKYSRKLSKLVDLFNKEILLQFLTDDTKLKDILTLIYCTAVVIAEELNYKINDHTSHNKTKISVKPPWQIRLEKDIEKLRADCGRLTQYIKNNRSKKVVKRVEEIFKSRIMHTKHENNNKKPEEFLDTLKQKLAIKVHRLRRYNKAQQRKQDNMLFATNEKQFYRKLQTKETDTPTTKILDTPTKTQLESFWSGIWEGEIQHNDKADWIKDEEQRWNAIKEMEFDGISEVDIENITAKLHNWKSPGIDKIHNYWFKKLTSVHKFIAKNLTQIITGKQNIPTFIATGITYMIPKTTYSPQPSQYRPITCLPTIYKILTSVIATKINRHIQDNGILAEEQKGCRRDHMGCKEQLIIDSTIHKHATTKNRNLHCTYIDYKKAYDSIPHSWLLKILHIYKINPTILNFMQSIMPHWKTSLQVNVNNNIITTRQIAIKRGIYQGDSLSPLWFCLALNPLSHLLHQCQVGYCLKHTREETIISHLIYMDDIKLYAKNHNDMKKLVKTTVEFSNDIRMEFGIEKCKTLHIVRGKVQQGDYVIDDKYTITALESTDIYKYLGYKQLKGLDHTILKQSLTTEYKRRMNAICNKQLSGRHIIKALNTYAIPVLTYSFGIIKWSKTDIEQIERTTRTTLTKHNYLHPKSAIERLTIRRHKGGRGLIDIHHLWQKQIYHLKTFFHTKSRTSNIHKAISHNDINFTPLNLNDHSNTIDPRKIDPQEEKLENWKKKSLHGRHPHDLEQTHIDAIASNKWLKIGNLFAETEGFLIAIQDQIISTKNYKKFVIKDSTVTNDKCRKCHTQSETIQHITGACITLTQTDYTHRHNQVTNIIHQQIALKHNLIQNSNTPYYKYTPAIVLENASYKLYYDRAILTDKTIHYNRPDITLQDKINKTTYLIDIAVPNTHNITKTIAEKISKYTELKEEVSRIWSQDKVYVVPIVLSTTGVIPKHLHHSLKQIGLKETLYVSLQKAVILNTCRIVRKFMQIDENNLIPHHAKHNN

SEQ ID NO: 20979 - protein, 1281 aa, Leptidea sinapis
METRSMKKRKIGPLPGGDRRGTPGAGAGCLSMRTVSGEELNRRAPTGSSENTTAENDRLTDRTTPTEPYSPCTISYTPSIPSSPLSSRYSPTPTLDAAREANAFLLASYLFIMRTYYYITKLETDLTTYRKQLHELFLQKYPDLNVTEQRIADQRRVIVKNKLLNQETLNQIKEEIKSQLEIENENQFHINISEPTNDVIPCSSTQTISNTQHNQSLNTFTYNTQSLQTFSYITQTSHNMSTQTEFVTIMMENDIDTVLDHNPGTNTEIEEICYKFKTALTQYSGMDPLVRPKLPKLRYNSHLFQLVNMFNSDILSRFISDDTKLTDIHTIVYCVALVISEELNYKVTEYIRSTRPKDCNKPPWQIRLEKDIEKLRADCGRLTQYINNNRSRKIIKHVKAIFKTGNTHTKHENSNIKPEEFLDTLKQKLALKVHRLKRYKKAQERKNDNTMFSTNEKNFYRNLHKLKTDTVNNPNVPTQEQLETFWSGIWEQQVHHNDKADWIIEEENKWNAIEEMDFTEITETDINNITARLHNWKSPGIDKIHNFWYKKLFSLHKIMAKNITDIIIGKQKIPDFIATGITYMLPKLQISPLPSQYRPITCLPTIYKILTSAITTKINKHVEHYNIIAEEQKGCRRGHMGCKEQLIIDSTIHKHATSKNRNLHCTYIDYKKAFDSIPHSWLIKILQIYKINPKIINFLHDIMSRWKTTLYLNTNQNTITTREIAIRKGIYQGDSLSPLWFCLALNPLSHLLRDCRAGYRLKHDIQETIVSHLIYMDDIKLYGKTEMEMKKLIDTTAQFSKDINMEFGLDKCRTLHIKRGKIRPGDYAVNNIDIIRAMEQTELYKYLGYKQLRGLDHTEIKNTLTIEFKKRINALCKTQLTSKHLIKSLNTYAIPILTYSFGIIKWTKTDIEQIERTIRTTLTKHNNLHPKSAIERLTIKREYGGRGLIDLNHLCQKQVGNLKDFFHLKSQTSEIHKAIVKNDINFTPLNLHEDISSQNTRRNDPQIQKLDSWKRKVLHGRHPHDLEQSHINTPASNKWLKIGNLFPETEGFIIAIQDQVVNTKNYRKFIIKDPSISNDKCRKCHVQPETIQHITGGCTTLTQTDYTHRHNQVVNIIHQKLALKHKLIQNTNTPYYKYKPQTVLENDTYKLYFDRAILTDRTIHYNRPDITLKDKLNEITYLIDIAVPNTHNLQKTISEKINKYTELKDEVARIWNQKKVYVIPIVLSTTGVIPNHLLHSLKLLELKETLYITLQKVAIFNTCRIVRKFLQIDEHDISPYT

SEQ ID NO: 20980 - protein, 1170 aa, Abrostola tripartita
METRSKSKRIGSLPGGDRRGTPGADAGCLSMRTVSGEELNRRAPTDKDTTAEIIDDGDRLTVRDSPVEPYSPSTVSYIPSIPSSPSIPSSPSIPLSPPISSSPLIRLNTDSPMPASSVAREVSSFLPASTKAGKQRVRMKWSKEVNLFIMRTYYYITKLETDMTIYRKLLHETFSRQYPHISVSEQRISDQRRTIVRNKLLSQEELDRLKEEVRTQLLEDNNTDINRTSPAPDQNFNVTPLHTQNSPDLFTQTYTHNTQISHTSTQTESVTLTLVNDIDTLVEHNPITEAYTKEIRDKFQTALTQYSGMDPTARPKLPKLKYSFKLTQLVILFNERVLSSFISESMQLVDLHTLIYCTALVVSEELGFKVTEYNGITRPKYNNKPAWQLRLENDIEKLRADCGRLTQYINNNRSNKVIKRVEAIFKSKIMHTRHENNNRTPEEFLDTLKQKLALKVHRLKRYKKTQQRKNDNTLFNTNEKLFYRNLAKPQSDTSAQDNTEIPTKEQLEAFWSGIWEEQVQHNDEAEWITEEEKRWTTIEEMEFIEITENDIATITAKLHNWKSPGLDKIHNFWYKKLFSLHKSLARNFTDIILGKQNIPEFIATGITYMLPKDKHSPLPSQYRPITCLPTIYKILTSAIATRISTHTEEHQIIAEEQKGCRRGHMGCKEQLVIDSTIHKHATSKNRNLHCTYIDYKKAFDSIPHSWLLKILQMYKINSKIIDFLRSIMLSWKTTLQLNYHQNSVTTRQISIKKGIYQGDSLSPLWFCLALNPLSFMLHRCQAGYSLKNTMQETTISHLIYMDDIKLYAKTEKEMKKLLDKTTEFSKDINMQFGLEKCKTIHIVRGKIKPGDYPVSNSDTITAMEPTDLYKYLGYKQLKGLDHTTLKNSLITEYKRRINALCKSQLIGKHLIKSINTYAIPILTYSFGVIKWSKTDIELVERSTRTTLTKHNNLHPKSAIERLTIKRHNGGRGLIDIHSLWQKQISRLKVFFLEKSRTSDIHKAITLNDHNYTPLNLSDQTIDLHSDDNRDPQKEKIDNWKKKVLHGRHPHDLEQSHINTAASNKWLKIGSLFPETEGFIIAIQDQIINTKNYRKFIIKDPTITNDKCRKCHSQPETIQHITGACTTLTQTDYTHRHNQVANIIHQKLALKYTLIQNTNTPYYKNILHKRF

SEQ ID NO: 20981 - protein, 1313 aa, Abrostola tripartita
METRSKSKRIGSLPGGDRRGTPGADAGCLSMRTVSGEELNRRAPTDKDTTAEIIDDGDRLTVRDSPVEPYSPSTVSYIPSIPSSPSIPSSPSIPLSPPISSSPLIRLNTDSPMPASSVAREVSSFLPASTKAGKQRVRMKWSKEVNLFIMRTYYYITKLETDMTIYRKLLHETFSRQYPHISVSEQRISDQRRTIVRNKLLSQEELDRLKEEVRTQLLEDNNTDINRTSPAPDQNFNVTPLHTQNSPDLFTQTYTHNTQISHTSTQTESVTLTLVNDIDTLVEHNPITEAYTKEIRDKFQTALTQYSGMDPTARPKLPKLKYSFKLTQLVILFNERVLSSFISESMQLVDLHTLIYCTALVVSEELGFKVTEYNGITRPKYNNKPAWQLRLENDIEKLRADCGRLTQYINNNRSNKVIKRVEAIFKSKIMHTRHENNNRTPEEFLDTLKQKLALKVHRLKRYKKTQQRKNDNTLFNTNEKLFYRNLAKPQSDTSAQDNTEIPTKEQLEAFWSGIWEEQVQHNDEAEWITEEEKRWTTIEEMEFIEITENDIATITAKLHNWKSPGLDKIHNFWYKKLFSLHKSLARNFTDIILGKQNIPEFIATGITYMLPKDKHSPLPSQYRPITCLPTIYKILTSAIATRISTHTEEHQIIAEEQKGCRRGHMGCKEQLVIDSTIHKHATSKNRNLHCTYIDYKKAFDSIPHSWLLKILQMYKINSKIIDFLRSIMLSWKTTLQLNYHQNSVTTRQISIKKGIYQGDSLSPLWFCLALNPLSFMLHRCQAGYSLKNTMQETTISHLIYMDDIKLYAKTEKEMKKLLDKTTEFSKDLVKINMQFGVEKCKTIHIVRGKIKPGDYPVSNSDTITAMEPTDLYKYLGYKQLKGLDHTTLKNSLITEYKRRINALCKSQLIGKHLIKSINTYAIPILTYSFGVIKWSKTDIELVERSTRTTLTKHNNLHPKSAIERLTIKRHNGGRGLIDIHSLWQKQISRLKVFFLEKSRTSDIHKAITLNDHNYTPLNLSDQTIDLHSDDNRDPQKEKIDNWKKKVLHGRHPHDLEQSHINTAASNKWLKIGSLFPETEGFIIAIQDQIINTKNYRKFIIKDPTITNDKCRKCHSQPETIQHITGACTTLTQTDYTHRHNQVANIIHQKLALKYTLIQNTNTPYYKYTPQTILENTTHKLYFDRAILTDRTIHYNRPDITLQDKINNTTYLIDIAVPNTHNVQKTISEKISKYAELKDEVSRIWRQEKVYVVPIVLSSTGVIPNHLLHSLKLLDLKETIYITLQKAAILNTCRIVRKFLQIDENDIAPHHNTP

SEQ ID NO: 20982 - protein, 1008 aa, Emesis russula
MNPTVRPKLPKLRYSPELFQLTELFNKNILKDYISTDIKLTDVHTLIFCTALTITEELKYKVIQDTQNKRRKEQNIPPWQYRLEKDIKILRADIGRITQYISNNNRSKKIVDRVEFLRKTITIHTKHEDNNKTLQHVLDTLKQKLALKAHRLKRYKKAQDRKNQNSIFVTNEKQFYRKLMKPPTNAQIEYTETPTKEQLEDYWSGIWEEQIAHRQTEWITAEEQRWKSIEQMDHTEISEEELKEITTRLHNWKSPGIDKIHNFWYKKLTCLHNLLAKNISEIIAGQQNIPEFIATGITYMLPKNNFSNQPSQYRPITCLPTIYKIITSIITRRITLHVENNNILAEEQKGCRRGHMGCREQLIIDSTIMKHAAAKNRNLHCTYIDYKKAFDSIPHSWLLQILDIYKINSTIVNFLRNIMPHWKTTLHLHSPNTNITTRQISIKKGIYQGDSLSPMWFCLALNPLSHRLRCDRAGYRLKQDSTETIISHLIYMDDIKLYARNEKEMKSIIKTTTEFSEDINMQFGLDKCRTVHIIKGKIRPGDYTINETDIIEAMEPTDVYKYLGFQQLKGLDHKTIKDTLTTEYKKRLNALCKTHLSGKNLIKAINTYAIPILTYSFGIIKWSNTNIEQIERTTRTTLTKHNNLHPKSAIERLSIKRQDGGRGLIDMYNLWKKQVYSLKTFFNKKAEISNIHKAIIQNDNGYTPLNLTENENLEKPTNENSQIKKIDDWRKKVLHGRHPHDLQQPHIDTKASNMWLKTGSLFPETEGFMIAIQDQVINTKNYRKYIIKDPTATNDRCRRCHSQAETIQHITGACTSLTQTDYTHRHNQLANIIHQSLAHKHKLIEDTKIPYYKYSPQTVLENTSYKIYYDRTILTDRTIHYNRPDITFQDKRNKTTYLIDIAVPNTHNIQKTITEKINKYADLREEIIRIWKQDNVYVVPIVISTTGVVPSSIHHSLKILDLKDNIINKLQKAAILNTCRLVRKFMQINETEITTHHPHTLTDPHHTL

SEQ ID NO: 20983 - protein, 1287 aa, Heliopetes ericetorum
METRSKKKRYGPLPGGDRRGTPGADAGCLSMRTVSGEELSRRAPTGSSENVTAETDTLTDRTTPIEPFSPSTISYTPSLPTSPSISSYDTPTLTPPLDVAQAASSFLPASTKAGKPRVRMSWNNEVNLFIMRTYYYITKLETDMTTYRKQLHEHFTRMYPEMYVTEQRIADQRRTIIKNKRISQEVLQQLKDEVKLQLEAEDMNTEINIDINAQTDYNDENITQYQKQTYNPSQLHLLKLQPQHTLTQTESVTLQIDNEYETMGNINYSTDIYTQKISEKFNVAFIHYSNIDPIDRPKLPKLSYSPKLFHIVYIFNHNILPKYVSENTQLTDIHTMVYCTALVIAQELKYKITYDPLNTKPIEPMKPPWQIRLEKDIQKLRADCGRLTQYINGNRSEKVIKHVEEIFRKRNIHSTHENYNRKPEEFLDTVKQMLALKVNRLRRYKKAQQRKKDNIIFSSNEKVFYRNLHKTQADTNIKRNKSVPIPTKEQFETFWSNIWENKTQHNTAADWIAEEESKWSTIEEMKFTEITETDITNITMRLHNWKSPGIDKIHNFWYKKLFTLHKSIAKNLTDIVLGKQDIPQYITTGITYMLPKAQYSLEPSQYRPITCLPTIYKILTSAITTKINKHIERHNIITEEQKGCRQGHMGCKEQLVIDSTIHKHAMSKNRNLQCTYIDYKKAFDSIPHSWLIQILNIYKINPNIVNFLSNIMANWKTTLHLSTKQTSIKTREIYIRRGIYQGDSLSPLWFCLALNPLSHLLHRCHIGYCLKHDTTDTIISHLIYMDDIKLYAQTEKDMKKLLNITNMFTDDIKMQFGLEKCKTLHIKRGKVLPGDYVINNTDTITALEPTELYKYLGFRQLKGLNHTEIKRTLTVEYRRRVNALCRTHLSGKHLIKSINTYAIPTLTYSFGIIKWTKTDIQQLERMTRTILTKHNNLHPKSAIERLTVKRQDGGRGLIDIFHQWQKQIRRLKSFFYTKSQSSEIHRAIVHNDNNYTPLNLNDNANMLQHTQNIEENNLYTQKIENWKKKVLHGRHPLDLEQPHIDKTASNKWLQLGNLFPETEGFVIAIQDQIINTKNYQKYIIKNPTASNDTCRKCHTQPETIQHITGACTTLTQTDYTHRHNQVANIIHQKLALKYKLIHDTTTPYYNYKPQTVLENKTHKLYYDRAILTDRTIHYNRPDITLLDKLNKHTYLIDIAVPNTHNIQKTITEKVNKYTELKEEVAKIWKQDKVLIVPIVLSTTGVIPKHLKTSLKQLDLKENTYITLQKAAILNTSRIVRKFLQIDE

SEQ ID NO: 20984 - protein, 1174 aa, Pyrgus malvae
MSWSKEVNLFIMRTYYYITKLETDLTTYRKQLHEHFTRQYPEIKVTEQRIADQRRTIVRNKRLSQETLEKLKEEVKLQLESEEVNENQEMSNTILDRSNPLRPQPYTQNIQPSCHSTSIHTDPVTLTLDAEIDNAEYFNPFNSIEIQEIYEKFKSVLSQYSNIDPEVRPKLPKLQYTPKLFQLVYIFNHDILKQFISDDTKLIDIHTIIYCTALVISEELNYKVTNHTQNTRIKDRNKPPWQKRLENDIEKLRVDCGRLTQYVNGNRSNKIMKHVEVIFKNRCTHTRHENNNRKPEEFLDTIKQKLALKVNRLKRYKKALQRKNDNIVFSTNQKIFYRNLQKPLLDGKIENNQEELPTKEQLELFWSEIWEKQTYHNNNADWIAEEEVKWSGIKEMEFIEITESDITNITAKLHNWKSPGVDKVHNFWYKKLYSLHKSIAKNLTAIILGKMEVPPFMTTGITYMLPKAKYTSEPSQYRPVTCLPTIYKILTSAITLRINRHIDQHNIIAEEQKGCRRGHMGCKEQLVIDSTIHKHATSKNRNLHCTYIDYKKAFDSIPHSWLVKILSIYKISPVIVDFLRNIMTQWKTTLQLSTHHNSVTTRQIYIRKGIYQGDSLSPLWFCLALNPISHLLHRCQVGYTFKCDTTNTVISHLIYMDDIKLYAKNEKDMNILLNTTTKFSKDIHMEFGLDKCRILHIKRSKILPGDYPVNHTDTIAAIEPNELYKYLGYKQLKGIDHTSIKHTLTTEYSNRINKICKTQLVGKHLIMALNAYAIPVLTYSFGIVKWTKTDIHKIERTTRTTLTRHNHLHPKSAIQRLTIKRKDGGRGLIDICQLWQKQISTLKLFFYNKSQISKIHEAIVQNDDNYTPLDLKNSYTVTQPAQITDNNNSYTQINKIQDWKKKVLHGRHPLDLEQPHIDSIASNKWLHIGNLFPETEGFMIAIQDQIINTKNYRKYIIKDPKIINDKCRKCHTQSETIQHITGACTTLTQTDYTHRHNQVTNIIHQKLALKYKLIQNINTPYYNYTPQTVLENKSYKLYFDRAILTDKTIHYNRPDITLKDKINKITYLIDIAIPNTHNLKKTISEKINKYSELKEEVTRIWKQDKVLIVPIVLSTTGVIPKHLLQSLKQLGLKETTYITLQKAAILNTCRIVRKFMQVEENDIISHHNNITPST

SEQ ID NO: 20985 - protein, 1294 aa, Pyrgus malvae
METRLRKKKRLGPLPGGDRRGTPGADAGCFSMRTVSGEELSRRAPTGNSENVTAEPDELTDRTSSIEPYSPSTISYTPSIATSPSTRSSNTHSPILTLDVAQVANAFLPASTKAGKPRVRMSWSKEVNLFIMRTYYYITKLETDLTTYRKQLHEHFTRQYPEIKVTEQRIADQRRTIVRNKRLSQETLEKLKEEVKLQLESEEVNENQEMSNTVLDRSNPLRPQPYTQNIQPSCHSTSIHTDPVTLTLDAEIDNAEYFNPFNSIEIQEIYEKFKSALSQYSNIDPEVRPKLPKLQYTPKLFQLVYIFNHDILKQFISDDTKLIDIHTIIYCTALVISEELNYKVTNHTQNTRIKDRNKPPWQKRLENDIEKLRVDCGQLTQYVNGNRSNKIMKHVEVIFKNRCTHTRHENNNRKPEEFLDTIKQKLALKVNRLKRYKKALQRKNDNIVFSTNQKIFYRNLQKPLLDGKIENNQEELPTKEQLELFWSEIWEKQTYHNNNADWIAEEEVKWSGIKEMEFIEITESDITNITAKLHNWKSPGVDKVHNFWYKKLYSLHKSIAKNLTDIILGKMEVPPFMTTGITYMLPKAKYTSEPSQYRPVTCLPTIYKILTSAITLRINRHIDQHNIIAEEQKGCRRGHMGCKEQLVIDSTIHKHATSKNRNLHCTYIDYKKAFDSIPHSWLVKILSIYKISPVIVDFLRNIMTQWKTTLQLSTHHNSVTTRQIYIRKGIYQGDSLSPLWFCLALNPLSHLLHRCQVGYTFKCDTTNTVISHLIYMDDIKLYAKTEKDMNILLNTTTKFSKDIHMEFGLDKCRILHIKRGKILPGDYPVNHTDTIAAIESNELYKYLGYKQLKGIDHTSIKHTLTTEYSNRINKICKTQLVGKHLIMALNAYAIPVLTYSFGIVKWTKTDIHKIERTTRTTLTRHNHLHPKSAIQRLTIKRKDGGRGLIDICQLWQKQISTLKLFFYNKSQISKIHEAIVQNDDNYTPLNLKNSYTVTQPAQITDNNNSYTQINKIQDWKKKVLHGRHPLDLEQPHIDSIASNKWLHIGNLFPETEGFMIAIQDQIINTKNYRKYIIKDPKIINDKCRKCHTQSETIQHITGACTTLTQTDYTHRHNQVTNIIHQKLALKYKLIQNINTPYYNYTPQTVLENKSYKLYFDRAILTDKTIHYNRPDITLKDKINKITYLIDIAIPNTHNLKNTISEKINKYSELKEEVTRIWKQDKVLIVPIVLSTTGVIPKHLLQSLKQLGLKETTYITLQKAAILNTCRIVRKFMQVEENDIISHHNNITPST

SEQ ID NO: 20986 - protein, 1280 aa, Heliopetes sublinea
METRSRKKKRLGPLPGGDRRGTPGADAGCLSMRTVSGEELNRRAPTGSSENVTAEIDRLTDRTTPNEPYSPSTISYTPSLTTSPYSLSSRTSNTHSPIPTLDVAQVANAFLPASTKAGKPRVRMSWSNEVNIFIMRTYYYVTKLETDLTTYRRQLHEHFIRQYPEINVTEQRIADQSRTIVRNKRLSLETLEKIKEEVKLQLEEDEAKENHFSENSITVSEHQNPIQIQPFTQNTQNINKLTESVTLTQDTETAEYLNASSSSQIQEICKKFKSLLTQYSSMDPKDRPKLPKLQYSPKLSQLIHMFNKDILKQFISENTKLIDIHTIIYCTAVVISQELNYKVINQTPNIGLKKHSKPPWQKRLENDIEKLRADCGRLTQYINGNRSKKILKHIEIIFKNRCTHTKHENSNRKPEEFLDTIKQKLALKVNRLKRYKRALQRKKDNSIFNTNQKTFYRNLQKPLIESNKQHTLPTKEQLELFWSGIWEKQTYHNNNADWITEEEAKWISIKEMDFNVITESEITNITARLHNWKSPGVDKVHNFWYKKLVSLHNLIAKNLTAIILGEQEVPPFMTIGITYMLPKSEYTTEPSQYRPVTCLPTLYKILTSAITLRINKHIDQHKIIAEEQKGCRRGHMGCKEQLIIDSTIHKHATSKSRNLHCTYIDYKKAFDSISHSWLIKILNIYKISPVIVDFLSNIMNHWKTTLHLSAHHNSITTRQISIRKGIYQGDSLSPLWFCLALNPLSHLLHRCQVGYSFKRDTTETVISHLIYMDDIKLYARTEKDIDKLLNTTTQFSKDINMEFGLDKCRILHIKRGKILPGDYSVNHVDTITAIEPNELYKYLGYKQSKGIDHSSIKHTLTIEYKNRIIKLCKTQLAGKHLIMALNAYAIPVLTYSFGIVKWTKTDIQKIERTTHTTLTRHNHLHPKSAVERLTIKRKDGGRGLIDLSELWQKQISRLKLFFHMKSQTSNIHHAIVQNDNNYTPLNLKNNNSDIQQTQSSINTNSYIQTHKIQEWKKKVLHGRHPLDLEQPHIDSIASNKWLHIGNLYPETEGFMIAIQDQIVNTKNYRKFIIKDPKIINDKCRKCHTQSETIQHITGACTTLTQTDYTHRHNQVVNIIHQKLAFKHKLIQNTNTPYYNYTPETILENTTYKLYYDRAILTDKTIHFNRPDITLQDKLHKITYLIDIAVPNTHNLQKTISEKITKYTELKEEVTRIWKQDKVLIVPIVLSTTGVIPKHLLQSLKQLQLKETTYITLQKAAILNTCRIVRKFMQVEENEII

SEQ ID NO: 20987 - protein, 1294 aa, Pyrgus malvae
METRLRKKKRLGPLPGGDRRGTPGADAGCFSMRTVSGEELSRRAPTGNSENVTAEPDELTDRTSSIEPYSPSTISYTPSIATSPSTRRSNTHSPILTLDVAQVANAFLPASTKAGKPRVRMSWSKEVNLFIMRTYYYITKLETDLTTYRKQLHEYFTRQYPEIKVTEQRIADQRRTIVRNKRLSQETLEKLKEEVKLQLESEEVNENQEMSNTVLDLSNPLRPQPYTQNIQPSCHSTSIHTDPVTLTRDAEIDNAECFNPFNSIEIQEICEKFKSAISQYSNIDPEVRPKLPKLQYTPKLFQLVYIFNHDILKQFISDDTKLIDIHTIIYCTALVISEELNYKVTNHTQNTRIKERNKPPWQKRLENDIEKLRVDCGRLTQYVNGNRSNKIMKHVEVIFKNRCTHTRHENNNRKPEEFLDTIKQKLALKVNRLKRYKKALQRKNDNIVFSTNQKIFYRNLQKPLLDGKIENNHEELPTKEQLELFWSEIWEKQTYHNNNADWIAEEEVKWSGIKEMEFIEITESDITNITAKLHNWKSPGVDKVHNFWYKKLYSLHKSIAKNLTAIILGKMEVPPFMTTGITYMLPKAKYTSEPSQYRPVTCLPTIYKILTSAITLRINRHIDQHNIIAEEQKGCRRGHMGCKEQLVIDSTIHKHATSKNRNLHCTYIDYKKAFDSIPHSWLVKILSIYKISPVIVDFLRNIMTQWKTTLQLSTHHNSVTTRQIYIRKGIYQGDSLSPLWFCLALNPLSHLLHRCQVGYTFKCDTTNTVISHLIYMDDIKLYAKTEKDMNILLNTTTKFSKDIHMEFGLDKCRILHIKRGKILPGDYRVNHTDTIAAIEPNELYKYLGYKQLKGIDHTSIKHTLTTEYSNRINKICKTQLVGKHLIMALNAYAIPVLTYSFGIVKWTKTDIHKIERTTRTTLTRHNHLHPKSAIQRLTIKRKDGGRGLIDICQLWQKQISTLKLFFYNKSQISKIHEAIVQNDDNYTPLNLKNSYTVTQPAQITDNNNSYTQINKIQDWKKKVLHGRHPLDLEQPHIDSIASNKWLHIGNLFPETEGFMIAIQDQIINTKNYRKYIIKDPKIINDKCRKCHTQSETIQHITGACTTLTQTDYTHRHNQVTNIIHQKLALKYKLIQNINTPYYNYTPQTVLENKSYKLYFDRAILTDKTIHYNRPDITLKDKINKITYLIDIAIPNTHNLKKTISEKINKYSELKEEVTRIWKQDKVLIVPIVLSTTGVIPKHLLQSLKQLGLKETTYITLQKAAILNTCRIVRKFMQVEENDIISHHNNITPST

SEQ ID NO: 20988 - protein, 1259 aa, Pyrgus malvae
MRTVSGEELSRRAPTGKNATAETNTLTDRTTPIEPYSPSTISYTPSVTTSPSSRSSNTSSPITTLDVAQAANAFLPASTKAGKPRVRMSWSNEVNIFIMRTYYYITKLETDLTTYRKQLHEHFTRQYPEIKVTEQRIADQRRTIVRNKRLNQETLEKIKAEVKLQIETEEVNESQFTENSNIVLDPQNPLQLQPNTQNTQSSCHSVHAEAVTLTADTEIDTAEYFNPSSNSEIQEICNKFRAALTLYSKMDPEVRPKLPKLQYSPKLSQLIYIFNHDILKQFILEDIKLLDIHAIVYCTALVISQELNYKVINNTQNKKLKDHNKPAWQKRLENDIVKLRADCGRLTQYINGNRSKRIMKHVEAIFKNRSTHARHENINKKPEEFFDTIKQKLALKVNRLKRYKKALQRKNDNNIFSTNQKVFYRNLQKPLLDGNIENNQEELPSKEQLESFWSGIWEEQTYHNNCADWIAEEELKWSSIKEMEFFEITESDITNITAKLHNWKSPGVDKIYNFWYKKLVSLHNSIAKNLTSIILGKQEVPPFLTTGITYMLPKAKYTPEPSQYRPVTCLPTIYKILTSAITLRINKHIDQYNIIAEEQKGCRRGHMGCKEQLVIDSTIHKHATSKNRNLHCTYIDYKKAFDSIPHSWLLKILNIYKISPVIVDFLRNIMTHWKTTLQLSTYHNSITTRQISIRKGIYQGDSLSPLWFCLALNPLSHLLHKCQVGYSFKNNTTDTIISHLIYMDDIKLYAKTEKDMDRLLNTTTKFSKDINMEFGLDKCRILHIKRGKILPGDYSINHIDTITALESKELYKYLGYKQLKGIDHTSIKQTLTTEYSNRINKLCKTQLFGKHLIMALNAYAIPVLTYSFGIVKWTKTDIHKIERTTRTTLTRHNHLHPKSALQRLTIRRKDGGRGLIDLFQLWQKQISRLKLFFYNKSQNSSIHEAIIHNDDNYTPLNLKNNNTNIQPSQFTANNNSFTQTQKIEEWKKKSLHGRHPLDLEQPHIDLIASNKWLQIGNLFPETEGFMIAIQDQIVNTKNYRKHIIKDPKIINDKCRKCQTQSETIQHITGACTTLTQTDYTHRHNQVVNIIHQKLALKYKLIQNTNTPYYNYTPQTVLENKSYKLYFDRGILTDKTIHYNRPDLTLMDKLNKTTYLIDIAVPNTHNLQKTISEKISKYTELKEEVTRIWKQDKVLIVPIVLSTTGVIPKHIFQSLKQLDLKENTYITLQKAVILNTCRIVRKFMQVEENDTRAHHITQSI

SEQ ID NO: 20989 - protein, 1294 aa, Pyrgus malvae
METRLRKKKRLGPLPGGDRRGTPGADAGCFSMRTVSGEELSRRAPTGNSENVTAEPDELTDRTSSIEPYSPSTISYTPSIATSPSTRRSNTHSPILTLDVAQVANAFLPASTKAGKPRVRMSWSKEVNLFIMRTYYYITKLETDLTTYRKQLHEYFTRQYPEIKVTEQRIADQRRTIVRNKRLSQETLEKLKEEVKLQLESEEVNENQEMSNTVLDLSNPLRPQPYTQNIQPSCHSTSIHTDPVTLTRDAEIDNAECFNPFNSIEIQEICEKFKSAISQYSNIDPEVRPKLPKLQYTPKLFQLVYIFNHDILKQFISDDTKLIDIHTIIYCTALVISEELNYKVTNHTQNTRIKERNKPPWQKRLENDIEKLRVDCGRLTQYVNGNRSNKIMKHVEVIFKNRCTHTRHENNNRKPEELLDTIKQKLALKVNRLKRYKKALQRKNDNIVFSTNQKIFYRNLQKPLLDGKIENNHEELPTKEQLELFWSEIWEKQTYHNNNADWIAEEEVKWSGIKEMEFIEITESDITNITAKLHNWKSPGVDKVHNFWYKKLYSLHKSIAKNLTAIILGKMEVPPFMTTGITYMLPKAKYTSEPSQYRPVTCLPTIYKILTSAITLRINRHIDQHNIIAEEQKGCRRGHMGCKEQLVIDSTIHKHATSKNRNLHCTYIDYKKAFDSIPHSWLVKILSIYKISPVIVDFLRNIMTQWKTTLQLSTHHNSVTTRQIYIRKGIYQGDSLSPLWFCLALNPLSHLLHRCQVGYTFKCDTTNTVISHLIYMDDIKLYAKTEKDMNILLNTTTKFSKDIHMEFGLDKCRILHIKRGKILPGDYRVNHTDTIAAIEPNELYKYLGYKQLKGIDHTSIKHTLTTEYSNRINKICKTQLVGKHLIMALNAYAIPVLTYSFGIVKWTKTDIHKIERTTRTTLTRHNHLHPKSAIQRLTIKRKDGGRGLIDICQLWQKQISTLKLFFYNKSQISKIHEAIVQNDDNYTPLNLKNSYTVTQPAQITDNNNSYTQINKIQDWKKKVLHGRHPLDLEQPHIDSIASNKWLHIGNLFPETEGFMIAIQDQIINTKNYRKYIIKDPKIINDKCRKCHTQSETIQHITGACTTLTQTDYTHRHNQVTNIIHQKLALKYKLIQNINTPYYNYTPQTVLENKSYKLYFDRAILTDKTIHYNRPDITLKDKINKITYLIDIAIPNTHNLKKTISEKINKYSELKEEVTRIWKQDKVLIVPIVLSTTGVIPKHLLQSLKQLGLKETTYITLQKAAILNTCRIVRKFMQVEENDIISHHNNITPST

SEQ ID NO: 20990 - protein, 1292 aa, Mimia chiapaensis
MATQSHPVVVDKPNEPISYSNPNSSSSSPINPYSPSTISYVPSISNSPSNSSSNIHSPTPTLNVAQVANSFLPASTKAGKPRVRMRWSKEVNLFIMRTYYHITKLETDLTIYRKQLHDHFIQKYPEINVTEQRIADQRRTIVRNKLLSEETLRQLKEEVKLQLEEDSENQIHANIDIPIDHQSSSSIPNSLQPQNFSQHTQNIQSLQTPTQNTQSLQILTQNTRSSQIPTQNTQTSHNMSTQTESVTLMLENEIDTIEDHNITTNIHVQDIYNKFRIALTQYSGMDPVVRPKLPKLRYSPNLSQLVNIFNHDILKKFISEDTKLTDIHTIIYCTALVISQELNYKITNYTHNTKTKDHCKPSWQIRLEKDIEKLRAECGRLTQYINGNRSNKVIKHVEAIFKTRNTHSTHEKNNRKPEEYLDTIKQKLALKVNRLKRYKKAQQRKNDNIIFSTNEKIFYRNLQKTQTNTTIKNYAELPTAEQLETFWSGIWEKQVQHNVNADWIAEEEIKWSTIKEMEFTEITETDITHITARLHNWKSPGIDKIHNFWYKKLFPLHKSIAKNLTDIILGKQAVPGFITTGITYMLPKTQYTPQPSQYRPITCLPTIYKILTSAITIKINKHVEQHNIIAEEQKGCRRGHMGCKEQLVIDSTIHKHATSRSRNLHCTYIDYKKAFDSIPHSWLIQILKIYKINPEIVDFLRNIMTLWKTSLQLSTRDKSITTRQISIRKGIYQGDSLSPLWFCLALNPLSHLLHRCQVGYCLKHDTTDTIISHLIYMDDIKLYAKTEKDMKKLLDTTTQFSTDINMEFGLDKCKTLHIKRGEVRPGDYNLNNNDTITALEPTELYKYLGYNQSKGLDHTTIRQTLTTEYKKRINILCKTQLSGKHLIQSINTYAIPVLTYSFGVVKWTKTDIELLERKTRTTLTIHNNLHPKSAIERLTIKRQDGGRGLIDIYQLWQKQISKLKSFFYTKSQTSNIHKAIVQNDRNYTPLNLNEDTNAQHTQSIDNNVPQTQKIEDWKKKVLHGRHPHDIEQPHIDKIASNKWLQIGNLFPETEGFMIAIQDQIINTKNYRKYIVKDPKSTNDKCRKCHTQPETIQHITGACITLTQTDYTHRHNQVVNIIHQKLALKHKLTQNMYTPYYNYTPQTILENDSYKLYYDRAILTDKTIHYNRPDITFQDKLNKVTYLIDIAVPNTHNIQKTITDKITKYAELKDEVSRIWKQDKVFVVPIVISTTGVVPKHLLHSLKQLDLKDTTYIPLQKAAILNTCRIVRKFLQIDENFILPHQVISSTST

SEQ ID NO: 20991 - protein, 1086 aa, Zopyrion sandace
MFSQIQNPLQQSTCSSQTPPIPIHNIQSSHQSRHTSTQIESVTLLLENEIDILEDRYPATNVEIQELQDKFKTALIQYSGTDPVVRPKLPKLRYNPKLFQLVDLFNHNILSKFISDDMKLIDIHTIIYCAALVISQELKYNITNCTENTKTYEHNKPPWQIRLEKDIEKLRADCGRLTQYISGNRSSKVIKHVETIFKSRIKHSRHENNNKKPEEFLDTVKQNLALKVNRLKRYKKAQERKKDNNVFTTNEKIFYRNLNKSKAGSSIENNANLPNKEELETYWSNIWEEQIYHNKTADWIAKEEDKWSSIEEMQFIEITETDIINITSRLHNWKSPGVDKIHNFWLKKLTPLHKSIAKNFTDIILGKQDVPEFIATGITYMMPKTHYTQHPSQYRPITCLPTMYKILTSALTIKINKHVEQYNILAEEQKGCRRGHMGCKEQLVIDSTIHKHAMSKNRNLHCTYIDFKKAFDSIPHSWLIHVLTIYKINSKVVDFLRNIMSRWKTSLQLSTHHEVITSREIFIRKGIYQGDSLSPLWFCLALNPLSNLLHRCQVGYSLKRGAADTIISHLIYMDDVKLYARSEKDMKKLLDTTSLFSKDIKMEFGLDKCKTLHINRGKIQPGDFVISDTEIIAALEPSDLYKYLGYKQLKGIDHTVIKETLTIEYRKRINTLCKTQLTGKHLIKALNTYAIPILTYSFGIVKWSKTDIDKLERTTRTTLTKHNNLHPKSAIERLTLKRKDGGRGLIDIHQLWQKQISTLRSFFYNKSQTSYIHEAIVQNDCNYTPLNLNENKDIQHTQNSHNDNTQKQKLEQWKQKVLHGRHPHDLEQSHIDTIASNKWLQIGNLFPETEGFIIAIQDQIINTKNYRKYIIKDPTVTNDKCRRCHNQPETIQHITGACTTLTQTDYTHRHNQLVNIIHQKLALKHKLIQRTNTPYYNYSPQTILENKSHKLYYDRAILTDKTIHYNRPDIILQDKLNKNTFLIDIAVPNAHNLQKTITDKITKYGELKEEVMRIWKQQKVFIVPIVVSTTGIIPKHLRHSLKQLDLKETTYISLQKAAILNTCRIVRKFLQIDENEIAPHNYTPPS

SEQ ID NO: 20992 - protein, 1350 aa, Myrinia binoculus
MTNGAMVLTKYAMRLRNREIPQAGTRMGESRPEPSGSGSPAYSGGGTVSHMTAQSQAVAVNTTTSHTTLEPLSPTSSTDRTTSIEPYSPSTISYTPSTPTSPVINSSNTHSPTSTLDVAQVANAFLPASTKAGKTRVRMSWSKDVNLFIMRTYYYITKLETDFTTYRKQLHQHFSRQYPEIKVTEQRIADQRRTIVRNKRLTQETLNQIKEEVKMQLEAEKENQIHTDTNILLNHQANSDVSPQMFPRSPNPLQSQPFIQNSHLSQIATQSTQSSQLHTQNTQTSQTATQNTPSLLVMPTQRQYVTLTENEVGTIEDHNPTIDTKIQKIHDQFKTALTQYSGMDPVVRPKLPKLKYSPKLSQLVNIFNHHILNKFIFEDTKLIDIHTIVYCTALVISQELNHRITNNTQNTRPKGHNQPPWQMRLEKDIEKLRADCGRLTQYINGNRSGKIIKHVEAIFKTRITHSRHENNNKKPEEFLDTVKQKLALKVNRLKRYKKAQQRKNDNAVFNTNEKVFYRHLHKPQIDNTVENNSKLPTEEQLETFWSGIWEKQIQHNKTADWIAEEEAKWSTIEEMQFIEITEGDIINITARLHNWKSPGVDKIHNFWYKKLFSVHKSIAKNLTDIILGKQDVPQFIATGITYMLPKTHYTQQPSQYRPITCLPTIYKILTSAITLKINKHIEQHNIIAEEQKGCRRGHMGCKEQLVIDSTIHKHAASNNRNLHCAYIDYKKAFDSIPHSWLIQILNIYKISPKIVDFLSNIMTRWKTTLHLSTRHKTITTRQIIIRKGIYQGDSLSPLWFCLALNPLSRLLHHCQVGYCLKHDTTDTTISHLIYMDDIKLFAKTDKDMKKLLDTTTQFSKDINMEFGLDKCKTLHIKRGKVQPGDYIINDTDTITALEPTELYKYLGYTQLKALNHATIKQTLKTEYTKRINALCKTQLSGKNLIKSLNTYAIPILTYSFGVIKWTKTDIEQIERKTRTTLTKYNNLHPKSATERLTIKRQDGGRGLIDVYQLWQKQINRLKSFFYTKSQTSNIHKSIIQNDHNYTPLNLNEDTNKQHTQTTDNINPHLQKIENWKKKVLHGRHPHDLEQPYIDKIASNKWLQIGNLFPETEGFMIAIQDQIINTKNYRKYIVKDPTITNDKCRKCHTQPETIQHITGACKTLTQTDYTHRHNQVVNIIHQKLALKHKLIQNTNTPYYNYTPQTILENDLHKLYYDRAILTDKTIHYNRPDITLLDKLNKVTYLIDIAVPNTHNLQKTITEKITKYAELQEEVTRIWRQEKVFVVPIVLSSTGVIPKHLRHSLKQLDLNDTTYIILQKAAVLNTCRIVRKFLQIEENEIVSHHLITSTST

SEQ ID NO: 20993 - protein, 1199 aa, Zera sp.
MSWSKDVNLFIMRTYYYITKLETDFTTYRKQLHELFSQQYPEINVTEQRIADQRRTIVKNKRLNQDTLNQIKEEVKIQLETENQIHSTEIGTTEYQIENDLNSQSATLHQTLIQSQSSNQNSQTLYSNTQHTQLSHITAPIIQSSLMSTQTSSVSLILENDTNYLQDNNVTTNINTQEINEKFKTALIQYSGMNPTARPKLPKLRYTPQLFELINIFNQDILKQFISEDTQLTDIHTIIYCTALVISQELNYKINNPENIKPKNHNKPAWQIRLENDIEKLRASCGRLTQYIKGNRSRKILKHVKALFKNITTHTRYEKENRKPEDYLDTLKQKLALKVSRLKRYNKALRRKTDNTLFTTNEKIFYRNLHNSSINSITENKPKLPTEEQLESFWSGIWEKQVQHNEKADWIAEEKNTWSTIEEMTFVEITEIDITKVTNRLHNWKSAGVDRIHNFWYKKLFTLHKTLAKNLTEIILGNQGIPEFITIGITYMLPKTQHSQEPSQYRPITCLPTIYKILTSAVALKINQHIEQNNIIAEEQKGCRRGHMGCKEQLIIDSTIHKHATSKNRNLHCTYIDYKKAFDSIPHSWLIEILQIYKINPKIINFLRKTMSKWKTTLVLSTHQKSITTRQIHIKRGIYQGDALSPLWFCLALNPLSQLLHHCQVGYCLKHDTKDTIISHLIYMDDIKLYAKTKKDMAQLLDTTTQFSSDINMEFGLDKCKTLHIMRGKVRPGNYELNNTDIITALEPSDVYKYLGYKQLKKLDHTAIKTTLTTEYRKRINTLCKTQLSGKNLIKSFNTYAIPILTYSFGIVKWTKTDIQQLERTTRTILTKHNNLHPKSAVERLTIKRQDGGRGLVNIFQLWQKQISRLKHFFLTKSQTSDIHKTIVYNDQNYTPLNLKEETNIQYTQSNDNNDTQKQNIEDWKKKVLHGRHPHDLEQPHIDAKASNKWLKIGNLFPETEGFMIAIQDQIINTKNYRKYIIKDPTILNDKCRKCHNQPETIQHITGACITLTQTDYTHRHNQVANIIHQKLAYKYKLIHNTSTPYYNYTPQTILENDSHKLYYDRAILTDKTIHYNRPDITLRDKINKITYLIDIAVPNTHNLQKTITEKISKYAELKEEVTRIWKQEKVFIIPIVVSTTGVIPKHLRYSLKQIDLHENTYITLQKAAILNTCRIVRKFMQLEENDIVPHHSMSNTIS

SEQ ID NO: 20994 - protein, 1297 aa, Leptidea sinapis
METRSMKKRKIGPLPGGDRRGTPGAGAGCLSMRTVSGEELNRRAPTGSSENTTAENDRLTDRTTPTEPYSPCTISYTPSIPSSPLSSRYSPTPTLDAAREANAFLLASTKAGKPRVRMKWSKEMNLFIMRTYYYITKLETDLTTYRKQLHELFLQKYPDLNVTEQRIADQRRVIVKNKLLNQETLNQIKEEIKSQLEIENENQFHINISEPTNDVIPCSSTQTIPNTQHNQSLNTFSYNIQSLQTFSYITQTSHNMPTQTEFVTIMMENDIDTVLDHNPGTNTEIEEICYKFKTALTQYSGMDPLVRPKLPKLRYNSHLFQLVNMFNSDILSRFISDDTKLTDIHTIVYCVALVISEELNYKVTEYIRSTRPKDCYKPPWQIRLEKDIEKLRADCGRLTQYINNNRSRKIIKHVKAIFKAGNTHTKHENSNIKPEEFLDTLKQKLALKVHRLKRYKKAQERKNDNTMFSTNEKNFYRNLHKLKTDTVNNPNVPTQEQLETFWSGIWEQQVHHNDKADWIIEEENKWNAIEEMDFTEITETDINNITVRLHNWKSPGIDKIHNFWYKKLFSLHKIMAKNITDIIIGKQKIPDFIATGITYMLPKLQISPLPSQYRPITCLPTIYKILTSAITTKINKHVEHYNIIAEEQKGCRRGHMGCKEQLIIDSTIHKHATSKNRNLHCTYIDYKKAFDSIPHSWLIKILQIYKINPKIINFLHDIMSRWKTTLYLNTNQNTITTREIAIRKGIYQGDSLSPLWFCLALNPLSHLLRDCRAGYRLKHDIQETIVSHLIYMDDIKLYGKTEMEMKKLIDTTAQFSKDINMEFGLDKCRTLHIKRGKIRPGDYAVNDIDIIRAMEQTELYKYLGYKQLRGLDHTEIKNTLTIEFKKRINALCKTQLTSKHLIKSLNTYAIPILTYSFGIIKWTKTDIEQIERTIRTTLTKHNNLHPKSAIERLTIKREYGGRGLIDLNHLCQKQVGNLKDFFHLKSQTSEIHKAIVKNDINFTPLNLHEDISTQNTRRNDPQIQKLDSWKRKVLHGRHPHDLEQSHINTAASNKWLKIGNLFPETEGFIIAIQDQVVNTKNYRKFIIKDPSISNDKCRKCHVQPETIQHITGGCTTLTQTDYTHRHNQVVNIIHQKLALKHKLIQNTNTPYYKYKPQTVLENDTYKLYFDRAILTDRTIHYNRPDITLKDKLNEITYLIDIAVPNTHNLQKTISEKINKYTELKDEVARIWNQKKVYVIPIVLSTTGVIPNHLLHSLKLLELKETLYITLQKVAILNTCRIVRKFLQIDEHDISPYT

SEQ ID NO: 20995 - protein, 1297 aa, Leptidea sinapis
METRSMKKRKIGPLPGGDRRGTPGAGAGCLSMRTVSGEELNRRAPTGSSENTTAENDRLTDRTTPTEPYSPCTISYTPSIPSSPLSSRYSPTPTLDAAREANAFLLASTKAGKPRVRMKWSKEMNLFIMRTYYYITKLETDLTTYRKQLHELFLQKYPDLNVTEQRIADQRRVIVKNKLLNQETLNQIKEEIKSQLEIENENQFHINISEPTNDVIPCSSTQTIPNTQHNQSLNTFSYNIQSLQTFSYITQTSHNMPTQTEFVTIMMENDIDTVLDHNPGTNTEIEEICYKFKTALTQYSGMDPLVRPKLPKLRYNSHLFQLVNMFNSDILSRFISDDTKLTDIHTIVYCVALVISEELNYKVTEYIRSTRPKDCYKPPWQIRLEKDIVKLRADCGRLTQYINNNRSRKIIKHVKAIFKTGNTHTKHENSNIKPEEFLDTLKQKLALKVHRLKRYKKAQERKNDNTMFSTNEKNFYRNLHKLKTDTVNNPNVPTQEQLETFWSGIWEQQVHHNDKADWIIEEENKWNAIEEMDFTEITETDINNITVRLHNWKSPGIDKIHNFWYKKLFSLHKIMAKNITDIIIGKQKIPDFIATGITYMLPKLQISPLPSQYRPITCLPTIYKILTSAITTKINKHVEHYNIIAEEQKGCRRGHMGCKEQLIIDSTIHKHATSKNRNLHCTYIDYKKAFDSIPHSWLIKILQIYKINPKIINFLHDILSRWKTTLYLNTNQNTITTREIAIRKGIYQGDSLSPLWFCLALNPLSHLLRDCRAGYRLKHDIQETIVSHLIYMDDIKLYGKTEMEMKKLIDTTAQFSKDINMEFGLDKCRTLHIKRGKIRPGDYAVNDIDIIRAMEQTELYKYLGYKQLRGLDHTEIKNTLTIEFKKRINALCKTQLTSKHLIKSLNTYAIPILTYSFGIIKWTKTDIEQIERTIRTTLTKHNNLHPKSAIERLTIKREYGGRGLIDLNHLCQKQVGNLKDFFHLKSQTSEIHKAIVKNDINFTPLNLHEDISTQNTRRNDPQIQKLDSWKRKVLHGRHPHDLEQSHINTAASNKWLKIGNLFPETEGFIIAIQDQVVNTKNYRKFIIKDPSISNDKCRKCHVQPETIQHITGGCTTLTQTDYTHRHNQVVNIIHQKLALKHKLIQNTNTPYYKYKPQTVLENDTYKLYFDRAILTDRTIHYNRPDITLKDKLNEITYLIDIAVPNTHNLQKTISEKINKYTELKDEVARIWNQKKVYVIPIVLSTTGVIPNHLLHSLKLLELKETLYITLQKVAILNTCRIVRKFLQIDEHDISPYT

SEQ ID NO: 20996 - protein, 1042 aa, Leptidea sinapis
MSTQTEFVTIMMENDIDTVLDHNPGTNTEIEEICYKFKTALTQYSGMDPLVRPKLPKLRYNSHLFQLVNMFNSDILSRFISDDTKLTDIHTIVYCVALVISEELNYKVTEYIRSTRPKDCYKPPWQIRLEKDIEKLRADCGRLTQYINNNRSRKIIKHVKAIFKTGNTHTKHENSNIKPEEFLDTLKQKLALKVHRLKRYKKAQERKNDNTMFSTNEKNFYRNLHKLKTDTVNNPNVPTQEQLETFWSGIWEQQVHHNDKADWIIEEENKWNAIEEMDFTEITETDINNITVRLHNWKSPGIDKIHNFWYKKLFSLHKIMAKNITDIIIGKQKIPDFIATGITYMLPKLQISPLPSQYRPITCLPTIYKILTSAITTKINKHVEHYNIIAEEQKGCRRGHMGCKEQLIIDSTIHKHATSKNRNLHCTYIDYKKAFDSIPHSWLIKILQIYKINPKIINFLHDIMSRWKTTLYLNTNQNTITTREIAIRKGIYQGDSLSPLWFCLALNPLSHLLRDCRAGYRLKHDIQETIVSHLIYMDDIKLYGKTEMEMKKLIDTTAQFSKDINMEFGLDKCRTLHIKRGKIRPGDYAVNDIDIIRAMEQTELYKYLGYKQLRGLDHTEIKNTLTIEFKKRINALCKTQLTSKHLIKSLNTYAIPILTYSFGIIKWTKTDIEQIERTIRTTLTKHNNLHPKSAIERLTIKREYGGRGLIDLNHLCQKQVGNLKDFFHLKSQTSEIHKAIVKNDINFTPLNLHEDISSQNTRRNDPQIQKLDSWKRKVLHGRHPHDLEQSHINTAASNKWLKIGNLFPETEGFIIAIQDQVVNTKNYRKFIIKDPSVSNDKCRKCHVQPETIQHITGGCTTLTQTDYTHRHNQVVNIIHQKLALKHKLIQNTNTPYYKYKPQTVLENDTYKLYFDRAILTDRTIHYNRPDITLKDKLNEITYLIDIAVPNTHNLQKTISEKINKYTELKDEVARIWNQKKVYVIPIVLSTTGVIPNHLLHSLKLLELKETLYITLQKVAILNTCRIVRKFLQIDEHDISPYT

SEQ ID NO: 20997 - protein, 1266 aa, Leptidea sinapis
MRTVSGEELNRRAPTGSSENTTAENDRLTDRTTPTEPYSPCTISYTPSIPSSPLSSRYSPTPTLDAAREANAFLLAFTKAGKPRVRMKWSKEMNLFIMRTYYYITKLETDLTTYRKQLHELFLQKYPDLNVTEQRIADQRRVIVKNKLLNQETLNQIKEEIKSQLEIENENQFHINISEPTNDVIPCSSTQTIPNTQHNQSLNTFTYNIQSLQTFSYITQTSHNMPTQTEFVTIMMENDIDTVLDHNPGTNTEIEEICYKFKTALTQYSGMDPLVRPKLPKLRYNSHLFQLVNMFNSDILSRFISDDTKLTDIHTIVYCVALVISEELNYKVTEYIRSTRPKDCYKPPWQIRLEKDIEKLRADCGRLTQYINNNRSRKIIKHVKAIFKTKNTHTKHENSNIKPEEFLDTLKQKLALKVHRLKRYKKAQERKNDNTMFSTNEKNFYRNLHKLKTDTVNNPNVPTQEQLETFWSGIWEQQVHHNDKADWIIEEENKWNAIEEMDFTEITETDINNITVRLHNWKSPGIDKIHNFWYKKLFSLHIIMAKNITDIIIGKQKIPDFIATGITYMLPKLQISPLPSQYRPITCLPTIYKILTSAITTKINKHVEHYNIIAEEQKGCRRGHMGCKEQLIIDSTIHKHATSKNRNLHCTYIDYKKAFDSIPHSWLIKILQIYKINPKIINFLHDIMSRWKTTLYLNTNQNTITTREIAIRKGIYQGDSLSPLWFCLALNPLSHLLRDCRAGYRLKHDIQETIVSHLIYMDDIKLYGKTEMEMKKLIDTTAQFSKDINMEFGLDKCRTLHIKRGKIRPGDYAVNDIDIIRAMEQTELYKYLGYKQLRGLDHTEIKNTLTIEFKKRINALCKTQLTSKHLIKSLNTYAIPILTYSFGIIKWTKTDIEQIERTIRTTLTKHNNLHPKSAIERLTIKREYGGRGLIDLNHLCQKQVGHLKDFFHLKSQTSEIHKAIVKNDINFTPLNLHEDISSQNTRRNDPQIQKLDSWKRKVLHGRHPHDLEQSHINTAASNKWLKIGNLFPETEGFIIAIQDQVVNTKNYRKFIIKDPSVSNDKCRKCHVQPETIQHITGGCTTLTQTDYTHRHNQVVNIIHQKLALKHKLIQNTNTPYYKYKPQTVLENDTYKLYFDRAILTDRTIHYNRPDITLKDKLNEITYLIDIAVPNTHNLQKTISEKINKYTELKDEVARIWNQKKVYVIPIVLSTTGVIPNHLLHSLKLLELKETLYITLQKVAILNTCRIVRKFLQIDEHDISPYT

SEQ ID NO: 20998 - protein, 1168 aa, Nymphalis urticae
MKWSSTVNMFIMRTYYYITRLETDMTTYRQQLHEHFFRKYPEIIVSEQRIADQRRTIIRNKLLTQEVLDRLKEEARTQLEKELQNNIEPIYHTQTLPEIQTQTHIQSQSYSQSTQTSCSSTQTESIALTLENDIETLDLHNTITETHTQEIHDKFRAALTQYSGMDPAARPKLPKLKYSPQLSQLTNLFNQKILNLFISKDTKLIDIQTLIYCTALVISEELKYKITEYTGNRRPRLDYKPPWQIRLEKDKEKLRADCGRLTQYINNNRSKKVLKKVEVIFKSTKLHTKHENNNRTPEEYLDTLKQKLALKVHRLRRYKKAQQRKNDNITFITNEKLFYRNLLKPQTRTVSRENVKTPTQEELETFWCDIWEKHTQHNDKADWIDKEKNRWSLIEEMEFVEITATDITYITSKLHNWKSPGIDKIHNYWYKKLVTLHELIANNLTEIILEKQNIPEFLSTGIFYLLPKTTHSSQPSQYRPITCLPTIYKILTSVIASKINNHIEKHNIIAEEQKGCRRGHMGCKEQLIIDSIIHKHATTKNRNLHCTYIDYKKAFDCIPHSWLIQVLEIYKINPTIINFLSTIMKRWKTTLQLNSQNKTIITRQIAIKKGIFQGDSLSPVWFCLALNPLSHLLHTCQAGYSIKQSAKETIISHLIYMDDIKLYSKTEKDMKILIDITTEFSKDINMEFGLDKCETIHIIKGKIKPGNYAVNDKEIITAMEPNDFYKYLGYKQSKGLDNTIIKQTITTEYKKRINAVCQTQLYGKNLIKALNTYAIPILTYSFGIIKWSKTDLENIEQFTRTTLTKYNNLHPKSAIERLTIKRQNGGRGLIDIQNLWQKQINKLKIFFDLKSHSSHIHQAITVTDQNFTPLNLSEQNKIENNSNNDPQKQKIDNWKKKILHGRHTHELEQPHIDAIASNKWLQIGNLFPETEGFIIAIQDQIINTRNYRKYIIKDPTVKNDKCRKCHKHPETIQHITGACITLTQTDYTHRHNQVVNIIHLKLALTHSLIQNTNTLYYKYTPQTILENTSHKLYYDRAILTDKTIHYNRPDIILQNKKNKSTYIIDIAVPNTHNIQKTITEKINKYTELREEIARIWRQEKVYIVPIVLSTTGVIPSHLHHSLKSKSQPKLLNLKKSTYIPLQKAAILNTCRIVRKFMQIEENDSPLPN

SEQ ID NO: 20999 - protein, 1277 aa, Nymphalis urticae
METRSKRKRIESLPGGDRRGTPGAGAGCFSMRTVSGEELSRRAPTDKDATAETTDTDRTISPSTISYIPSNPSSPSISSSISISHEIPPIPTLDVAREVNAWLPASTKAGKPRVRMKWSSTVNMFIMRTYYYITRLETDMTTYRQQLHEHFSRKYPEIIVSEQRIADQRRTIIRNKLLTQEVLDRLKEEARTQLEKELQNNIQPIYHTQTLPEIQTQTHIQSQSYSQSTQTSCSSTQTESIALTLENDIETLDLHNTITETHTQEIHDKFRAALTQYSGMDPAARPKLPKLKYSPQLSQLTNLFNQKILNLFISKDTKLIDIQTLVYCTALVISEELKYKITEYTGNRRPRLDYKPPWQIRLEKDIEKLRADCGRLTQYINNNRSKKVVKRVEVIFKSTKLHTKHENNNRTPEEYLDTLKQKLALKVHRLRRYKKAQQRKNDNITFITNEKLFYRNLLKPQTRTVSRENVKTPTQEELETFWCDIWEKHTQHNDKADWIDKEKNRWSLIEEMEFVEITATDITYITSKLHNWKSPGIDKIHNYWYKKLVTLHESIANNLTEIILEKQNIPEFLSTGISYLLPKTTHSSQPSQYRPITCLPTIYKILTSVIASKINNHIEKHNIIAEEQKGCRRGHMGCKEQLIIDSIIHKHATTKNRNLHCTYIDYKKAFDCIPHSWLIQVLQIYKINPTIINFLSTIIKRWKTTLQLSSQNKTIITRQIAIKKGIFQGDSLSPVWFCLALNPLSHLLHTCQAGYSIKQSAKETIISHLIYMDDIKLYSKTEKDMKVLIDITTEFSKDINMEFGLDKCKTIHIIKGKIKPGNYAVNDNEIITAMEPNDFYKYLGYKQSKGLDHTIIKQTITTEYKKRINAVCQTQLYGKNLIKALNTYAIPILTYSFGIIKWSKTDLENIQRFTRTTLTKHNNLHPKSAIERLTIKRQNGGRGLIDIQNLWQKQTNKLKIFFDLKSHSSHIHQAITVTDQNFTPLNLSEQNKIENNSNNDPQKQKIDNWKKKILHGRHPHELEQPHIDAIASNKWLQIGNLFPETEGFIIAIQDQIINTRNYRKYIIKDPTVKNDKCRKCHRHPETIQHITGACITLTQTDYTHRHNQVVNIIHLKLALTHSLIQNTNTLYYKYTPQTILENTSHKLYYDRAILTDKTIHYNRPDIILQDKRNKSTYIIDIAVPNTHNIQKTITEKINKYTELREEIARIWRQEKVYIVPIVLSTTGVIPSHLHHSLKLLNLKKSTYIPLQKAAILNTCRIVRKFMQIEENDSPLPN

SEQ ID NO: 21000 - protein, 1277 aa, Nymphalis urticae
METRSKRKRIESLPGGDRRGTPGAGAGCFSMRTVSGEELNRRAPTDKDATAETTDTDRTISPSTISYIPSNPSSPSISSSISISHEIPPIPTLDVAREVNAWLPASTKAGKPRVRMKWSATVNMFIMRTYYYITRLETDMTTYRQQLHEHFSRKYPEIIVSEQRIADQRRTIIRNKLLTQEVLDRLKEEARTQLEKELQNNIQPIYHTQTLPEIQTQTYIQSQSYSQSTQTSCSSTQTEPIALTLENDIETLDLHNTITETHTQEIHDKFRAALTQYSGMDPAARPKLPKLKYSPQLSQLTNLFNQKILNLFISKDTKLIDIQTLIYCTALVISEELKYKITEYTGNRRPRLDYKPPWQIRLEKDIEKLRADCGRLTQYINNNRSKKVVKRVEVIFKSTKLHTKHENNNRTPEEYLDTLKQKLALKVHRLRRYKKAQQRKNDNITFITNEKLFYRNLLKPQTRTVSRENVKTPTQEELETFWCDIWEKHTQHNDKADWIDKEKNRWSLIEEMEFVEITATDITYITSKLHNWKSPGIDKIHNYWYKKLVTLHESIANNLTEIILEKQNIPEFLSTGISYLLPKTTHSSQPSQYRPITCLPTIYKILTSVIASKINNHIEKHNIIAEEQKGCRRGHMGCKEQLIIDSIIHKHATTKNRNLHCTYIDYKKAFDCIPHSWLIQVLQIYKINPTIINFLSTIIKRWKTTLQLNSQNKTIITRQIAIKKGIFQGDSLSPVWFCLALNPLSHLLHTCQAGYSIKQSTKETIISHLIYMDDIKLYSKTEKDMKILIDITTEFSKDINMEFGLDKCKTIHIIKGKIKPGNYAVNDNEIITAMEPNDFYKYLGYKQSKGPDHTIIKQTITTEYKKRINAVCQTQLYGKNLIKALNTYAVPILTYSFGIIKWSKTDLENIERFTRTTLTKYNNLHPKSAIERLTIKRQNGGRGLIDIQNLWQKQINKLKIFFDLKSHSSHIHQAITVTDQNFTPLNLSEQNKIENNSNNDPQKQKIDNWKKKILHGRHPHELEQPHIDAIASNKWLQIGNLFPETEGFIIAIQDQIINTRNYRKYIIKDPTVKNDKCRKCHKHPETIQHITGACITLTQTDYTHRHNQVVNIIHLKLALTHSLIQNTNTLYYKYTPQTILENTSHKLYYDRAILTDKTIHYNRPDIILQDKKNKSTYIIDIAVPNTHNIQKTITEKINKYTELREEIARIWRQEKVYIVPIVLSTTGVIPSHLHHSLKLLNLKKSTYIPLQKAAILNTCRIVRKFMQIEENDSPLPN

SEQ ID NO: 21001 - protein, 1277 aa, Nymphalis urticae
METRSKRKRIESLPGGDRRGTPGAGAGCFSMRTVSGEELSRRAPTDKDTTAETTDTDRTISPSTISYIPSNPSSPSISSSISISHEIPPTPTLDVAREVNAWLPASTKAGKPRVRMKWSATVNMFIMRTYYYITRLETDMTTYRQQLHEHFSRKYPEIIVSEQRIADQRRTIIRNKLLTQEVLDRLKEEARTQLEKELQNNIQPINHTQTLPEIQTQTHIQSQSYSQGTQTSCSSTQTESIALTLENDIETLDLHNTITETHTQEIHDKFRAALTQYSGMDPAARPKLPKLKYSPQLSQLTNLFNQKILNLFISKDTKLIDIQTLIYCTALVISEELKYKITEYTGNTRPRLDYKPPWQIRLEKDIEKLRADCGRLTQYINNNRSKKVVKRVEVIFKSTKLHTKHENNNRTPEEYLDTLKQKLALKVHRLRRYKKAQQRKNDNITFITNEKLFYRNLLKPQTRTVSRENVKTPTQEELETFWCNIWEKHTQHNDKADWIDKEKNRWSLIEEMEFVEITATDITYITSKLHNWKSPGIDKIHNYWYKKLVTLHESIANNLTEIILKKQNIPEFLSTGISYLLPKTTHSSQPSQYRPITCLPTIYKILTSVIASKINNHIEKHNIIVEEQKGCRRGHMGCKEQLIIDSIIHKHATIKNRNLHCTYIDYKKAFDCIPHSWLIQVLQIYKINPTIINFLSTIIKRWKTTLQLNSQNKTIITRQIAIKKGIFQGDSLSPVWFCLALNPLSHLLHTCQAGYSIKQSAKETIISHLIYMDDIKLYSKTEKDMKILIDITTEFSKDINMEFGLDKCKTIHIIKGKIKPGNYTVNDNEIITAMEPNDFYKYLGYKQSKGLDHTIIKQTITTEYKKRINAVCQTQLYGKNLIKALNTYAIPILTYSFGIIKWSKTDLENIERFTRTTLTKYNNLHPKSAIERLTIKRQNGGRGLIDIQNLWQKQINKLKIFFDLKSHSSHIHKAITVTDQNFTPLNLSEQNKIENNSNNDPQKQKIDNWKKKILHGRHPHELEQPHIDAIASNKWLQIGNLFPETEGFIIAIQDQIINTRNYRKYIIKDPTVKNDKCRKCHKHPETIQHITGACITLTQTDYTHRHNQVVNIIHLKLALTHSLIQNTNTLYYKYTPQTILENTSHKLYYDRAILTDKTIHYNRPDIILQDKKNKSTYIIDIAVPNTHNIQKTITEKINKYTELREEIARIWRQEKVYIVPIVLSTTGVIPSHLHHSLKLLNLKKSTYIPLQKAAILNTCRIVRKFMQIEENDSPLPN

SEQ ID NO: 21002 - protein, 1277 aa, Nymphalis urticae
METRSKRKRIESLPGGDRRGTPGAGAGCFSMRTVSGEELSRRAPTDKDATAETTDTDRTISPSTISYIPSNPSSPSISSSISISHEIPPTPTLDVAREVNAWLPASTKAGKPRVRMKWSATVNMFIMRTYYYITRLETDMTTYRQQLHEHFSRKYPEIIVSEQRIADQRRTIIRNKLLTQEVLDRLKEEARTQLEKELQNNIQPINHTQTLPEIQTQTHIQSQSYSQGTQTSCSSTQTESIALTLENDIETLDLHNTITETHTQEIHDKFRAALTQYSGMDPAARPKLPKLKYSPQLSQLTNLFNQKILNLFISKDTKLIDIQTLIYCTALVISEELKYKITEYTGNTRPRLDYKPPWQIRLEKDIEKLRADCGRLTQYINNNRSKKVVKRVEVIFKSTKLHTKHENNNRTPEEYLDTLKQKLALKVHRLRRYKKAQQRKNDNITFITNEKLFYRNLLKPQTRTVSRENVKTPTQEELETFWCDIWEKHTQHNDKADWIDKEKNRWSLIEEMEFVEITATDITYITSKLHNWKSPGIDKIHNYWYKKLVTLHESIANNLTEIILKKQNIPEFLSTGISYLLPKTTHSSQPSQYRPITCLPTIYKILTSVIASKINKHIEKHNIIAEEQKGCRRGHMGCKEQLIIDSIIHKHATIKNRNLHCTYIDYKKAFDCIPHSWLIQVLQIYKINPTIINFLSTIIKRWKTTLQLNSQNKTIITRQIAIKKGIFQGDSLSPVWFCLALNPLSHLLHTCQAGYSIKQSAKETIISHLIYMDDIKLYSKTEKDMKILIDITTEFSKDINMEFGLDKCKTIHIIKGKIKPGNYTVNDNEIITAMEPNDFYKYLGYKQSKGLDHTIIKQTITTEYKKRINAVCQTQLYGKNLIKALNTYAIPILTYSFGIIKWSKTDLENIERFTRTTLTKYNNLHPKSAIERLTIKRQNGGRGLIDIQNLWQKQTNKLKIFFDLKSHSSHIHQAITVTDQNFTPLNLSEQNKIENNSNNDPQKQKIDNWKKKILHGRHPHELEQPHIDAIASNKWLQIGNLFPETEGFIIAIQDQIINTRNYRKYIIKDPTVKNDKCRKCHRHPETIQHITGACITLTQTDYTHRHNQVVNIIHLKLALTHSLIQNTNTLYYKYTPQTILENTSHKLYYDRAILTDKTIHYNRPDIILQDKKNKSTYIIDIAVPNTHNIQKTITEKINKYTELREEIARIWRQEKVYIVPIVLSTTGVIPSHLHHSLKLLNLKKSTYIPLQKAAILNTCRIVRKFMQIEENDSPLPN

SEQ ID NO: 21003 - protein, 1141 aa, Nymphalis urticae
MKWSATVNMFIMRTYYYITRLETDMTTYRQQLHEHFSRKYPEIIVSEQRIADQRRTIIRNKLLTQEVLDRLKEEARTQLEKELQNNIQPIYHTQTLPEIQTQTHIQSQSYSQSTQTSCSSTQTESIALTLENDIEILDLHNTITETHTQEIHDKFRAALTQYSGMDPAARPKLPKLKYSPQLSQLTNLFNQKILNLFISKDTKLIDIQTLIYCTALVISEELKYKITEYTGNRRSRLDYKPPWQIRLKKDIEKLRADCGRLTQYINNNRSKKVVKRVEVIFKSTKLHTKHENNNRTPEEYLDTLKQKLALKVHRLRRYKKAQQRKNDNITFITNEKLFYRNLLKPQTRTVSRENVKTPTQEELETFWCDIWEKHTQHNDKVDWIDKEKNRWSLIEEMEFVEITATDITYITSKLHNWKSPGIDKIHNYWYKKLVTLHESIANNLTEIILEKQNIPEFLSTGISYLLPKTTHSSQPSQYRPITCLPTIYKILTSVIASKINNHIEKHNIIAEEQKGCRRGHMGCKEQLIIDSIIHKHATIKNRNLHCTYIDYKKAFDCIPHSWLIQVLQIYKINPTIINFLSTIIKRWKTTLQLNSQNKTIITRQIAIKNGIFQGDSLSPVWFCLDLNPLSHLLHTCQAGYSIKQSAKETIISHLIYMDDIKLYSKTEKDMKILIDITTEFSKDINMEFGLDKCKTIHIIKGKIKPGNYAVNDNEIITAMEPNDFYKYLGYKQSKELDHTIIKQTITTEFKKRINAVCQTQLYGKNLIKALNNFAIPILTYSFGIIKWSKTDLENIERFTRTTLTKYNNLHPKSAIERLTIKRQNGGRGLIDIQNLWQKQINKLKIFFDLKSHSSHIHQAITVTDQNFTPLNLSEQNKIENNSNNDPQKQKIDNWKKRILHGRHPHELEQPHIDTIASNKWLQIGNLFILETEGFIIAIQDQIINTRNYRKYIIKDPTVKNDKCRKCHKHPETIQHITGACITLTQTDYTHRHNQVVNIIHLKLALTHSLIQNTNTLYYKYTPQTILENTSHKLYYDRAILTDKTIHYNRPDIILQDKKNKSTYIIDIAVPNTHNIQKTITEKINKYTELREEIARIWRQEKVYIVPIVLSTTGVIPSHLHHSLKLLNLKNLLTYHYKKQLF

SEQ ID NO: 21004 - protein, 1277 aa, Nymphalis urticae
METRSKRKRIESLPGGDRRGTPGADAGCFSMRTVSGEELSRRAPTDKDATAETTDTDRTISPSTISYIPSNPSSPSTSSSISISHEIPPIPTLDVAREVNAWLPASTKAGKPRVRMKWSATVNMFIMRTYYYITRLETDMTTYRQQLHEHFSRKYPEIIVSEQRIADQRRTIIRNKLLTQEVLDRLKEEARTQLEKELQNNIQPIYHTQTLPEIQTQTHIQSQSYSQSTQTSCSSTQTESIALTLENDIETLDLHNTITETHTQEIHDKFRAALTQYSGMDPAARPKLPKLKYSPQLSQLTNLFNQKILNLFISKDTKLIDIQTLIYCTALVISEELKYKITEYTGNSRPRLDYKPPWQIRLEKDIEKLRADCGRLTQYINNNRSKKVVKRVKVIFKSTKLHTKHENNNRTPEEYLDTLKQKLALKVHRLRRYKKAQQRKNDNITFITNEKLFYRNLLKPQTRTVSRENVKTPTQEELETFWCDIWEKHTQHNDKADWIDKEKNRWSLIEEMEFVEITATDITYITSKLHNWKSPGIDKIHNYWYKKLVTLHESIANNLTEIILEKQNIPEFLSTGISYLLPKTTHSSQASQYRPITCLPTIYKILTSVIASKINNHIEKHNIIAEEQKGCRRGHMGCKEQLIIDSIIHKHATTKNRNLHCTYIDYKKAFDCIPHSWLIQVLQIYKINPTIINFLSTIIKRWKTTLQLNSQNKTIITRQIAIKKGIFQGDSLSPVWFCLALNPLSHFLHTCQAGYSIKQSAKETIISHLIYMDDIKLYSKTEKDMKILIDITTEFSKDINMEFGLDKCKTIHIIKGKIKPGNYAVNDNEIITAMEPNDFYKYLGYKQSKGLDHTIIKQTITTEYKKRINAVCQTQLYGKNLIKALNTYAIPILTYSFGIIKWSKTDLENIERFTRTTLTKYNNLHPKSAIERLTIKRQNGGRGLIDIQNLWQKQINKLKIFFDLKSHSSHIHQAITVTDQNFTPLNLSEQNKIENNSNNDPQKQKKDNWKKKILHGRHPHELEQPHIDAIASNKWLQIGNLFPETEGFIIAIQDQIINTRNYRKYIIKDPTVKNDKCRKCHKHPETIQHITGACITLTQTDYTHRHNQVVNIIHLKLALTHSLIQNTNTLYYKYTPQTILENTSHKLYYDRAILTDKTIHYNRPDIILQDKKNKSTYIIDIAVPNTHNIQKTITEKINKYTELREEIARIWRQEKVYIVPIVLSTTGVIPSHLHHSLKLLNLKKSTYIPLQKAAILNTCRIVRKFMQIEENDSPLPN

SEQ ID NO: 21005 - protein, 1277 aa, Nymphalis urticae
METRSERKRIESLPGGDRRGTPGAGAGCFSMRTVSGEELSRRAPTDKDATAETTDTDRTISTSTISYIPSNPSSPSISSSISISHEIPPIPTLDVAREVNAWLPASTKAGKPRVRMKWSAAVNMFIMRTYYYITRLETDMTTYRQQLHEHFSRKYPEIIVSEQRIADQRRTIIRNKLLTQEVLDRLKEEARTQLEKELQNNIQPIYHTQTLSEIQTQTHIQSQSYSQSTQTSCSSTQTESIALTLENDIETLDLHNTITETHTQEIHDKFRAALTQYSGMDPAARPKLPKLKYSPQLSQLTNLFNQKILNLLISKDTKLIDIQTLIYCTALVISEELKYKITEYTGNRRPRLDYKPPWQIRLEKDIEKLRADCGRLTQYINNNRSKKVVKRVEVIFKITKLHTKHENNNRTPEEYLDKLKQKLALKVHRLRRYKKAQQRKNDNITFITNEKLFYRNLLKPQTRTVSRENVKTPTQEELETFWCDIWEKDTQHNDKADWIDKEKNRWSLIEEMEFVEITATDITYITSKLHNWKSPGIDKIHNYWYKKLVTLHESIANNLTEIILEKQNIPEFLSTGISYLLPKTTHSSQPSQYRPITCLPTIYKILTSVIASKINNHIEKHNIIAEEQKGCRRGHMGCKEQLIIDSIIHKHATIKNRNLHCTNIDYKKAFDCIPHSWLIQVLEIYKINPTIINFLSTIIKRWKTTLQLNSQNKTIITRQIAIKKGIFQGDSLSPVWFCLALNPLSHLLHTCQAGYSIKQSAKETIISHLIYMDDIKLYSKTEKDMKMLIDITTEFSKDINMEFGLDKCKTIHIIKGKIKPGNYAVNDNEIITAMEPNDFYKYLGYKQSKGLDHTIIKQTITTEYKKRINAVCQTQLYGKNLIKALNTYAIPILTYSFGIIKWSKTDLENIERFTRTTLTKYNNLHPKSAIERLTIKRQNGGRGLIDIQNLWQKQINKLKIFFDLKSHSSHIHKAITGTDQNFTTLNLSEQNKIENNSNNDPQKQKIDNWKKKILHGRHPHELEQPHIDAIASNKWLQIGNLFPETEGFIIAIQDQIINTRNYRKYIIKDPTVKNDKCRKCHRHPETIQHITGACITLTQTDYTHRHNQVVNIIHLKLALTHSLIQNTNTLYYKYTPQTILENTSHKLYYDRAILTDKTIHYNRPDIILQDKKNKSTYIIDIAVPNTHNIQKTITEKINKYTELREEIARIWRQEKVYIVPIVLSTTGVIPSHLHHSLTLLNLKKSTYIPLQKAAILNTCRIVRKFMQIEENDSPLPN

SEQ ID NO: 21006 - protein, 1277 aa, Nymphalis urticae
METRSKRKRIESLPGGDRRGTPGAGAGCFSMRTVSGEELSRRAPTDKDATAETTDTDRTISPSTISYIPSNPSSPSISSSISISHEIPPIPTLDVAREVNAWLPASTKAGKPRVRMKWSSTVNMFIMRTYYYITRLETDMTTYRQQLHEHFSRKYTEIIVSEQRIADQRRTIIRNKLLTQEVLDRLKEEARTQLEKELQNNIQPIYHTQTLPEIQTQTHIQSQSYSQSTQTSCSSTQTESIALTLENDIETLDLHNTITETHTQEIHDKFRAALTQYSGMDPAARPKLPKLKYSPQLSQLTNLFNQKILNLFISKDTKLIDIQTLVYCTALVISEELKYKITEYTGNRRPRLDYKPPWQIRLEKDIEKLRADCGRLTQYINNNRSKKVVKRVEVIFKSTKLHTKHENNNRTPEEYLDTLKQKLALKVHRLRRYKKAQQRKNDNITFITNEKLFYRNLLKPQTRTVSRENVKTPTQEELETFWCDIWEKHTQHNDKADWIDKEKNRWSLIEEMEFVEITATDITYITSKLHNWKSPGIDKIHNYWYKKLVTLHESIANNLTEIILEKQNIPEFLSTGISYLLPKTTHSSQPSQYRPITCLPTIYKILTSVIASKINNHIEKHNIIAEEQKGCRRGHMGCKEQLIIDSIIHKHATTKNRNLHCTYIDYKKAFDCIPHSWLIQVLQIYKINPTIINFLSTIIKRWKTTLQLSSQNKTIITRQIAIKKGIFQGDSLSPVWFCLALNPLSHLLHTCQAGYSIKQSAKETIISHLIYMDDIKLYSKTEKDMKVLIDITTEFSKDINMEFGLDKCKTIHIIKGKIKPGNYAVNDNEIITAMEPNDFYKYLGYKQSKGLDHTIIKQTITTEYKKRINAVCQTQLYGKNLIKALNTYAIPILTYSFGIIKWSKTDLENIERFTRNTLTKHNNLHPKSAIERLTIKRQNGGRGLIDIQNLWQKQINKHKIFFDLKSHSSHIHKAITGTDQNYTPLNLSEQNKIENNSNIDPQKQKIDNWKKKILHGRHPHELEQPHIDAIASNKWLQIGNLFPETEGFIIAIQDQIINTRNYRKYIIKDPTVKNDKCRKCHRHPETIQHITGACITLTQTDYTHRHNQVVNIIHLKLALTHSLIQNTNTLYYKYTPQTILENTSHKLYYDRAILTDKTIHYNRPDIILQDKRNKSTYIIDIAVPNTHNIQKTITEKINKYTELREEIARIWRQEKVYIVPIVLSTTGVIPSHLHHSLKLLNLKKSTYIPLQKAAILNTCRIVRKFMQIEENDSPLPN

SEQ ID NO: 21007 - protein, 1277 aa, Nymphalis urticae
METRSKRKRIESLPGGDRRGTPGAGAGCFSMRTVSGEELSRRAPTDKDATAETTDTDRTISPSTISYIPSNPSSPSISSSISISHEIPPTPTLDVAREVNAWLPASTKAGKPRVRMKWSATVNMFIMRTYYYITRLETDMTTYRQQLHEHFSRKYPEIIVSEQRIADQRRTIIRNKLLTQEVLDRLKEEARTQLEKELQNNIQPINHTQTLPEIQTQTHIQSQSYSQGTQTSCSSTQTESIALTLENDIETLDLHNTITETHTQEIHDKFRAALTQYSGMDPAARPKLPKLKYSPQLSQLTNLFNQKILNLFISKDTKLIDIQTLIYCTALVISEELKYKITEYTGNTRPRLDYKPPWQIRLEKDIEKLRADCGRLTQYINNNRSKKVVKRVEVIFKSTKLHTKHENNNRTPEEYLDTLKQKLALKVHRLRRYKKAQQRKNDNITFITNEKLFYRNLLKPQTRTVSRENVKTPTQEELETFWCDIWEKHTQHNDKADWIDKEKNRWSLIEEMEFVEITATDITYITSKLHNWKSPGIDKIHNYWYKKLVTLHESIANNLTEIILKKQNIPEFLSTGISYLLPKTTHSSQPSQYRPITCLPTIYKILTSVIASKINNHIEKHNIIAEEQKGCRRGHMGCKEQLIIDSIIHKHATIKNRNLHCTYIDYKKAFDCIPHSWLIQVLQIYKINPTIINFLSTIIKRWKTTLQLNSQNKTIITRQIAIKKGIFQGDSLSPVWFCLALNPLSHLLHTCQAGYSIKQSAKETIISHLIYMDDIKLYSKTEKDMKILIDITTEFSKDINMEFGLDKCKTIHIIKGKIKPGNYTVNDNEIITAMEPNDFYKYLGYKQSKGLDHTIIKQTITTEYKKRINAVCQTQLYGKNLIKALNTYAIPILTYSFGIIKWSKTDLENIERFTRTTLTKYNNLHPKSAIERLTIKRQNGGRGLIDIQNLWQKQINKLKIFFDLKSHSSHIHQAITVTDQNFTPLNLSEQNKIENNSNNDPQKQKIDNWKKKILHGRHPHELEQPHIDAIASNKWLQIGNLFPETEGFIIAIQDQIINTRNYRKYIIKDPTVKNDKCRKCHKHPETIQHITGACITLTQTDYTHRHNQVVNIIHLKLALTHSLIQNTNTLYYKYTPQTILENTSHKLYYDRAILTDKTIHYNRPDIILQDKKNKSTYIIDIAVPNTHNIQKTITEKINKYTELREEIARIWRQEKVYIVPIVLSTTGVIPSHLHHSLKLLNLKKSTYIPLQKAAILNTCRIVRKFMQIEENDSPLPN

SEQ ID NO: 21008 - protein, 1276 aa, Nymphalis urticae
METRSKRKRIESLPGGDRRGTPGAGAGCFSMRTVSGEELSRRAPTDKDATAETTDTDRTISPSTISYIPSNPSSPSISSISISHEIPPIPTLDVAREVNAWLPASTKAGKPRVRMKWSSTVNMFIMRTYYYITRLETDMTTYRQQLHEHFSRKYPEIIVSEQRIADQRRTIIRNKLLTQEVLDRLKEEARTQLEKELQNNIQPIYHTQTLPEIQTQTHIQSQSYSQSTQTSCSSTQTESIALTLENDIETLDLHNTITETHTQEIHDKFRAAITQYSGMDPAARPKLPKLKYSPQLSQLTNLFNQKILNLFISKDTKLIDINTLIYCTALVISEELKYKITDYTGNRRPRLDYKPPWQIRLEKDIEKLRADCGRLTQYINNNRSKKVVKRVEVIFKSTKLHTKHENSNRTPEEYLDTLKQKLALKVHRLRRYKKAQQRKNDNITFITNEKLFYRNLLKPQTRTVSRENVKTPTQEELETFWCDIWEKHTQHNDKADWIDKEKNRWSLIEEMEFVEITATDITYITSKLHNWKSPGIDKIHNYWYKKLVTLHESIANNLTEIILEKQNIPEFLSTGISYLLPKTTHSSQPSQYRPITCLPTIYKILTSVIASKINNHIEKHNIIAEEQKGCRRGHMGCKEQLIIDSIIHKHATTKNRNLHCTYIDYKKAFDCIPHSWLIQVLQIYKINPTIINFLSTIIKRWKTTLQLNSQNKTIITRQIAIKKGIFQGDSLSPVWFCLALNPLSHLLHTCQAGYSIKQSAKETIISHLIYMDDIKLYSKTEKDMKILIDITTEFSKDINMEFGLDKCKTIHIIKGKIKPGNYAVNDNEIITAMEPNDFYKYLGYKQSKGLDHTIIKQTITTEYKKRINAVCQTQLYGKNLIKALNTYAIPILTYSFGIIKWSKTDLENIERFTRTTLTKYNNLHPKSAIERLTIKRQNGGRGLIDIQNLWQKQINKLKIFFDLKSHSSHIHQAITVTDQNFTPLNLSEQNKIENNSNNDPQKQKIDNWKKKILHGRHPHELEQPHIDAIASNEWLQIGNLFPETEGFIIAIQDQIINTRNYRKYIIKDPTVKNDKCRKCHKHPETIQHITGACITLTQTDYTHRHNQVVNIIHLKLALTHSLIQNTNTLYYKYTPQTILENTSHKLYYDRAILTDKTIHYNRPDIILQDKKNKSTYIIDIAVPNTHNIQKTITEKINKYTELREEIARIWRQEKVYIVPIVLSTTGVIPSQLHHSLKLLNLKKSTYIPLQKAAILNTCRIVRKFMQIEENDSPLPN

SEQ ID NO: 21009 - protein, 1277 aa, Nymphalis urticae
METRSKRKRIESLPGGDRRGTPGAGAGCFSMRTVSGEELSRRAPTDKDATAETTDTDRTISPSTISYIPSNPSSPSISSSISISHEIPPTPTLDVAREVNAWLPASTKAGKPRVRMKWSATVNMFIMRTYYYITRLETDMTTYRQQLHEHFSRKYPEIIVSEQRIADQRRTIIRNKLLTQEVLDRLKEEARTQLEKELQNNIQPINHTQTLPEIQTQTHIQSQSYSQGTQTSCSSTQTESIALTLENDIETLDLHNTITETHTQEIHDKFRAALTQYSGMDPAARPKLPKLKYSPQLSQLTNLFNQKILNLFISKDTKLIDIQTLIYCTALVISEELKYKITEYTGNTRPRLDYKPPWQIRLEKDIEKLRADCGRLTQYINNNRSKKVVKRVEVIFKSTKLHTKHENNNRTPEEYLDTLKQKLALKVHRLRRYKKAQQRKNDNITFITNEKLFYRNLLKPLTRTVSRENVKTPTQEELETFWCDIWEKHTQHNDKADWIDKEKNRWSLIEEMEFVEITATDITYITSKLHNWKSPGIDKIHNYWYKKLVTLHESIANNLTEIILKKQNIPEFLSTGISYLLPKTTHSSQPSQYRPITCLPTIYKILTSVIASKINKHIEKHNIIAEEQKGCRRGHMGCKEQLIIDSIIHKHATIKNRNLHCTYIDYKKAFDCIPHSWLIQVLQIYKINPTIINFLSTIIKRWKTTLQLNSQNKTIITRQIAIKKGIFQGDSLSPVWFCLALNPLSHLLHTCQAGYSIKQSAKETIISHLIYMDDIKLYSKTEKDMKILIDITTEFSKDINMEFGLDKCKTIHIIKGKIKPGNYTVNDNEIITAMEPNDFYKYLGYKQSKGLDHTIIKQTITTEYKKRINAVCQTQLYGKNLIKALNTYAIPILTYSFGIIKWSKTDLENIERFTRTTLTKYNNLHPKSAIERLTIKRQNGGRGLIDIQNLWQKQTNKLKIFFDLKSHSSHIHQAITVTDQNFTPLNLSEQNKIENNSNNDPQKQKIDNWKKKILHGRHPHELEQPHIDAIASNKWLQIGNLFPETEGFIIAIQDQIINTRNYRKYIIKDPTVKNDKCRKCHRHPETIQHITGACITLTQTDYTHRHNQVVNIIHLKLALTHSLIQNTNTLYYKYTPQTILENTSHKLYYDRAILTDKTIHYNRPDIILQDKKNKSTYIIDIAVPNTHNIQKTITEKINKYTELREEIARIWRQEKVYIVPIVLSTTGVIPSHLHHSLKLLNLKKSTYIPLQKAAILNTCRIVRKFMQIEENDSPLPN

SEQ ID NO: 21010 - protein, 1277 aa, Nymphalis urticae
METRSKRKRIESLPGGDRRGTPGAGAGCFSMRTVSGEELSRRAPTDKDATAETTDTDRTISPSTISYIPSNPSSPSISSSISISHEIPPIPTLDVAREVNAWLPASTKAGKPRVRMKWSAIVNMFIMRTYYYITRLETDMTTYRQQLHEHFSRQYPEIIVSEQRIADQRRTIIRNKLLTQEVLDRLKEEARTQLEKELHNNIQPIYHTQTLPEIQTQSHIQTQSYSQSTHTSCSSTQTETIALTLENDIETLDLHNTITEIHTQEIHDKFRAALTQYSGMDPAARPKLPKLKYSPQLSQLTNLFNQKILNLFISKDTKLIDINTLIYCTALVISEELKYKITDYTGNRRPRLDNKPPWQIRLEKDIEKLRADCGRLTQYINNNRSKKVVKRVEIIFKSTKLHTKHENNNMTPEEYLDTLKQKLALKVHRLRRYKKAQQRKNDNITFITNEKLFYRNLLKPQTRTVSRENVKTPTQEELETFWCDIWEKHTQHNDKADWIDKEKNRWSLIEEMEFAEITATDITYITSKLHNWKSPGIDKIHNYWYKKLVTLHESIANNLTEIILEKQNIPEFLSTGISYLLPKTTHSSQPSQYRPITCLPTIYKILTSVIASKINNHIEKHNIIAEEQKGCRRGHMGCKEQLIIDSIIHKHATTKNRNLHCTYIDYKKAFDCIPHSWLIQVLQIYKINPTIINFLSTIIKRWKTTLQLNSVNKTIITRQIAIKKGIFQGDSLSPVWFCLALNPLSHLLHTCQAGYSIKQSAKETIISHLIYMDDIKLYSKTEKDMKILIDITTEFSKDINMEFGLDKCKTIHIIKGKIKPGNYAVNDNEIITAMEPNDFYKYLGYKQSKGLDHTIIKQTITTEYKKRINAVCQTQLYGKNLIKALNTYAIPILTYSFGIIKWSKTDLENIERFTRTTLTKYNNLHPKSAIERLTIKRQNGGRGLIDIQNLCQKQINKLKIFFDLKSHSSHIHKAITVTDQNYTPLNLSEQNKIENNSNNDPQKQKIDNWKKKILHGRHPHELEQTHIDAIASNKWLQIGNLFPETEGFIIAIQDQIINTRNYRKYIIKDPTVKNDKCRKCHRHPETIQHITGACITLTQTDYTHRHNQVVNIIHLKLALTHSLIQNTNTLYYKYTPQTILENTSHKLYYDRAILTDKTIHYNRPDIILQDKKNKSTYIIDIAVPNTHNIQKTITEKINKYTELREEIARIWRQEKVYIVPIVLSTTGVIPSHLHHSLKLLNLKKSTYIPLQKAAILNTCRIVRKFMQIEENDSPLPN

SEQ ID NO: 21011 - protein, 1184 aa, Nymphalis urticae
METRSKRKRIESLPGGDRRGTPGAGAGCFSMRTVSGEELSRRAPTDKDATAETTDTDRTISPSTISYIPSNPSSPSISSSISISHEIPPIPTLDVAREVNAWLPASTKAGKPRVRMKWSSTVNMFIMRTYYYITRLETDMTTYRQQLHEHFSRKYPEIIVSEQRIADQRRTIIRNKLLTQKVLDRLKEEARTQLEKELQNNIQPIYHTQTLPEIQTQTHIQSQSYSQSTQTSCSSTQTESIALTLENDIETLDLHNTITETHTQEIHDKFRAALTQYSGMDPAARPKLPKLKYSLQLSQLTNLFNQKILNLFISKDTKLIDIQTLVYCTALVISEELKYKITEYTGNRRPRLDYKPPWQIRLEKDIEKLRADCGRLTQYINNNRSKKVVKRVEVIFKSTKLHTKHENNNRTPEEYLDTLKQKLALKVHRLRRYKKAQQRKNDNITFITNEKLFYRNLLKPQTRTVSRENVKTPTQEELETFWCDIWEKHTQHNDKADWIDKEKNRWSLIEEMEFVEITATDITYITSKLHNWKSPGIDKIHNYWYKKLVTLHESIANNLTEIILEKQNIPEFLSTGISYLLPKTTHSSQPSQYRPITCLPTIYKILTSVIASKINNHIEKHNIIAEEQKGCRRGHMGCKEQLIIDSIIHKHATTKNRNLHCTYIDYKKAFDCIPHSWLIQVLQIYKINPTIINFLSTIIKRWKTTLQLSSQNKTIITRQIAIKKGIFQGDSLSPVWFCLALNPLSHLLHTCQAGYSIKQSAKETIISHLIYMDDIKLYSKTEKDMKVLIDITTEFSKDINMEFGLDKCKTIHIIKGKIKPGNYAVNDNEIITAMEPNDFYKYLGYKQSKGLDHTIIKQTITTEYKKRINAVCQTQLYGKNIIKALNTYAIPILTYSFGIIKWSKTDLENIERFTRTALTKHNNLHPKSAIERLTIKRQNGGRGLIDIQNLWQKQINKLKIFFELKSHSSHIHKAITGTDQNYTPLNLSEQNKIENNSNIDPQKQKIDNWKKKILHGRHPHELEQPHIDAIASNKWLQIGNLFPETEGFIIAIQDQIINTRNYRKYIIKDPTVKNDKCRKCHKHPETIQHITGACITLTQTDYTHRHNQVVNIIHLKLALTHSLIQNTNTLYYKYTPQTILENTSHKLYYDRAILTDKTIHYNRPDIILQDKKKQVDLHNRHSSS

SEQ ID NO: 21012 - protein, 1278 aa, Nymphalis urticae
METRSKRKRIESLPGGDRRGTPGAGAGCFSMRTVSGEELSRRAPTDKDATAETTDTDRTISPSTISNYIPSNPSSPSISSSISISHEIPPTPTLDVAREVNAWLPASTKAGKPRVRMKWSATVNMFIMRTYYYITRLETDMTTYRQQLHEHFSRKYPEIIVSEQRIADQRRTIIRNKLLTQEVLDRLKEEARTQLEKELQNNIQPINHTQTLPEIQTQTHIQSQSYSQGTQTSCSSTQTESIALTLENDIETLDLHNTITETHTQEIHDKFRAALTQYSGMDPAARPKLPKLKYSPQLSQLTNLFNQKILNLFISKDTKLIDIQTLIYCTALVISEELKYKITEYTGNTRPRLDYKPPWQIRLEKDIEKLRADCGRLTQYINNNRSKKVVKRVEVIFKSTKLHTKHENNNRTPEEYLDTLKQKLALKVHRLRRYKKAQQRKNDNITFITNEKLFYRNLLKPQTRTVSRENVKTPTQEELETFWCDIWEKHTQHNDKADWIDKEKNRWSLIEEMEFVEITATDITYITSKLHNWKSPGIDKIHNYWYKKLVTLHESIANNLTEIILKKQNIPEFLSTGISYLLPKTTHSSQPSQYRPITCLPTIYKILTSVIASKINNHIEKHNIIAEEQKGCRRGHMGCKEQLIIDSIIHKHATIKNRNLHCTYIDYKKAFDCIPHSWLIQVLQIYKINPTIINFLSTIIKRWKTTLQLNSQNKTIITRQIAIKKGIFQGDSLSPVWFCLALNPLSHLLHTCQARYSIKQSAKETIISHLIYKDDIKLYSKTEKDMKILIDITTEFSKDINMEFGLDKCKTIHIIKGKIKPGNYTVNDNEIITAMEPNDFYKYLGYKQSKGLDHTIIKQTITTEYKKRINAVCQTQLNGKNLIKALNTYAIPILTYSFGIIKWSKTDLENIERFTRTTLTKYNNLHPKSAIERLTIKRQNGGRGLIDIQNLWQKQINKLKIFFDLKSHSSHIHQAITVTDQNFTPLNLSEQNKIENNSNNDPQKQKIDNWKKKILHGRHPHELEQPHIDAIASNKWLQIGNLFPETEGFTIAIQDQIINTRNYRKYIIKDPTVKNDKCRKCHKHPETIQHITGACITLTQTDYTHRHNQVVNIIHLKLALTHSLIQNTNTLYYKYTPQTILENTSHKLYYDRAILTDKTIHYNRPDIILQDKKNKSTYIIDIAVPNTHNIQKTITEKINKYTELREEIARIWRQEKVYIVPIVLSTTGVIPSHLHHSLKLLNLKKSTYIPLQKAAILNTCRIVRKFMQIEENDSPLPN

SEQ ID NO: 21013 - protein, 1273 aa, Nymphalis urticae
METRSKRKRIESLAGGDRRGTPGAGAGCFSMRTVSGEELSRRAPTDKDATAETTDTDRTISPSTISYIPSNPSSPSISSSISISHEIPPIPTLDVAREVNAWLPASTKAGKPRVRMKWSATVNMFIMRTYYYITRLETDMTTYRQQLHEHFSRKYPEIIVSEQRIADQRRTIIRNKLLTQEVLDRLKEEARTQLEKELQNNNIQPIYHTQTLPEIQTQTHIQSQSYSQSTQTSCSSTQTESIALTLENDIETLDLHNTITETHTQEIHDKFRAALTQYSGMDPAARPKLPKLKYSPQLSQLTNLFNQKILNLFISKDTKLIDIQTLIYCTALVISEELKYKIIEYTGNRRPRLHYKPPWQIRLEKDIEKLRADCGRLTQYINNNRSKKVVKRVEVILKSTKLHTKYENNNRTPEEYLDTLKQKLALKVHRLRRYKKAQQRKNDNITFITNEKLFYRNLLKPQTRTVSRENVKTPTQEELETFWCDIWEKHTQHNDKADWINKEKNRWSLIEEMEFVEITATDITYITSKLHNWKSPGIDKIHNYWYKKLVTLHESIANNLTEIILEKQNIPEFLSTGISYLLPKTTHSSQPSQYRPITCLPTIYKILTSVNHIEKHNIIAEEQKGCRRGHMGCKEQLIIDSIIHKHATTKNRNLHCTYIDYKKAFDCIPHSWLIQVLQIYKINPTIINFLSTIIKRWKTTLQLNSQNKTIITRQIAIKKGIFQGDSLSPVWFCLALNPLSHLLHTCQAGYSIKQSAKETIISHLIYMDDIKLYSKTEKDMKILIDITTEFSKDINMEFGLDKCKTIHIIKGKIKPGNYAVNDNEIITAMEPNDFYKYLGYKQSKGLDHTIIKQTITTEYKKRINAVCQTQLYGKNLIKALNTYAIPILTYSFGIIKWSKTDLENIERFTRTTLTKYNNLHPKSAIERLTIKRQNGGRGLIDIQNLWQKQINKLKIFFDLKSHSSHIHKAITVTDQNYTPLNLSEQNKIENNSNNDPQKQKIDNWKKKILHRHRHPHELEQPHIDAIASNKWLQIGNLFPETEGFIITIQDQIINTRNYRKYIIKDPTVKNDKCRKCHRHPETIQHITGACITLTQTDYTHRHNQVVNIIHLKLALTHSLIQNTNTLYYKYTPQTILENTSHKLYYDRAILTDKTIHYNRPDIILQDKKNKSTYIIDIAVPNTHNIQKTITEKINKYTELREEIARIWRQEKVYIVPIVLSTTGVIPSHLHHSLKLLNLKKSTYIPLQKATILNTCRIVRKFMQIEENDSPLPN

SEQ ID NO: 21014 - protein, 770 aa, Hasora chromus
MKYEEITEQDILHTTSKLHNWKSPGVDKIHNFWFKNLHKLHKSIAKNLTDIISRKQNIPEFITIGITYMLPKSKNAQSPSDYRPITCLPTIYKILTSVITNKINAHIEHNDILAEEQKGCRRNHMGCKEQLIIDSLIHKHANSRKRNLHCTYIDYKKAFDSIPHSWLIKILHIYKINPDIINFLQHIMTLWKTTLHINCSDVTIRTREIAIKKGIYQGDSLSPLWFCLALNPLSRLLNKQNVGYTLKHTGTSTKISHLIYMDDIKLYTQNEKDMKTLIDTTAKFSKDINMDFGLDKCKTLHIQKGKIIKGDYTVNESDVIRAMEPNELYKYLGYNQSKWLEHKLVKNTLHTEYSRRLNELCKTELSGKNIIKAINTYAVPILTYSFGIIKWTKTDIKKLEIKTRTILTKHRYLHPKSAIERVSIKRKHGGRGLIDIHELWQKQLTNLKMFFQQKSHNSNIHNAVVSNDINFTPLNLSDNTKVPPYNSEKKKIEDWHKKVLHGRHPHDLQQPHIDIEASNKWLTVGTLFAETEGFIVAIQDQIINTKNYRKHILKDPAAKDDRCRKCHKNPETIQHITGACPTLAQTDYTHRHNQIANIIHQKLATKHGLIQNIHTPYYQYTPSPVLENNTHKIYYDRAILTDKTIHYNRPDITLQDKSNKITYLIDISIPNTHNVIKTITEKINKYTELKEEVTRIWKMNKVYIVPIVLSTTGIIPKYLHHTLKLLNLPPNTYINLQKAVILNTCRIVRKFLQADENLSPSNIPEQATEP

SEQ ID NO: 21015 - protein, 1311 aa, Choaspes benjaminii
METRSMKKRKGPLPGGDRRGTPGADAGCHSMQAVSGDELNRRTRTGSPENITANTDQNRQTDSITSYISPTPTISEPYSPSTISYTPSLTSLDEDSRISSPALDVAQAANAFLPASTKAGKARVRMKWTTDVNIFIMRTYYRITKLETDMTYYRRLLHEEFLKNYPGINVGEQRVSDQRRAIIRNKYLSEEMINQIKKEVKLHIDEEEQNVVKRQSLIPTQISTPSQIPTHHIHSLDIQVHITDTDNTTELMSQSSDNQVTETNKVIPPTNPIAQNVAQILEPLDDASIIKLCDKLQKHLTQYSNTDPTLRPKLPKLAYSKSLTRLLNAFNNVILIRFLPDDIQLLDLHTLTYCTAKVIAEELGYTIREQDTNNTNTRPLLTKAPWQIRLESDIKKLRADIGRLTQYIQNNRTRKIVERVNRIFKHFYIHTKRENYNKKPEEFLDTLKQKLALKANRLARYKKSENRKKDNKSFTTNEKKYYRTLTSNDISATNSQNTLLPTVNEIETFWSSIWETKIEHNDKSDWIQQEEERWKRIDGMKFQEITEDDILQTTAKLHNWKSPGIDKIHNFWFKNLHKIHKAIAKNLTDIIYRKQNIPEFMTTGITYMLPKNKNTQLPSDYRPITCLPTMYKILTSVITNKITTHIEHNNILAEEQKGCRRNHMGCKEQLIIDSLIHRHANNKKRNLHCTYIDYKKAFDSIPHSWLVKILHVYKINPVLVKFLEHIMTRWKTTLHINSPHTSIHTRPIAIKKGIYQGDSLSPLWFCLALNPLSLLLNEQNIGYTLKHSNINTKISHLIYMDDIKLYTQTEKDMHTLIDTTAKFSKDINMDFGLDKCKTLHIQKGKIKKGNYIINETDIIQSMEPNEFYKYLGYKQAKYIDHKSIKDTLQKEYKIRLNKICRTELNGKNIIKAINTYAVPILTYSFGIIKWTKTDIKKIEIKTRTTLTKHRYLHPKSAIERVSIKRQQGGRGLIDIHALWQKQLSNLKMFFQLKSRTSNIHDAVSFNDTNYTPLNLSDNTPPLTEHNNFVKKKLNDWQNKVLHGRHPHDLQQPHIDLEASNKWLTVGTLFPETEGFIIAIQDQIISTKNYRKHILKDPTAKDDRCRKCQKNSENIQHITGACSTLAQTDYAHRHNQIANIVHQKLAIKYGLIQGTHTPYYQYTPSPVLENSTYKIYYDRAILTDKTIHYNRPDITIQDKINKITYLIDIAVPNTHNITKTITEKINKYTELKEEITRIWKMNKVYIVPIVLSTTGIIPNHLHHALKLLNLPPNIYINMQKAVILNTCRIVRKFLQADDNLSPVEITETVPQQ

SEQ ID NO: 21016 - protein, 825 aa, Oechydrus chersis
MNNTTDEFNHKELPTREQIENYWSDIWEEEVLHNNEAHWITKEKDKWEGIEEMGFECITESDVINITSKLHNWKSPGIDRIHNFWYKKLTTLHKSLAKTITDVIVGRQTLPNFITTGITYMLYKGKDPTQPSNYRPITCLPTIYKILTSAITTKITTHIENHSILAEEQKGCRRGHMGCKEQLIIDSCIHKHAASKNRNLHCTYIDYKKAFDSIPHSWLIEILQIYRINPIVIEFLRNVMSHWKTVLHLYKDNKTVITRQISIKKGIYQGDSLSPLWFCLALNPLTNNLNDCGTGYRFNNSNNDTFISHLIYMDDIKLYAKTLKDMKNLVDTTTQFSKDIHMQLGLDKCKTLHIIKGKIQPGDYVVNNTDVISAMESTDVYKYLGYNQLKGLHHTTIKHTLTQEYKRRINELCKTRLSGKHLTKAINTYAIPTLTYSFGIIKWTKTDIEQIERTTRTTLTKHNNLHPKSAVERLSIKRQDGGRGIIDTHRLWQKQISTLRQFFLKKSTTSEIHAVITKNDNNLTPLNLAKHTSQQEPDMGNSQSQKFDEWKKKVLHGRHPHDLDNTHVDKTASNKWLQVGNLFPETEGFMIAIQDQVINTKNYRKYIIKDPNITNDKCRRCHRQPETIQHITGACTSLTQSDYTHRHNQVTNIIHQKLALKHKLIHNTNTPYYKYNPQTVIENTTHKLYYDRAILTDKTIHYNRPDITLQDKLNKTTYLIDIAVPNTHNIHKTIAEKINKYAELKEEISRIWQQEKVYVVPIVLSTTGVIPHHLHHSLQLIGLKHSSYIILQKAAILNTCRIVRKFMQIEENEVSPQNITQIDPL

SEQ ID NO: 21017 - protein, 1286 aa, Chioides albofasciatus
MRRSTRIKNKTSAQYGTAAEITSHSSSPTSSTHSLFQSNNSTPLSFENQSSPVSRSTTVSPMSLDIEQTQTNTLPASAVARGANAFLPASTKAGKPRVRMKWSQDVNIFIMRTYYNITKLETDMTTYRKTLHELFSIQYPDVKVSEQRVSDQRRMIIKNRYLSQEILDKLKEEVSRQLQEEENITEDNDNFQVNIEADRNTLESQTQSQNNSSQSHNSSQYHTQSFVPTSHSSTQTEFISLLIENESETIADLAPPNDASFQDMYDKLQTALAQYSGMDPTARPKLPRIKYTKHLNDLVLLFNQHILYRLISKEMQLNDIHTLIYCTALVIAEELNYKIIHNTTHTKPKDYTKPSWQIRLERDIEDLRADIGRVSQYINNNRSDRLVKKVHDIFNRIAIHTKHESNNRKPEEFLDTLKQKLALKTHRLRRYKKTQQRKKDNTQFAKNEKLFYRNLCKPKLDLTTHTNDKHTEIPTKEELETYWSKIWEENIRHNDKADWITEEEGKWGLIDEMEFQEITEHDISNITARLHNWKSPGIDKIQNYWYKKLTILHKPLATALTEIILGKQNIPNFITIGITYMIPKSNNSTHPSQYRPITCLPTIYKILTSVITSKINIHIENNNVLAEEQKGCRRGHMGCKEQLVIDSIIHKHATSKHRNLHCTYIDYKKAFDSIPHSWLIQILQIYKISPIIIDFLRNVMPLWKTTLHFNQGNKSIATRQINIRKGIYQGDSLSPLWFCLALNPLSNLLHNCQTGYRLNNSPEETTISHLIYMDDIKLYAKSHKDMQKLLDKTTQFSTDINMQFGLDKCKTLHIVKGKIQSGDYRLNNNDVISAMEPTDVYKYLGYNQSKGLLHTHIKQTLTTEFKRRITAICKTHLSGKHLTKAINTYAIPILTYSFGIIKWTKTDIEQLERITRTTLTKHNYLHPKSAVERLNIKRQDGGRGVIDINYLWQKQIGNLRHFFFMKSTTSNIHSAIIHNDENLTPLNLSDHTEQHAPNYINSQNQKLEHWKNKVLHGRHPHDLEHTHVDKIASNKWLKIGNLFPETEGFMIAIQDQVINTKNYRKHIIKDSTVKNDKCRRCHTQPETIQHITGACTTLTQTDYTHRHNQVTNIIHQNLALKHKLIQNTNTPYYKYTPQTVIENTSYKLYYDRAILTDRTTHYNRPDIILQDKLNKVTYLIDISVPNTHNIQKAIAEKINKYVDLKDEVTRIWKQNKVYVVPIVLSTTGVIPYHLHQSIKLIGLRHSTYITLQKAAILNTCRIVRKFMQIDEKEVGPHNLTHTIAPP

SEQ ID NO: 21018 - protein, 1279 aa, Oechydrus chersis
MRRSNRIKNKNFAQSNTVAEQNPNSPLHLSSPFSSTHSLFESPSTSPLSFENSLGHSTTVSPMPVDIEQEKISALPASAVMREANAFLPTSTKAGKPRVRMSWSQDVNKFIMRTYYRITKLETDMTTYRKTLHELFSLQYPGVNVSEQRVSDQRRMIIKNRYLSQQILEKIKEEVTRELETENNVETMHNDQTQVETALGSHTQSQFISSRSSSPKSSTQFITHTLTATSHSSTQTESITLLLENDIESITEVPSHNDTRTEEIYNKLQAALLQYSGMDPGARPKLPRIKYTKYLSNLVHLFNKHILSRFINKETQLNDIHTLIYCTAIVISEELNYKIKENTTQKVKENTKPPWQIRIERDIEKLRADIGRLTQYINNNRSDKLVKKIRQIFNNSTRHSKYENDNTKPEEFLDTLKQKLALKSHRLKRYKKSQQRRIDNMKFITNEKTFYRNLKSNNVNNEHNHTELLTKEQLENYWSDIWEEEALHNDKAQWITKETDRWESIEEMGFQEITERDVISITTRLHNWKSPGIDKIHNYWYKKLTALHKHLAKNITEVILGKKILPNFITKGITYIVHKGKDPAQPSNYRPITCLPTIYKIITSAITIKINAHIEKHTILAEEQKGCRRGHMGCKEQLIIDSIIHKHAASKNRNLHCTYIDYKKAFDSIPHSWLVQILQIYKINPIIVEFLRNVMSQWKTALHLYQGNKSVVTRQININKGIYQGDSLSPLWFCLALNPLTNLLRDCEAGYRFNNNSTDTTISHLIYMDDIKLYAKTQKDMKKLLDTTSQFSNDINMQFGLDKCKTLHIIKGKVKPGDYIMNNTDVISAMESTDVYKYLGYNQLNGLQHTTIKHTLTLEYKRRINVLCNTQLSGKHLTKAINTYAIPILTYSFGIIKWTKTDIEQIERTTRTTLTKHNNLHPKSAVERLTIKRQDGGRGIIDIQNLWQKQINSLQHFFLIKSTTSQIHSVITHNDKNLTPLNLADHTSRQEPNTQNSQSQKSENWKKKVLHGRHPHDLENKHVDKIASNKWLKVGNLFPETEGFLIAIQDQVINTKNYRKHIIKDPNLTNDKCRRCHTQPETIQHITGACTNLTQSDYTHRHNQVTNVIHQKLALKHKLIQNTNTPYYKYKPQTVIENTTHKLYYDRAILTDRTTHYNRPDITLQDKLNKITYLIDIAVPNTHNIQKTIAEKINKYAELKEEITRIWNQEKVYIVPIVLSTTGVIPYHLHQSLKLIGLSHSTYIILQKAAILNTCRIVRKFMQIEENEIGPHHIIQTDP

SEQ ID NO: 21019 - protein, 1276 aa, Typhedanus ampyx
MRRSNRIKNKNNNSAQADTVAEEEPESSSHLSSPISSTHSLFESPQSTNTRSFESSFTTSNIVSPIPVHDVQEEDISLPVLDVTREANAFLPTSTKAGKPRVRMKWSQDVNKFIMRTYYYITKLETDMTTYRKTLHELFSLQYPDINVSQQRVSDQRRMIIKNKYLAQEILDKIKREVSRELEKENTEDTTQTNKALPSQHISPQPLNSNGASQVITHTLATTSNISTQTELITLLLENDIEANAEIPLITDVRIQEIFDKLQEALIQYSGMDPAARPRLPRIKYTKYLNDLVNLFNKHILFRFISEETQLNDIHTLIYCTALVISKELNYKINQTQNYAKGKENSKPAWQIRLERDIEKLRKDIGRLTQYINNNRSDKLVKKVQQIFNNITTHTKHESNNKKPEEFLDTLKQKLALKSHRLKRYKKAQQRKDDNTQFTANEKIFYRKISKPKANYTIRNNPTELPTKEELENYWSNIWEEKAHHNDKAHWIANEKNRWDSVEEMRFQEITEQDVINITTRLHNWKSPGIDRIHNYWYKKLTSLHKILAKTLTDIILGRQILPDFITKGITYIIPKGKDPTQPSNYRPITCLPTIYKILTSAITTKITAHIETHSILAEEQKGCRQGHMGCKEQLIIDSVVHKHAALKNRNLHCTYIDYKKAFDSVPHSWLIQILQIYKISPVIIDFLHTIMSNWKTTLYLNQGNTSVVTRQIHIQKGIYQGDSLSPLWFCLALNPLTNLLHDCRVGYRLSNSPEDTTISHLIYMDDIKLYAKTQKDMKKLIDTTTQFSNDINMQFGLDKCKTLHIIKGKIKPGDYVVNSTDIISAMESTDVYKYLGYEQSKGLQHTTIKHTLTTEFKRRINALCTTQLSGKYLIKSINSYAIPVLTYSFGIIKWTKTDIEQLERTTRTTLTKHNHLHPKSAVERLTIKRQDGGRGIIDIQHLWQKQISSLQNFFLVKSLTSEIHAAITHNDINLTPLNLTDTKNQQEPDKRHSQKQKLEAWKKKILHGRHPHDLENKHVDKIASNKWLKVGNLFPETEGFMIAIQDQVINTKNYRKHIIKDPSLTNDKCRRCHTQPETIQHITGACISLTQSDYTHRHNQVTHIIHQKLALKHKLIQNTNTPYYTYNPQPVIENETHKLYYDRAILTDKTIHYNRPDITLLDKLNKITYLIDIAVPNTHNIHKTIAEKINKYADLKEEISRIWKQNKVYVVPIVLSTTGVIPYHLHHSMKLIGLAHSTYIALQKAAILNTCRIVRKFLQIEENEIVTHNIISDPL

SEQ ID NO: 21020 - protein, 1347 aa, Venada nevada
MRLRCRLLPQAGTREGESRPGPSSPGSPSYSGGGNVSHIAAQSRTVAVSRTRTHIISNPSSPNSYRTVSGEELSRRTPTGSSENVTAETDTLTDRTTPIDPYSPSTSSYRPSLPTSPSLSSCLSTKSPTPTLDVAQAANVFLPTSTKAGKPRVRMSWSKDVNIFIMRTYYYITKLEIDFTTYRKQLHELFSRKYPEINVTEQRIADQRRTIVKNKRLNQETLNQLKEEVRLQLEAENQMNDSTNSNTNASQSLSEPSHQNSVQSQQSTNTHSLSTSTQTNHISYITTQNIQSPDVSTQIESMTLTSENDINTTEYYDLTFNTYKQKIYDTFKTTLTLYSGMDPLMRPKLPKLRYSPQLFQLINIFNHDILKHIISEDIQLSDLHTIIYCVAVVISQELNYKIKDYSENSTRNNLNKPPWQIRLERDIDKLRTNCGRLTQYIKGNRSRKIIKHIETIFKNNVIHTTHEHENRNAEEFLDTLKQKLAAKANRLKRFKKAEQRKSDNITFSTNEKIFYRKLQKPQINHTIENNPELPTEEQLELFWSNIWEKQVRHNEEAEWIAEEKIKWSTIGEMQFIDITEADIANITNRLHNWKSPGVDRIHNFWYKKLSTLHKLIAKNFTCIILGTQNIPEFMTTGITYMLPKSQYSPQPSQYRPITCLPTLYKILTSVITAKVNKHIEQNNIIAEEQKGCRRGHMGCKEQLIIDSTIHKNATSKNRNLHCTYIDYKKAFDSIPHSWLIQILQIYKVNPKLVDFLRKIMTRWKTTLQLSTHHKSVTTRQIHIRRGIYQGDALSPLWFCLALNPLSHLLHRCQVGYCLKRDTTDTIISHLIYMDDIKLYAKTEKDITKLLDTTTEFSKDINMEFGLDKCKILHIIRGKVRPGNYEITDTGTITAMEPAELYKYLGYKQLKKLDHTATKNTLTAEYKTRINTLCKTHLSSKNLIKSLNTYAVPILTYSFGIIKWTKTDIEQLERMTRTILSKHNNLHPKSAIERLTIKRQDGGRGLIDIGQLWQNQIDRLKYFFYTKSQTSNIHKAIVQNDYNYTPLNLKEETNIPHIHNNDNNNNSQRQKMEDWKKKVLHGRHPHDLHQSHIDKKASNKWLQVGNLFPETEGFMIAIQDQIINTKNYRKYIIKDSTVKNDKCRKCHTQSETIQHITGACVTLSQTDYTHRHNQVANIIHQKLALKYKLLQNTITPYYNYTPQTILENQTHKLYYDRAILTDKTIHYNRPDIILKDKLNKTTYLIDIAIPNTHNLQKTIAEKINKYTELKEEVIRIWRQEKVFIVPIVLSTTGIIPKHLRHSLTQLDLNDSTYITLQKAAILNTCRIVRKFMQIEENDIVSHHTITTS

SEQ ID NO: 21021 - protein, 1308 aa, Zera sp.
METRSKKKRTGPLPGGDRRGTPGADAGCLSMRTVSGEELSRRAPTGYSEIATAETDTLTDRTTPIDQYSPSTTSYIPSISTSPSVSSCLSTQSPTPTLDVAQVANAFLPASTKAGKPRVRMSWSKDVNIFIMRTYYYITKLETDLTTYRKQLHELFLREYPEINVTEQRIADQRRTIVKNKRLHQETLNQLKEEVRVQLETENQITMHINDNTNSNTNLVSQSLSLSSHQDSSQSQLSSNTHSLHTSTQMNQLSHIVTQNTQSPSMSTQIEPQTLTLENDINTTVYNDPTPNIHIQQIYEKFRTTLIQYSSMDPLMRPKLPRLRYSPQLFQLVHIFNHHILKLTISEDTQLSDLHTIIYCTALVISQELNYNIKDYSESSSPKHVNKPPWEIRLERDIDKIRTNCGRLTQYIKGNRSKKIMKHIEAIFKNTIIHTTHENENRKPEEFLDTLKQKLAVKVNRLKRYKKAKQRRSDNLTFHTNEKIFYRKLQKSQIDSTLENNPELPTKEQLESFWSNIWETQVQHNESAEWIAEEKIKWSTIGEMQFIDITETEIVNITNRLHNWKTPGADKIHNFWYKKLFTLHKLIAKNFTCIILGTQNMPEFITTGITYMLPKSHYSPQPSQYRPITCLPTLYKILTSVITAKVNKHIEQYNIVAEEQKGCRRGHMGCKEQLIIDSTIHKHATSKNRNLHCTYIDYKKAFDSIPHSWLIQILEIYKINSKLVDFLRKIMTQWKTTLQLCTHNKSITTRQIYIKRGIYQGDALSPLWFCLALNPLSHLLHRCQVGYRLQHDTTDTIISHLIYMDDIKLYAKTETDMTKLLDTTTQFSKDIKMEFGLEKCKLLHIIRGKVRPGNYEVSETGTITAMEPAELYKYLGYKQLKKLDHTATKNILIAEYKTRINALCKTQLSGKNLIKSFNTYAIPILTYSFGIIKWTKTDIEQLERMTRTTLSKHNKLHTKSAIERLTIKRKDGGRGLVDIGQLWQNQVNRLKYFFYTKSQTSNIHKAIVQNDHNYTPLNLKEETITLHTHDNDNNNYSQRQKIEDWKKKVLHGRHPHDLHQPHIDTSASNKWLQVGNLFPETEGFIIAIQDQIINTKNYRKYIIKDSTIKNDKCRKCHIQSETIQHITGACTTLTQTDYTHRHNQVANIIHQKLALKYKLIQNTTTPYYNYTPQTILENRTHKLYYDRAILTDKTIHYNRPDITLQDKLNKTTYLIDIAVPNTHNLQKTIIEKISKYTELKEEVIRIWRQDHAFIVPIVLSTTGVIPKHLRHSLNQLGLNDSTYLTLQKAAILNTCRIVRKFMQIEEKT

SEQ ID NO: 21022 - protein, 1330 aa, Ouleus salvina
MRLRSRLLPQAGTREGESRPGPSSPGCPSYSGVGNVSHIAAQSRTVAVSKTHSHVISSPSSPNSHRTVSGEELSRRTSTGLSKNATAETDTLLDRTTPIDPYSPSTSSYTPSLPTSPSLSSCLSTQCPTPTLDVAQAANAFLPTSTKAGKPRVRMSWSKDVNIFIMRTYYYITKLETDFTTYREQLHELFSLKYPNINVTVQRIADQRRTIVKNKRLNQETLTQLKEEVRLQLEIEEHINDSTNSNINSSQPLGLHITSTQTNHMTYTTTQNTQSPNVSTQIESTTLTLENDINTTEYYNLNFNSYKQKIHDTFRTTLTLYSGMDPLMRPKLPKLRYSPQLFQLLHIFNHDILKQFISEDTQLIDLHTIIYCTALVISQELNYKIKDYSESSTRKDLYKPPWQIRLQKDIDKLRTNCGRLTQYIKGNRSRKIIKHIEAIFKNNIIHTTHENGNRKAEEFLDTLKQKLAVKANRLKRYNKAKQRKSDNITFSMNEKIFYRNLQKPKIDPTIENNPELPTQEQLELFWSNIWEKHVHHNEEAEWIAEEKIKWGATEEMQFIDISETDIANITNRLHNWKTPGVDRIHNFWYKKLFILHKLIAKNFTCFILGTQNIPEFMTTGITYMLPKSQYSSQPSQYRPITCLPTLYKILTSAITTKVNKHIELNNIIAEEQKGCRHGHMGCKEQLIIDSTIHKNATSKNRNLHCTYIDYKKAFDSIPHSWLIQILQIYKVNSKLVDFLRKIMTKWKTTLQLSAHHKSVTTRQIHIRRGIYQGDALSPLWFCLALNPLSHLLHRCQVGYCLKHDNTDTIISHLIYMDDIKLYAKNEIDMTKLLDTTTQFSKDINMEFGLDKCKILHIIRGKVCPGNYDITKIGTITAMEPTELYKYLGYKQLKKLDHTATKNTLIAEYRTRINTLCKTHLSSKNLIKSLNTYAVPILTYSFGIIKWTKTDIEQLERMTRTILSKHHNLHPKSAIERLTIKRHDGGRGLIDIGQLWQNQINRLKYFFYTKSQTSKIHKAIVQNDYNYTPLNLKEETNILFTHNKDSNSNSQRQKMEDWKKKVLHGRHPHDLHQSHIDTKASNKWLQVGNLFPETEGFMIAIQDQIINTKNYRKYIIKDSTVKTDKCRRCHTQPETIQHITGACTTLTQTDYTHRHNQVANIIHQKLALKYKLLRNTTTPYYNYTPQTILENQTHKLYYDRAILTDKTIHYNRPDITLQDKVNKTTYLIDIAVPNTHNLQKTISEKISKYTELKEEVTRIWRQENVFIVPIVLSTTGIIPKHLRHSLTQLDLNDNTYITIQKAAILNTCRIVRKFMQIEENDIVSHQTITTS

SEQ ID NO: 21023 - protein, 1282 aa, Spialia ferax
METRSKKKRSGPLPEGDRRGTPGADAGCHSMRTVSGEELSRRTPTGSSENATADLDILTDRLEPYSPSTISYTPSIQTSPSLSSSSRNSPTPTLDVAQGQHALLPASTKAGKPRVRMRWSKEINLFIMRTYYLITKLETDLTTYRKQLHEKFLQQYPEIKVTEQRIADQRRTIVKNKLLDEDTLNKMKEDIKLQLEEDRQNDTYFDTSTPPVQLIVEANSTLSTNLTHTLTQSTQLAHIFMQNNQPLHNTSTQTDSVIITLENDINTTVDYNINTNIHIQEIHDKFRTALTQYSGMNPIARPKLPKIRYSPHLFQLVNIFNQDILNNFITEDTQLTDIHTIVYCTAFVISQELNYKITENIPNITPKYNKPAWQIRLEKDIEKLRADCGRLTQYIMGNRSKKIKKYVQIIFKSTFIHTTHENKNRKPEEFLDTLKQKLALKVNRLKRYKKAQQRKSDNITFSTNEKIFYKKLNKPKLQQVITKEADLPTEENLEKFWSNIWEDKVEHNEKADWIEEEEKKWSTIEEMEFHEITENDITCITRKLHNWKSPGVDKIHNFWYKKLISLHKSIAKNISDIILGKQCIPEFIATGITYMIPKSEYTPHPAEYRPITCLPTIYKIFTSAITLKVNKHIERHNILAEEQKGCRRGHMGCKEQLIIDSTIHKHASSKNRNLHCTYIDYKKAFDSIPHSWLLKILQIYKINSKLILFLQNIMKQWKTTLYLSTQQKTIKTRQISIKKGIYQGDSLSPLWFCLALNPLSHLLQRCQVGYPLKNGTTDTLISHLIYMDDIKLYSKTETGMRKLLDTTTQFSKDINMKFGLDKCKALHIKRGKIQPGDYTINNIDTIKAMEPNDLYKYLGYKQLKGLDHTTIKETLTTEYRTRINSLCKSQLSGKNLIKSINTYAIPILTYSFGIVKWTTTDIERLERMARTTLTKYNNLHPKSAIERLTIKRQDGGRGLIDIGKLWKSQISSLKTFFFTKSQTSHIHKAIVQNDLNYTPLNLSAPDQALTQYTPHDNSTQHNNNTQRDKIEDWKKKVLHGRHPHDLEQPHVDAIASNKWLQIGNLFPETEGFMIAIQDQIINTRNYRKYIMKDPTLINDKCRKCHTQPETIQHITGACITLTQTDYTHRHNQVANIIHQKLALKHKLIQNSNTPYYNYTPQTILESKSHKLYYDRAILTDKTIHYNRPDITLQDKINKITYLIDIAVPNTHNIQKTITKKITKYTELKEEVIRIWRQEKVYIVPIVLSSTGIIPYHLRHSLQLLNLPDTTFQKAAILNTCSK

SEQ ID NO: 21024 - protein, 1308 aa, Spialia mafa
METRSRKKRSGPLPEGDRRGTPGADAGCHSMRTVSGEELNRRAPTGSSENATAELDILTDIPEPYSPSTISYTPSVQTSPSLSSSSRICSPIPTLDVAQGQHALLPASTKAGKPRVRMRWSKEVNLFIMRTYYLITKLETDLTTYRKQLHEKFLQQYPEIKVTEQRIADQRRTIIRNKLLDQETLNKLKEDIKLQLCEDSENHTSTDTSTPLEHLALQSNSSQNTNLTHIQTKTTQSSHTFTQNTQTLHNTSTQTDSVTITLENDINTTADYNITTQIHIQEIHDKFRTALTQYSGMNPEARPKLPKIRYSPHLFELINIFNQDILNNFVTEDTQLMDIHTIVYCTALVISQELNYKITDNASNITPKYCHKPPWQIRLEKDIEKLRVDCGRLTQYIMGNRSKKIVKHVQIIFKSTLTHTAHEQNNKKPEEFLDTLKQKLALKANRLKRYNKAQQRKTDNIIFSTNEKIFYKNLLKPQTQQITINETDLPTEENLETFWSNIWEDEIEHNKKAEWIQEEEKKWSTIEEMEFKEITENDITYITHRLHNWKSPGVDKIHNFWYKKLITLHKSIAKNISDIILGKQRIPEFIATGITYMLPKSQYTPHPAEYRPITCLPTIYKIITSAITLRINKHIEHHNILAEEQKGCRRGHMGCKEQLIIDSTIHKHASSKNRNLHCTYIDYKKAFDSIPHSWLLKILHIYKINPKIINFLQNIMTQWKTTLYLSTQQKSIKTRQIFIKKGIYQGDSLSPLWFCLALNPLSHLLQRCQVGYHLKNDATDTLISHLVYMDDIKLYAKTEIAMRKLLDTTTQFSKDINMEFGLDKCKALHIKRGKIQPGDYTINNIGTIKAMEPNDLYKYLGYKQLKGLDHTAIKETLTTEYRNRINALCKTQLTGKNLIKSINTYAIPILTYSFGIVKWTTTDIERLERMARITLTKHNNLHPKSAIERLTIKRQDGGRGLVDIGKLWRSQISGLKTFFYTKSQTSHIHRAIVQNDLNYTPLNLSTPDQALTQYTQHNNSTLHNNNTLKEKIEAWKKKVLHGRHPHDLEQPHVDAIASNKWLQIGNLFPETEGFMIAIQDQIINTRNYRKYIVKDPTVVNDKCRKCHTQPETIQHITGACITLTQTDYTHRHNQIANIIHQKLAFKYKLIQNSNTPYYNYTPQTVLENKSHKLYYDRAILTDKTIHYNRPDITLQDKINKITYLIDIAVPNTHNLQKTITEKITKYTELKEEIIRIWRQDKVFIVPIVLSSTGIIPKHLRNSLKLLDLKDSTYITLQKAAILNTCRIVRKFLQIDENDSATNHIPPLN

SEQ ID NO: 21025 - protein, 1269 aa, Udranomia orcinus
MRRSNRIKNKYSAQSDTVAEVVPSDNSHNSSAISSNESLFQSPSSSPYSFQNMLSRSSTVSPIVEERTRTIPTCSDVARGTNVLLPASTKAGKPRVRMRWNQDVNIFIMRTYYHITKLETDMSIYRKTLHELFSLQYPEVNVSEQRISDQRRMIVKNKYLSQEILNKLKEEVSRQLEEEEKTNNTNNHNAEFHTENFSNIVEYQTETTVFQSQSDITQSNTSTLTSTAHLATQTESVTLLLENDIDTAIELPSFTDIRIQEIHDKLHTAIIQYSGMDPEARPRLPRLKYTKYLTSLVNLFNQHILFRFISNETQLTDIHTIIYCTALVISEELNYKLITNTTDFITKEKVKPPWHIRLEKDIEKLRTDIGRLTQYINNNKSRKLAKKVQNIFKNAAKHSKHESENKKPEEYLDTLKQKLALKTHRLRRYKKTQQRKNDNIQFSKNEKIFYRNLSKTNSNTKENSYSETIAKEQLENYWSDIWEKNVVHNDKANWIKDESMKWEVIEEMTFQEITECDVRYITSRLHNWKSPGIDKLHSYWYKKLTILHKSLAKNFTEIISGKQNIPHFITIGITYMIPKNTNATQPSQYRPITCLPTIYKILTSIITSKITAHIENNHILSEEQKGCRRGHMGCKEQLIIDSVIHKHANSNHKNLHCTYIDYRKAFDSVPHSWLIQILHIYRISPVIIEFLRNIMSHWKTSLHLTQNTKAVTTRQISIKKGIYQGDSLSPLWFCLALNPLSSYLNNSKVGYNLEISSKYITLSHLLYMDDIKLYAKTEKDMQKLLRITTDFSNDINMRFGLDKCKSLHVINGKILPGDYIMNNTDIIKAMEPTDIYKYLGYDQLKGLQHTKIKLSLTTEYKRRLNAICKTKLLGKHLTKAINSYAIPILTYSFGIIKWSKTNIEQIQRTTRTTLTKHNNLHPKSAIERLTIKRQDGGRGIIDIESLWLKQINSLRNFFLKKSTISNLHLAIIQNDKNFTPLNLVNYPIPQESNNEDLQKQKIENWKKKVLHGRHPHDLEQKHIDKIASNKWLKVGNLFPETEGFIIAIQDQIINTKNYRKYIIKDSSVTSDKCRRCHTQSENIQHITGACISLTQTDYTHRHNQICNIIHQKLALKHRLIQNTNTPYYRYIPQTVIENTTHKLYYDRAILTDRTIHCNRPDIILQDKLNKTTYLIDVAVPNTHNIQKTITEKINKYAELKEEVTRIWKQEKVYVIPIVLSTTGIIPYHLHQSLKLLGLTQSSYILLQKAAILNTCRIVRKFMQIEETEI

SEQ ID NO: 21026 - protein, 1271 aa, Udranomia kikkawai
MRRSKRIKNKNSAQSDTVAEVAPSNTSHNSSAISSNDSLFQSPSSSPYSFQNMISRSSTVSPIVKENTITMSTCSDVARGANAFLPASTKAGKPRVRMRWSQDVNIFIMRTYYHITKLETDMSIYRKTLHELFSLQYPEVNVSEQRISDQRRMIVKNRYLSQEILNKLKEEVSIQLEEEEKSNNTNNHHAEIHTENDRNTIEFQTDNIVSQSQNDISLSQSNTRTLTSITHSATQTESVTLLLENDIETAIELPSFTDIGIQEIHDKLQATIIQYSGMDPEARPRLPRLKYSKYLTNLVNLFNQHILFKFISNETQLTDIHTIIYCTALVISEELNYKLITNTTDFITKEKIKPSWQIRLERDIEKLRADIGRLTQYINNNKSRKLAKKVQYIFKNAIKHSKHESENKKPEEYLDTLKQKLALKTHRLRRYKKAQQRKNDNIQFTKNEKIFYRNLSKINSNTEENNHSETPTKEQLENYWSDIWEKKVVHNDKANWIKEESTKWEGIEEMEFQEITEYDVSYVTGRLHNWKSPGTDKMHSYWYKKLTILHKSLAKNFTDIISCKQNIPNFFTTGITYMIPKTKNPTQPSQYRPITCLPTIYKILTSIITSKITAHIENNHILAEEQKGCRRGHMGCKEQLVIDSVIHKHANSNHKNLHCTYIDYQKAFDSVPHSWLIQILNIYRISPVIVEFLHNTMSHWKTSLHLNQNTKAVTTRQISINKGIFQGDSLSPLWFCLALNPLSNYLNNSQLGYNLELTSKYITLSHLIYMDDIKLYAKTDKEMQNLIHITTEFSTDINMQFGLDKCKSLHLIKGKIVPGDYITNNTDIIKAMEPTDIYKYLGYNQSKGLLHTKIKNSLTTEYKRRLNAICKTQLLGKHLTKAINSYAIPILTYSFGIIKWPKTNIEKIERTTRTTLTKHNNLHPKSAIERLTIKRQDGGRGVIDIERLWLKQINSLRNFFLTKTTTSNIHSAVTQNDKNFTPLNLGSYSIPHEFNDEDPQKQKVENWKKKVLHGRHPHDLEHKHIDKISSNKWLKVGNLFPETEGFIIAIQDQVINTKNYRKYIIKDSTVTSDKCRRCHTQPETIQHITGACISLTQTDYTHRHNQVCNIIHQKLALKHKLIQNTNTPYYRYAPQTVIENTTHKLYYDRAILTDRTIHCNRPDIILLDKQNKTTYLIDVAIPNTHNIQKTIAEKINKYAELKDEVTRIWKQEKVYVVPIVLSTTGIIPYHLHKSLKLLGLTHSSYILMQKAAILNTCRIVRKFMQIEETEI

SEQ ID NO: 21027 - protein, 1169 aa, Hypermnestra helios
MSWSKDVNLFIMRTYFYITKLETDMTIYRKKLHEIFSQQYPDIKVTEQRLSDQKRAIIRNKLLSEEILDQLKDEVRRQLQEETGQIQNTSRLSQVYCTHSQNQSQLFTLSQYHNQTHSPNIQTSHMATQTETLTLTLENDIETLVDSNNILEEPYIQEIHNKLIATLTLYSGMDPTARPILPKLKYSQKLTELINLFNQKILNLFLTEDTKLTDIHTLIYCTAVVISEELEYKITKNIITHRKSKNDNKPPWENRLEKDIKKLRADCGRLTQYINNNRSKKVIKRVEEIFKNRTIHTRHEVNNRKPEEFLDTIKQKLALKVHRLKRYKKAQQRKVDNIQFATNEKKFYRNLKVSNINNTTIENNEDIPNKEQLETFWSGIWEEQIQHNEEAEWIKEETERWSTTGEMKFTEITESDIQLTTTRLHNWKSPGVDKIHNFWFKKLTSLHKAIAKNFTEIILGKQNIPHFLATGITYMIPKNKISPQPSQYRPITCLPTVYKILTSIISTKISVHIEHHNIMAEEQKGCRRGHMGCKEQLVIDSTIHKHATTKQRNLHCTYIDYQKAFDSIPHTWLIQILKIYKINQNLIEFLRNIMPYWKTKHVKNDNKSVMTRQIIIKKGIYQGDSLSPLWFCLAMNPLSHQLHRCRAGYHFKNATEEIIISHLIYMDDIKLYAKTEKEMKKLITTTTNFSKDINMQFGLDKCSTLHIIKGKIRPGDYPVGETDIITAMEPSDMYKYLGYKQLKGLDHTGIKQTLTAEYKKRLNTICKTQLMAKYLIKALNTFAIPVLTYSFGIIKWSKTDIENLERTTRTTLTKHNNLHPKSAIERLTIKRQDGGRGLIDIQHLWQKQLYILKTFFRTKSNTSIIHKTISENDLNFTPLNLNEQSHLQNPNENNTYKQKIENWKKKVLHGRHPHDLEKSHIDTIASNKWLKIGNLYPETEGFMIAIQDQIINTKNHRKYIIKDATVTTDRCRKCHNQSETIQHITGACTTLTQTDYTHRHNQVANIIHQNLALKHSLIQNKNTPYYKYAAQNVLENYSHKLYYDRAILTDKTIHYNRPDIILQDKMNKTTFLIDIAVPNTHNIQKTISEKINKYEDLKEEIMRIWKQEKVYIVPIVLSATGVIPNHLHNSLKLLDLKSSLYINLQKAVILNTCRIVRKFMQIDENNYSQ

SEQ ID NO: 21028 - protein, 1294 aa, Melitaea cinxia
METRSMKKRKGPLPGGNRRGTPGAGAGCFSMRTASGEELNRRAPTGSTENTTADADRLTDRTTSTEPYSPSTISYTPSIPSSPLSNRDSPTPTLDVAREASAFLPTSTKAGKPRVRMKWSKEVNLFIMRTYYYITRLETDLTTYRKQLHELFLRKYPELNVTEQRIADQRRAIVKNNLLNQETLNIIKEEIKSQLETENENQIYINSNVSTNNDIQCSSTHPKPNTRHTSPSNIFTYNTQSTCTFSNNTQTSHMSTQTEFVTIMMDNDIDTVFDHNLGTNTQIEEICDKFRTALTQYSGMDPRVRPKLPKLRYSSHLFQLVNMFNQDILFQFISDDTKLTDIHTIVYCVALVISEELNYKVTENIRSTRPKDCNKPPWQIRLEKDIEKLRADCGRVTQYINNNRSRKIIKHVKRIFETRNTHTKHENRNTKPEEFLDTLKQKLALKVHRLKRYKKAQQRKNDNTMFSTNEKTFYRNLYKPKIDTDTVNSPIMPTQIQLETFWSGIWEQQVHHNDKADWITDEENKWNSIEEMEFTEITETEINNITARLHNWKSLGVDKIHNFWFKKLFSLHKIIAKNFTDIIIGKQKIPDFIATGITYMLPKSQISPQPSQYRPITCLPTIYKILTSAITTKINKHVEQYNIIAEEQKGCRRGHMGCKEQLIIDSTIHKHATSKNRNLHCTYIDYKKAFDSIPHSWLIKILQIYKINPKIINFLRDIMSRWKTTLYLTANRTNITTREIIIRKGIYQGDSLSPLWFCLALNPLSYLLRGCRAGYCLKYDKQDTIVSHLIYMDDIKLYGKTEMEMQKLIDTTAQFSKDINMEFGLDKCRTLHIKRGKIRPGHYVVNDTNIITAMEPTDLYKYLGYKQLKGLDHTEIKNTLTIEFKKRVNALCKTKLTGKHLIKSINTYAIPILTYSFGIIKWTKTDIEQIERTTLTKHNNLHPKSAIERLTIKREYGGRGLIDLNHLCQKQVGNLKAFFLLKSQTSEIHKAIVQNDFNYTPLNLHEDISSLNTESNDLQTQKLDSWKRKVLHGRHPHDLEQSHINTAASNKWLKIGNLIPETEGFIIAIQDQIVNTKNYRKFIIKDSSIPNDKCRKCHVQPETIQHITGACTTLTQTDYTHRHNQVVNIIHQKLALKHKLIQNTNTPYYKYKPQTVLENDTHKLYFDRAILTDRTIHYNRPDITLQDKLNKKTYLIDIAVPNTHNLQKTISEKINKYTELKEEVARIWNQNKVYIIPIVLSTTGVIPNHLLHSLKLLELNETLYITLQKAAILNTCRIVRKFLQIDEHEIPHNT

SEQ ID NO: 21029 - protein, 1297 aa, Melitaea cinxia
METRSMKKRKGPLPGGNRRGTPGAGAGCFSMRTASGEELNRRAPTGSSENATADADRLTDRTTSTEPYSPSTISYTPSIPSSPLSNRDSPTPTLDVAREASAFLPTSTKAGKPRVRMKWSKEVNLFIMRTYYYITRLETDLTTYRRQLHELFLRKYPELNVTEQRIADQRRAIVKNNLLNQETLNIIKEEIKSQLETENENQIYINSNVSTNDDIQCSSTHPKPNTRHTSPSNIFTYNTQSTYTFSNNTQTSHMSTQTEFVIIMMDNDIDTVLDHNLGTNTQIEEICDKFRTALTQYSGMDPRVRPKLPKLRYSSHLFQLVNMFNQDILFQFISDDTKLTDIHTIVYCVALVISEELNYKVTENIRSTKPKDCNKPPWQIRLEKDIEKLRADCGRVTQYINNNRSRKIIKHVKRIFETRNTHTKHENRNTKPEEYLDTLKQKLALKVHRLKRYKKAQQRKNDNTMFSTNEKTFYRNLHKPKIDTDTVNSPIMPTQIQLETFWSGIWEQQVHHNDKADWITEEENKWNSIEEMEFTEITETEINNITARLHNWKSPGIDKIHNFWFKKLFSLHKIIAKNFTDIIIGKQKIPDFIATGITYMLPKSQISPQPSQYRPITCLPTIYKILTSAITTKINKHVEQYNIIAEEQKGCRRGHMGCKEQLIIDSTIHKHATSKNRNLHCTYIDYKKAFDSIPHSWLIKILQIYKINPKIINFLRDIMSRWKTTLYLTANRTNITTREIIIRKGIYQGDSLSPLWFCLALNPLSYLLRGCRAGYCLKYDKQDTIVSHLIYMDDIKLYGKTEMEMQKLIDTTAQFSKDINMEFGLDKCRTLHIKRGKIRPGHYVVNDTDIITAMEPTDLYKYLGYKQLKGLDHTEIKNTLTIEFKKRVNALCKTKLTGKHLIKSINTYAIPILTYSFGIIKWTKTDIEQIERTIRTTLTKHNNLHPKSAIERLTIKREYGGRGLIDLNHLYQKQVGNLKAFFLLKSQTSEIHKAIVQNDFNYTPLNLHEDISSLNTESNDLQTQKLDSWKRKVLHGRHPHDLEQPHINTAASNKWLKIGNLFPETEGFIIAIQDQIVNTKNYRKFIIKDASIPNDKCRKCHVQPETIQHITGACTTLTQTDYTHRHNQVVNIIHQKLALKHKLIQNTNTPYYKYKPQTVLENDTHKLYFDRAILTDRTIHYNRPDITLQDKLNKITYLIDIAVPNTHNLQKTISEKINKYTELKEEVARIWNQNKVYIIPIALSTTGVIPNHLLHSLKLLELNETLYITLQKAAILNTCRIVRKFLQIDEHQIPHNT

SEQ ID NO: 21030 - protein, 1297 aa, Melitaea cinxia
METRSMKKRKGPLPGGNRRGTPGAGAGCFSMRTASGEELNRRAPTGSTENTTADADRLTDRTTSTEPYSPSTISYTPSIPSSPLSNRDSPTPTLDVAREASAFLPTSTKAGKPRVRMKWSKEVNLFIMRTYYYITRLETDLTTYRKQLHELFLRKYPELNVTEQRIADQRRAIVKNNLLNQETLNIIKEEIKSQLETENENQIYINSNVSTNNDIQCSSTHPKPNTRHTSPSNIFTYNTQSTCTFSNNTQTSHMSTQTEFVTIMMDNDIDTVLDHNLGTNTQIEEICDKFRTALTQYSGMDPRVRPKLPKLRYSSHLFQLVNMFNQDILFQFISDDTKLTDIHTIVYCVALVISEELNYKVTENIRSTRPKDCNKPPWQIRLEKDIEKLRADCGRVTQYINNNRSRKIIKHVKRIFETRNTHTKHENRNTKPEEFLDTLKQKLALKVHRLKRYKKAQQRKNDNTMFSTNEKTFYRNLYKPKIDTDTVNSPIMPTQIQLETFWSGIWEQQVHHNDKADWITEEENKWNSIEEMEFTEITETEINNITARLHNWKSPGVDKIHNFWFKKLFSLHKIIAKNFTDIIIGKQKIPDFIATGITYMLPKSQISPQPSQYRPITCLPTIYKILTSAITTKINKHVEQYNIIAEEQKGCRRGHMGCKEQLIIDSTIHKHATSKNRNLHCTYIDYKKAFDSIPHSWLIKILQIYKINPKIINFLRDIMSRWKTTLYLTANRTNITTREIIIRKGIYQGDSLSPLWFCLALNPLSYLLRGCRAGYCLKYDKQDTIVSHLIYMDDIKLYGKTEMEMQKLIDTTAQFSKDINMEFGLDKCRTLHIKRGKIRPGHYVVNDTNIITAMEPTDLYKYLGYKQLKGLDHTEIKNTLTIEFKKRVNALCKTKLTGKHLIKSINTYAIPILTYSFGIIKWTKTDIEQIERTIRTTLTKHNNLHPKSAIERLTIKREYGGRGLIDLNHLCQKQVGNLKAFFLLKSQTSEIHKAIVQNDFNYTPLNLHEDISSLNTESNDLQTQKLDSWKRKVLHGRHPHDLEQPHINTAASNKWLKIGNLFPETEGFIIAIQDQIVNTKNYRKFIIKDSSIPNDKCRKCHVQPETIQHITGACTTLTQTDYTHRHNQVVNIIHQKLALKHKLIQNTNTPYYKYKPQTVLENDTHKLYFDRAILTDRTIHYNRPDITLQDKLNKKTYLIDIAVPNTHNLQKTISEKINKCTELKEEVARIWNQNKVYIIPIVLSTTGVIPNHLLHSLKLLELNETLYITLQKAAILNTCRIVRKFLQIDEHEIPHNT

SEQ ID NO: 21031 - protein, 1297 aa, Melitaea cinxia
METRSMKKRKGPLPGGNRRGTPGAGAGCFSMRTASGEELNRRAPTGSSENATADADRLTDRTTSTEPYSPNTISYTPSIPSSPISNRDSPTPTLDVAREASAFLPTSTKAGKPRVRMKWSKEVNLFIMRTYYYITRLETDLTTYRKQLHELFLRKYPELNVTEQRIADQRRAIVKNNLLNQETLNIIKEEIKSQLETENENQIYINSKVPTNDDIQCSSTHPKPNTRHTSPSNIFTYNTQSTCTFSNKTQTSHMSTQTEFVTIMMDNDIDTVLDHNLGTNTQIEEICDKFRTALTQYSGMDPRVRPKLPKLRYSSHLFQLVNMFNQDILFQFISDDTKLTDIHTIVYCVALVISEELNYKVTENIRSTRPKDCNKPPWQIRLEKDIEKLRADCGRVTQYINNNRSRKIIKHVKRIFETRNTHTKHENRNTKPEEFLDTLKQKLALKVHRLKRYKKAQQRKNDNTMFSTNEKTFYRNLHKPKIDTDTVNSPIMPTQIQLETFWSGIWEQEVHHNDKADWITEEENKWNSIEEMEFTEITETEINNITARLHNWKSPGIDKIHNFWFKKLFSLHKIIAKNFTDIIIGKQKIPDFIATGITYMLPKSQISPQPSQYRPITCLPTIYKILTSAITTKINKHVEQYNIIAEEQKGCRRGHMGCKEQLIIDSTIHKHATSKNRNLHCTYIDYKKAFDSIPHSWLIKILQIYKINPKIINFLRDIMSRWKTTLYLTANRTNITTREIIIRKGIYQGDSLSPLWFCLALNPLSYLLRGCRAGYCLKYDKQDTIVSHLIYMDDIKLYGKTEMEMQKLIDTTAQFSKDINMEFGLDKCRTLHIKRGKIRPGHYVVNDTDIITAMEPTDLYKYLGYKQLKGLDHTEIKNTLTIEFKKRVNALCKTKLTGKHLIKSINTYAIPILTYSFGIIKWTKTDIEQIERTIRTTLTKHNNLHPKSAIERLTIKREYGGRGLIDLNHLCQKQVGNLKAFFLLKSQTSEIHKAIVQNDYNYTPLNLHEDISSLNTESNDLQTQKLDSWKRKVLHGRHPHDLEQPHINTAASNKWLKIGNLFPETEGFIIAIQDQIVNTKNYRKFIIKDSSIPNDKCRKCHVQPETIQHITGACTTLTQTDYTHRHNQVVNIIHQKLALKHKLIQNTNTPYYKYKPQTVLENDTHKLYFDRAILTDRTIHYNRPDITLQDKLNKITYLIDIAVPNTHNLQKTISEKINKYTELKEEVARIWNQNKVYIIPIALSTTGVIPNHLLHSLKLLELNETLYITLQKAAILNTCRIVRKFLQIDEHEIPHNT

SEQ ID NO: 21032 - protein, 1297 aa, Mellicta athalia
METRSMKRRIGPLPGGDRRGTPGAGAGCLSMRTVSGEELNRRAPTGSSENATADTDRLTDRTTPTEPYSPSTISYTPSIPSSPLSNRDSPTPTLDVAREANAFLPTSTKAGKPRVRMKWSKEVNLFIMRTYYYITKLETDLTTYRKQLHELFLRKYPELNVTEQRIADQRRVIVKNNLLNQETLNIIKEEIKLQLETENENHIHINTNISTNDVIQGSSTQPKPNTQHTTPSNTFTDNTQSLCIFSNNTQTSNMSTQTEFVTITIDNDIDTVLDHNLGTSTEIEEICDKFRTALAQYSGMDPLARPKLPKLRYSSRLFQLVHMFNRDILSRFISDDTKLTDIHTIVYCVALVISEELNYKVTEYIRSTRPKDCNKPPWQIRLEKDIEKLRADCGRLTQYINSNRSRKIIKHVKAIFETRNTHTKHENNNTKPEEFLDTLKQKLALKVHRLKRYKKAQQRKTDNIMFSTNEKTFYRNLHKLKIDTDTVSNPIIPTQTQLETFWSGIWEQQVHHNDKADWIMEEENKWNSIEEMEFTEITETDINTITARLHNWKSPGIDKIHNFWYKKLDSLHKIMAKNFTDIIIGKQKIPDFIATGITYMLPKSQISPQPSQHRPITCLPTIYKILTSAITTKINKHVEQYNIIAEEQKGCRRGHMGCKEQLIIDSTIHKHATSKNRNLHCTYIDYKKAFDSIPHSWLIKILQIYKINPKIINFLRDIMARWKTTLYLTANRTNITTREIIIRKGIYQGDSLSPLWFCLALNPLSHLLRGCRAGYCLKYDIKDTIVSHLIYMDDIKLYGKTEIEMQKLIDTTAQFSKDINMEFGLDKCRTLHIKRGKIRPGHYVVNDNDIITAMEPTDLYKYLGYKQLRGLDHTEIKNTLTTEFKKRINALCKTQLTGKHLIKSLNTYAIPTLTYSFGIIKWTKTDIEQIERTIRTTLTKHNNLHPKSAIERLTIKREYGGRGLIDLNHLCQKQVANLKAFFHLKSQTSEIHKAIVQNDFNYTPLNLHEDISSQNTQGNDPQRQKLDSWKRKVLHGRHPHDLEQPHINTAASNKWLKIGNLFPETEGFIIAIQDQIVNTKNYRKFIIKDPLISNDKCRKCHVQPETIQHITGACTTLTQTDYTHRHNQVVNIIHQKLALKHKLIKNTNTPYYKYKPQTVLENNTHKLYFDRAILTDRTIHYNRPDITLQDKLNRITYLIDIAVPNTHNIQKTISEKINKYNELKDEVTRIWNQNKVHIIPIVLSTTGVIPNHLLHSLKLIQLNETLYITLQKAAILNTCRIVRKFLQIDEHEIQHST

SEQ ID NO: 21033 - protein, 1297 aa, Melitaea cinxia
METRSMKKRKGPLPGGNRRGTPGAGAGCFSMRTASGEELNRRAPTGSTENTTADADRLTDRTTSTEPYSPSTISYTPSIPSSPLSNRDSPTPTLDVAREASAFLPTSTKAGKPRVRMKWSKEVNLFIMRTYYYITRLETDLTTYRKQLHELFLRKYPELNVTEQRIADQRRAIVKNNLLNQETLNIIKEEIKSQLETENENQIYINSNVSTNNDIQCSSTHPKPNTRHTSPSNIFTYNTQSTCTFSNNTQTSHMSTQTEFVTIMMDNDIDTVLDHNLGTNTQIEEICDKFRTALTQYSGMDPRVRPKLPKLRYSSHLFQLVNMFNQDILFQFISDDTKLTDIHTIVYCVALVISEELNYKVTENIRSTRPKDCNKPPWQIRLEKDIEKLRADCGRVTQYINNNRSRKIIKHVKRIFETRNTHTKHENRNTKPEEFLDTLKQKLALKVHRLKRYKKAQQRKNDNTMFSTNEKTFYRNLHKPKIDTDTVNSPIMPTQIQLETFWSGIWEQQVHHNDKADWITEEENKWNSIEEMEFTEITETEINNITARLHSWKSPGIDKIHNFWFKKLFSLHKIIAKNFTDIIIGKQKIPDFIATGITYMLPKSQISSQPSQYRPITCLPTIYKILTSAITTKINKHVEQYNIIAEEQKGCRRGHMGCKEQLIIDSTIHKHATSKNRNLHCTYIDYKKAFDSIPHSWLIKILQIYKINPKIINFLRDIMSRWKTTLYLTANRTNITTREIIIRKGIYQGDSLSPLWFCLALNPLSYLLRGCRAGYCLKYDKQDTIVSHLIYMDDIKLYGKTEMEMQKLIDTTAQFSKDINMEFGLDKCRTLHIKRGKIRPGHYVVNDKDIITAMEPTDLYKYLGYKQLKGLNHTEIKNTLTIEFKKRVNALCKTKLTGKHLIKSINTYAIPILTYSFGIIKWTKTDIEQIERTIRTTLTKHNNLHPKSAIERLTIKREYGGRGLIDLNHLCQKQVGNLKAFFLLKSQTSEIHKAVVQNDFNYTPLNLHEDISSLNTESNDLQTQKIDSWKRKVLHGRHPHDLEQSHINTAASNKWLKIGNLFPETEGFIIAIQDQIVNTKNYRKFIIKDSSIPNDKCRKCHVQPETIQHITGACTTLTQTDYTHRHNQVVNIIHQKLALKHKLIQNTNTPYYKYKPQTVLENDTHKLYFDRAILTDRTIHYNRPDITLQDKLNKITYLIDIAVPNTHNLQKTISEKINKYTELKEEVARIWNQNKVYIIPIALSTTGVIPNHLLHSLKLLELNETLYITLQKAAILNTCRIVRKFLQIDEHEIPHNT

SEQ ID NO: 21034 - protein, 1295 aa, Leptidea sinapis
METRSMKKRKIGPLPGGDRRGTPGAGAGCLSMRTVSGEELNRRAPTGSSENTTAENDRLTDRTTPTEPYSPCTISYTPSIPSSPLSSRYSPTPTLDAAREANAFLLASTKAGKPRVRMKWSKEMNLFIMRTYYYITKLETDLTTYRKQLHELFLQKYPDLNVTEQRIADQRRVIVKNKLLNQETLNQIKEEIKSQLEIENENLFHINISEPTNDVIPCSSTQTIPNTQHNQSLNTFTYNIQSSQTFSYITQTSHNMSTQTEFVTIMMENDIDTVLDHNPGTNTEIEEICYKFKTALTQYSGMDPLVRPKLPKLRYNSHLFQLVNMFNSDILSRFISDDTKLTDIHTIVYCVALVISEELNYKVTEYIRSTRPKDCYKPPWQIRLDIEKLRADCGRLTQYINNNRSRKIIKHVKAIFKTGNTHTKHENSNIKPEEFLDTLKQKLALKVHRLKRYKKAQERKNDNTMFSTNEKNFYRNLHKLKTDTVNNPNVPTQEQLETFWSGIWEQQVHHNDKADWIIEEENKWNAIEEMDFTEITETEINNITARLHNWKSPGIDKIHNFWYKKLFSLHKIMAKNITDIIIGKQKIPDFIATGITYMLPKLQISPLPSQYRPITCLPTIYKILTSAITTKINKHVEHYNIIAEEQKGCRRGHMGCKEQLIIDSTIHKNATSKNRNLHCTYIDYKKAFDSIPHSWLIKILQIYKINPKIINFLHDIMSRWKTTLYLNTNQNTITTREIAIRKGIYQGDSLSPLWFCLALNPLSHLLRDCRAGYRLKHDIQETIVSHLIYMDDIKLYGKTEMEMKKLIDTTAQFSKDINMAFGLDKCRTLHIKRGKIRPGDYAVNDIDIIRAMEQTELYKYLGYKQLRGLDHTEIKNTLTIEFKKRINALCKTQLTSKHLIKSLNTYAIPILTYSFGIIKWTKTDIEQIERTIRTTLTKHNNLHPKSAIERLTIKREYGGRGLIDLNHLCQKQVGNLKDFFHLKSQTSEIHKAIVKNDINFTPLNLHEDISSQNTRRNDPQIQKLDSWKRKVLHGRHPHDLEQSHINTAASNKWLKIGNLFPETEGFIIAIQDQVVNTKNYRKFIIKDPSVSNDKCRKCHVQPETIQHITGGCTTLTQTDYTHRHNQVVNIIHQKLALKHKLIQNTNTPYYKYKPQTVLENDTYKLYFDRAILTDRTIHYNRPDITLKDKLNEITYLIDIAVPNTHNLQKTISEKINKYTELKDEVARIWNQKKVYVIPIVLSTTGVIPNHLLHSLKLLELKETLYITLQKVAILNTCRIVRKFLQIDEHDISPYT

SEQ ID NO: 21035 - protein, 1297 aa, Melitaea cinxia
METRSMKKRKGPLPGGNRRGTPGAGAGCFSMRTASGEELNRRAPTGSSENATADADRLTERTTSTEPYSPSTISYTPSIPSSPLSNRDSPTPTLDVAREASAFLPTSTKAGKPRVRMKWSKEVNLFIMRTYYYITRLETDLTTYRKQLHELFLRKYPELNVTEQRIADQRRAIVKNNLLNQETLNIIKEEIKSQLETENENQIYINSNVSTNDDIQCSSTHPKPNTRHTSPSNIFTYNTQSTCTFSNNTQTSHMSTQTEFVTIMMDNDIDTVLDHNLGTNTQIEEICDKFRTALTQYSGMDPRVRPKLPKLRYSSHLFQLVNMFNQDILFQFISDDTKLTDIHTIVYCVALVISEELNYKVTENIRSTRPKDCNKPPWQIRLEKDIEKLRADCGRVTQYINNNRSRKIIKHVKRIFETRNTHTKHENRNTKPEEFLDTLKQKLALKVHRLKRYKKAQQRKNDNTMFSTNEKTFYRNLHKPKIDTDTVNSPIMPTQKQLETFWSDIWEQQVHHNDKADWITEEENKWNSIEEMEFTEITETEINNITARLHNWKSPGIDKIHNFWFKKLFSLHKIIAKNFTDIIIGKQKIPDFIATGITYMLPKSQISPQPSQYRPITCLPTIYKILTSAITTKINKHVEQYNIIAEEQKGCRRGHMGCKEQLIIDSTIHKHATSKNRNLHCTYIDYKKAFDSIPHSWLIKILQIYKINPKIINFLRDIMSRWKTTLYLTANRTNITTREIIIRKGIYQGDSLSPLWFCLALNPLSYLLRGCRAGYCLKYDKQDTIVSHLIYMDDIKLYGKTEMEMQKLIDTTAQFSKDINMEFGLDKCRTLHIKRGKIRPGHYVVNDTDIITAMEPTDLYKYLGYKQLKGLDHTEIKNTLTIEFKKRINALCKTKLTGKHLIKSINTYAIPILTYSFGIIKWTKTDIEQIERTIRTTLTKHNNLHPKSAIERLTIKREYGGRGLIDLNHLCQKQVGNLKAFFLLKSQTSEIHKAIVQNDFNYTPLNLHEDISSLNTESNDLQTQKLDSWKRKVLHGRHPHDLEQPHINTAASNKWLKIGNLFPETEGFIIAIQDQIVNTKNYRKFIIKDSSIPNDKCRKCHVQPETIQHITGACTTLTQTDYTHRHNQVVNIIHQKLALKHKLIQNTNTPYYKYKPQTVLENDTHKLYFDRAILTDRTIHYNRPDITLQDKLNKITYLIDIAVPNTHNLQKTISGKINKYTELKEEVARIWNQNKVYIIPIALSTTGVIPNHLLHSLKLLELNETLYITLQKAAILNTCRIVRKFLQIDEHEIPHNT

SEQ ID NO: 21036 - protein, 1044 aa, Melitaea cinxia
MSTQTEFVTIMMDNDIDTVLDHNLGTNTQIEEICDKFRTALTQYSGMDPRVRPKLSKLRYSSHLFQLVNMFNQDILFQFISDDTKLTDIHTIVYCVALVISEELNYKVTENIRSTRPKDCNKPPWQIRLEKDIEKLRADCGRVTQYINNNRSRKIIKHVKRIFETRNTHTKHENRNTKPEEFLDTLKQKLALKVHRLKRYKKAQQRKNDNTMFSTNEKTFYRNLHKPKIDTDTVNSPIMPTQIQLETFWSGIWEQEVHHNDKADWITEEENKWNSIEEMEFTEITETEINNITARLHNWKSPGIDKIHNFWFKKLFSLHKIIAKNFTDIIIGKQKIPDFIATGITYMLPKSQISPQPSQYRPITCLPTIYKILTSAITTKINKHVEQYNIIAEEQKGCRRGHMGCKEQLIIDSTIHKHATSKNRNLHCTYIDYKKAFDSIPHSWLIKILQIYKINPKIINFLRDIMSRWKTTLYLTANRTNITTREIIIRKGIYQGDSLSPLWFCLALNPLSYLLRGCRAGYCLKYDKQDTIVSHLIYMDDIKLYGKTEMEMQKLIDTTAQFSKDINMEFGLDKCRTLHIKRGKIRPGHYVVNDTDIITAMEPTDLYKYLGYKQLKGLDHTEIKNILTIEFKKRVNALCKTKLTGKHLIKSINTYAIPILTYSFGIIKWTKTDIEQIERTIRTTLTKHNNLHPKSAIERLTIKREYGGRGLIDLNHLCQKQVGNLKAFFLLKSQTSEIHKAIVQNDFNYTPLNLHEDISSLNTESNDLQTQKLDSWKRKVLHGRHPHDLEQPHINTAASNKWLKIGNLFPETEGFIIAIQDQIVNTKNYRKFIIKDSSIPNDKCRKCHVQPETIQHITGACTTLTQTDYTHRHNQVVNIIHQMLALKHKLIQNTNTPYYKYKPQTVLENDTHKLYFDRAILTDRTIHYNRPDITLQDKLNKITYLIDIAVPNTHNLQKTISEKINKYTELKEEVARIWNQNKVYIIPIALSTTGVIPNHLLHSLKLLELNETLYITLQKAAILNTCRIVRKFLQIDEHEIPHNT

SEQ ID NO: 21037 - protein, 1297 aa, Leptidea sinapis
METRSMKKRKIGPLPGGDRRGTPGAGAGCLSMRTVSGEELNRRAPTGSSENTTAENDRLTDRTTPTEPYSPCTISYTPSIPSSPLSSRHSPTPTLDAAREANAFLLASTKAGKPRVRMKWSKEMNLFIMRTYYYITKLETDLTTYRKQLHELFLQKYPDLNVTEQRIADQRRVIVKNKLLNQETLNQIKEEIKSQLEIENENQFHINISEPTNDVIPCSSTQTIPNTQHNQSLNTFTYNIQSLQTFSYITQTSHNMSTQTEFVTIMMENDIDTVLDHNPGTNTEIEEICYKFKTALTQYSGMDPLVRPKLPKLRYNSHLFQLVNMFNSDILSRFISDDTKLTDIHTIVYCVALVISEELNYKVTEYIRSTRPKDCYKPPWQIRLEKDIEKLRADCGRLTQYINNNRSRKIIKHIKAIFKTGNTHTKHENSNIKPEEFLDTLKQKFALKVHRLKRYKKAQERKNDDTMFSTNEKNFYRNLNKLKTDTVNNPNVPTQEQLETFWSGIWEQQVHHNDKADWIIEEENKWNAIEEMDFTEITETEINNITARLHNWKSPGIDKIHNFWYKKLFSLHKIMAKNITDIIIGKQKIPDFIATGITYMLPKLQISPLPSQYRPITCLPTISKILTSAITTKINKHVEHYNIIAEEQKGCRRGHMGCKEQLIIDSTIHKHATSKNRNLHCTYIDYKKAFDSIPHSWLIKILQIYQINPKIINFLHDIMSRWKTTLYLNTNQNTITTREIAIRKGIYQCDSLSPLWFCLALKPLSHLLRDCRAGYRLKHDIQETIVSHLIYMDDIKLYGKTEMEMKKLIDTTAQFSKDINMEFGLNICRTLHIKRGKIRPGDYAVNDIDIIRAMEQTELYKYLGYKQLRGLDHTEIKNTLTIEFKKRINALCKTQLTSKHLIKSLNTYAIPILTYSFGIIKWTKTDIEQIERTIRTTLTKHNNLHPKSAIERLTIKREYGGRGLIDLNHLCQKQVGNLKDFFHLKSQTSEIHKAIVKNDINFTPLNLHEDISSQNSRRNDPQIQKLDSWKRKVLHGRHPHDLEQSHINTAASNKWLKIGNLFPETEGFIIAIQDQVVNTKNYRKFIIKDPSVSNDKCRKCHVQPETIQHITEGCTTLTQTDYTHRHNQVVNIIHQKLALKHKLIQNTNTPYYKYKPQTVLENDTYKLYFDRAILTDRTIHYNRPDITLKDKLNEITNLTDIAVPNTHNLQKTISEKINKYTELKDEVARIWNQKKVYVIPIVLSTTGVIPNHLLHSLKLLELKETLYITLQKVAILNTCRIVRKFLQIDEHDISPYT

SEQ ID NO: 21038 - protein, 1297 aa, Melitaea cinxia
METRSMKKRKGPLPGGNRRGTPGAGAGCFSMRTASGEELNRRAPTGSSENATADADRLTDRTTSTEPYSPSTISYTPSISSSPLSNRDSPTPTLDVAREASAFLPTSTKAGKPRVRMKWSKEVNLFIMRTYYYITRLETDLTTYRKQLHELFLRKYPELNVTEQRIADQRRAIVKNNLLNQETLNIIKEEIKSQLETENENQIYINSNVSTNDDIQCSSTHPKPNTRHTSPSNIFTYNTQSTCTFSNNTQTSHMSTQTEFVTIMMDNDIDTVLDHNLGTNTQIEEICDKFRTALTQYSGMDPRVRPKLPKLRYSSHLFQLVNMFNQDILFQFISDDTKLTDIHTIVYCVALVISEELNYKVTENIRSTRPKDCNKPPWQIRLEKDIEKLRADCGRVTQYINNNRSRKIIKHVKRIFETRNTHTKHENRNTKPEEFLDTLKQKLALKVHRLKRYKKAQQRKNDNTMFSTNEKTFYRNLHKPKIDTDTVNSPIMPTQKQLETFWSGIWEQQVHHNDKADWITEEENKWNSIEEMEFTEITETEINNITARLHNWKSPGIDKIHNFWFKKLFSLHKIIGKNFTDIIIGKQKIPDFIVTGITYMLPKSQISPQPSQYRPITCLPTIYKILTSVITTKINKHVEQYNIIAEEQKGCRRGHMGCKEQLIIDSTIHKHATSKNRNLHCTYIDYKKAFDSIPHSWLIKILQIYKINPKIINFLRDIMSRWKTTLYLTANRTNITTREIIIRKGIYQGDSLSPLWFCLALNPLSYLLRGCRAGYCLKYDKQDTIVSHLIYMDDIKLYGKTEMEMQKLIDTTAQFSKDINMEFGLDKCRTLHIKRGKIRPGHYVINDTDIITAMEPTDLYKYLGYKQLKGLDHTEIKNTLTIEFKKRVNALCKTKLTGKHLIKSVNTYAIPILTYSFGIIKWTKTDIEQIERTIRTTLTKHNNLHPKSAIERLTIKREYGGRGLIDLNHLCQKQVGNLKAFFLLKSQTSEIHKAIVQNDFNYTPLNLHEDISSLNTESNDLQTQKLDSWKRKVLHGRHPHDLEQPHINTAASNKWLKIGNLFPETEGFIIAIQDQIVNTKNYRKFIIKDSSIPNDKCRKCHVQPETIQHITGACTTLTQTDYTHRHNQVVNIIHQKLALKHKLIQNTNTPYYKYKPQTVLENDTHKLYFDRAILTDRTIHYNRPDITLQDKLNKITYLIDIAVPNTHNLQKTISEKINKYTELKEEVARIWNQNKVYIIPIALSTTGVIPNHLLHSLKLLELNETLYITLQKAAILNTCRIVRKFLQIDEHEIPHNT

SEQ ID NO: 21039 - protein, 1297 aa, Melitaea cinxia
METRSMKKRKGPLPGGNRRGTPGAGAGCFSMRTASGEELNRRAPTGSTENTTADADRLTDRTTSTEPYSPSTISYTPSIPSSPLSNRDSPTPTLDVAREASAFLPTSTKAGKPRVRMKWSKEVNLFIMRTYYYITRLETDLTTYRKQLHELFLRKYPELNVTEQRIADQRRAIVKNNLLNQETLNTIKEEIKSQLETENENQIYINSNVSTNNDIQCSSTHPKPNTRHTSPSNIFTYNTQSTCTFSNNTQTSHMSTQTEFVTIMMDNDIDTVLDHNLGTNTQIEEICDKFRTALTQYSGMDPRVRPKLPKLRYSSHLFQLVNMFNQDILFQFISDDTKLTDIHTIVYCVALVISEELNYKVTENIRSTRPKDCNKPPWQIRLEKDIEKLRADCGRVTQYINNNRSRKIIKHVKRIFETRNTHTKHENRNTKPEEFLDTLKQKLALKVHRLKRYKKAQQRKNDNTMFSTNEKTFYRNLYKPKIDTDTVNSPIMPTQIQLETFWSGIWEQQVHHNDKADWITEEENKWNSIEEMEFTEITETEINNITARLHNWKSPGVDKIHNFWFKKLFSLHKIIAKNFTDIIIGKQKIPDFIATGITYMLPKSQISPQPSQYRPITCLPTIYKILTSAITTKINKHVEQYNIIAEEQKGCRRGHMGCKEQLIIDSTIHKHATSKNRNLHCTYIDYKKAFDSIPHSWLIKILQIYKINPKIINFLRDIMSRWKTTLYLTANRTNITTREIIIRKGIYQGDSLSPLWFCLALNPLSYLLRGCRAGYCLKYDKQDTIVSHLIYMDDIKLYGKTEMEMQKLIDTTAQFSKDINMEFGLDKCRTLHIKRGKIRPGHYVVNDTNIITAMEPTDLYKYLGYKQLKGLDHTEIKNTLTIEFKKRVNALCKTKLTGKHLIKSINTYAIPILTYSFGIIKWTKTDIEQIERTIRTTLTKHNNLHPKSAIERLTIKREYGGRGLIDLNHLCQKQVGNLKAFFLLKSQTSEIHKAIVQNDFNYTPLNLHEDISSLNTESNDLQTQKLDSWKRKVLHGRHPHDLEQPHINTAASNKWLKIGNLFPETEGFIIAIQDQIVNTKNYRKFIIKDSSIPNDKCRKCHVQPETIQHITGACTTLTQTDYTHRHNQVVNIIHQKLALKHKLIQNTNTPYYKYKPQTVLENDTHKLYFDRAILTDRTIHYNRPDITLQDKLNKKTYLIDIAVPNTHNLQKTISEKINKYTELKEEVARIWNQNKVYIIPIVLSTTGVIPNHLLHSLKLLELNETLYITLQKAAILNTCRIVRKFLQIDEHEIPHNT

SEQ ID NO: 21040 - protein, 1297 aa, Melitaea cinxia
METRSMKKRKGPLPGGNRRGTPGAGAGCFSMRTASGEELNRRAPTGSSENATADADRLTDRTTSTEPYSPSTISYTPSIPSSPLSNRDSPTPTLDVAREASAFLPTSTKAGKPRVRMKWSKEVNLFIMRTYYYITKLETDLTTYRKQLHELFLRKYPELNVTEQRIADQRRAIVKNNLLNQETLNIIKEEIKSQLETENENQIYINSNVSTNDDIQCSSTHPKPNTRHTSPSNMFTYNTQSTCTFSNNTQTSHMSTQTEFVTIMMDNDIDTVLDHNLGTNTQIEEICDKFRTALTQYSGMDPRVRPKLPKLRYSSHLFQLVNMFNQDILFQFISDDTKLTDIHTIVYCVALVISEELNYKVTENIRSTRPKDCNKPPWQIRLENDIEKLRADCGRVTQYINNNRSRKIIKHVKRIFETRNTHTKHENRNTKPEEFLDTLKQKLALKVHRLKRYKKAQQRKNDNTMFSTNEKTFYRNLHKPKIDTDTVNSPIMPTQIQLETFWSGIWEQQVHHNDKADWITEEENKWNSIEEMEFTEITETEINNITARLHNWKSPGIDKIHNFWFKKLFSLHKIIAKNFTDIIIGKQKIPDFIATGITYMLPKSQISPQPSQYRPITCLPTIYKILTSAITTKINKHVEQYNIIAEEQKGCRRGHMGCKEQLIIDSTIHKHATSKNRNLHCTYIDYKKAFDSIPHSWLIKILQIYKINPKIINFLRDIMSRWKTTLYLTANRTNITTREIIIRKGIYQGDSLSPLWFCLALNPLSYLLRGCRAGYCLKYDKQDTIVSHLIYMDDIKLYGKTEMEMQKLIDTTAQFSKDINMEFGLDKCRTLHIKRGKIRPGHYVVNDTDIITAMEPTDLYKYLGYKQLKGLDHTEIKNTLTIEFKKRVNALCKTKLTGKHLIKSINTYAIPILTYSFGIIKWTKTDIEQIERTIRTTLTKHNNLHPKSAIERLTIKREYGGRGLIDLNHLCQKQVGNLKAFFLLKSQTSEIHNAIVQNDFNYTPLNLHEDISSLNTESNDLQTQKLDSWKRKVLHGRHPHDLEQPHINTAASNKWLKIGNLFPETEGFIIAIQDQIVNTKNYRKFIIKDASIPNDKCRKCHVQPETIQHITGACTTLTQTDYTHRHNQVVNIIHQKLALKHKLIHNTNTPYYKYKPQTVLENDTHKLYFDRAILTDRTIHYNRPDITLQDKLNKITYLIDIAVPNTHNLQKTISEKINKYTELKEEVARIWNQNKVYIIPIALSTTGVIPNHLLHSLKLLELNETLYITLQKAAILNTCRIVRKFLQIDEHEIPHNT

SEQ ID NO: 21041 - protein, 1297 aa, Melitaea cinxia
METRSMKKRKGPLPGGNRRGTPGAGAGCFSMRTASGEELNRRAPTGSTENTTADADRLTDRTTSTEPYSPSTISYTPSIPSSPLSNRDSPTPTLDVAREASAFLPTSTKAGKPRVRMKWSKEVNLFIMRTYYYITRLETDLTTYRKQLHELFLRKYPELNVTEQRIADQRRAIVKNNLLNQETLNIIKEEIKSQLETENENQIYINSNVSTNNDIQCSSTHPKPNTRHTSPSNIFTYNTQSTCTFSNNTQTSHMSTQTEFVTIMMDNDIDTVLDHNLGTNTQIEEICDKFRTALTQYSGMDPRVRPKLPKLRYSSHLFQLVNMFNQDILFQFISDDTKLTDIHTIVYCVALVISEELNYKVTENIRSTRPKDCNKPPWQIRLEKDIEKLRADCGRVTQYINNNRSRKIIKHVKRIFETRNTHTKHENRNTKPEEFLDTLKQKLALKVHRLKRYKKAQQRKNDNTMFSTNEKTFYRNLYKPKIDTDTVNSPIMPTQIQLETFWSGIWEQQVHHNDKADWITEEENKWNSIEEMEFTEITETEINNITARLHNWKSPGVDKIHNFWFKKLFSLHKIIAKNFTDIIIGKQKIPDFIATGITYMLPKSQISPQPSQYRPITCLPTIYKILTSAITTKINKHVEQYNIIAEEQKGCRRGHMGCKEQLIIDSTIHKHATSKNRNLHCTYIDYKKAFDSIPHSWLIKILQIYKINPKIINFLRDIMSRWKTTLYLTANRTNITTREIIIRKGIYQGDSLSPLWFCLALNPLSYLLRGCRAGYCLKYDKQDTIVSHLIYMDDIKLYGKTEMEMQKLIDTTAQFSKDINMEFGLDKCRTLHIKRGKIRPGHYVVNDTNIITAMEPTDLYKYLGYKQLKGLDHTEIKNTLTIEFKKRVNALCKTKLTGKHLIKSINTYAIPILTYSFGIIKWTKTDIEQIERTIRTTLTKHNNLHPKSAIERLTIKREYGGRGLIDLNHLCQKQVGNLKAFFLLKSQTSEIHKAIVQNDFNYTPLNLHEDISSLNTESNDLQTQKLDSWKRKVLHGRHPHDLEQPHINTAASNKWLKIGNLFPETEGFIIAIQDQIVNTKNYRKFIIKDSSIPNDKCRKCHVQPETIQHITGACTTLTQTDYTHRHNQVVNIIHQKLALKHKLIQNTNTPYYKYKPQTVLENDTHKLYFDRAILTDRTIHYNRPDITLQDKLNKKTYLIDIAVPNTHNLQKTISEKINKYTELKEEVARIWNQNKVYIIPIVLSTTGVIPNHLLHSLKLLELNETLYITLQKAAILNTCRIVRKFLQIDEHEIPHNT

SEQ ID NO: 21042 - protein, 1187 aa, Blastobasis lacticolella
MRRSLRIKTKNSAQVAPAAENIATNATRSSSPISSTDSLFHSPYSSPNPFESLLSSRASTVSPVSMDTEHEMRVLLPASDVAREANAFLPASSKAGKPRVRMKWSEDVNIFIMRTYYHITKLETDFTTYRKTLHELFSLQYPEITVSEQRVSDQRRMIVKNKYLSQETLDTIKYEIGRQFQTNSEVTRNGNNESIFIESEPMLEPQTQTTHLHNNTDSSQIYTYTNTLTPNITSQAEVITTQIELVETFSDTTIEQINYKLKTKLLEYSEIDPIERPYLPKLKYTKQLTYLVKIFNEHILPRYVSQDSQLNDVHTLIYCTALVIAEELNYKIIQNNEYTRRKDSNKPAWQIRLQKDIEKLRADIGRLTQYINNNRSQRLVRKVQEIFKNNTKHSTHEKDNVNADEYLDTLKQKLALKTHRLKRYNKAQKRKDDNIKFKTNEKLFYRNLCNSQAGSNTNDNHSEMPTKEMLENYWSGIWEEKAQHYDKAEWINEETAKWSGIEEMEFQEVSEDDIANITLRLHNWKAPGIDKIHNYWYKKLTSLHKCIAKNITDIILGKQNIPQFITMGITYMLPKTKNCIQPSQYRPITCLPTIYKILTSAITSKITSHIEYNQILAEEQKGCRRGHMGCKEQLIIDSTIHKHANAKNRNLHCTYIDYKKAFDSIPHTWLIQILQIYKVNPAIVEFLRNIMTFWKTTLHLKQGSKSISTRQINIEKGIYQGDSLSPLWFCLALNPLSNLLHNCRAGYRLKHTAGETAISHLIYMDDIKLYARTEIEMKRLVETTAKFSNDINMQFGLDKCRTLHIKKGKIHAGDYLIDDNHIITAMEATDVYKYLGYNQLKGLQHTEIKQSLITEYKRRLSAICKSQLSGKHLTKAINTYAIPILTYSFGVIKWSKTDIEQTGRITRATLTRNNHLHPKSAVERLIIKRQSGGRGVIDIHHLWQKQINGLKKFFSNKSQTSNIHLAITQNDKNLTPLNLIDNTHQPTSVNVQEQKIEEWKNKVLHGRHPHDLEQPHIDKIASNKWLKVGNLFPETEGFMIAIQDQVINIKNYRKYIIKDPNTINDQCRRCRTHSETIQHITGACTNLTQTDYTHRHNQVANIIHQKLAIKHQLIENSNTPYYKYTPQVILENASYKLYYDRAILTDRTIHYNRPDITLQDKQKKITYLIDIAVPNTHNNRYNSQPET

SEQ ID NO: 21043 - protein, 1230 aa, Hyalothyrus neleus
MSADIEQETKITALLASDVARGANAFLPASTKAGKPRVRMKWTQDVNIFIMRTYYHITKLETDMTTYRKTLHELFSIQYPEIKVSEQRVSDQRRMIIKNRYLSQQILDELKKEVVKQLEEESTNQIFNNDTVQIHTDNHNILESYAQYQTTLTLQQDYTDLAQTCTPISHTATQTESIAILLETDIEIMAEALPSSDIKIQEIYNKLHTTIIQYSGMDPAARPRLPKIKYTKYLNDLVKIFNEHILSHFVTEETQLTDIHTLIYCTALVISQELNYNITQNTAHKYQAKDTTKLPWQIRLERDIEKLRADIGRLTQYINNNRSNKLVKKVQNIFNNMNKHSTHEKNNIKPEEFLDTLKQKLALKTHRLKRYNKTQQRKKDNNQFAINEKVFYRNLHKSKTTIQENNQTETPTKEQLENYWSDIWEEKVRHNDKVDWIERETSKWEVIEEMKFQNITKNDITNVTTKLHNWKSPGVDKIHNYWYKKLTTLHQPLAKNLTEIIAGKQNIPNFMATGITYMLPKSKNSSQPSQYRPITCLPTIYKILTSAITSKITAHIEHHNILAEEQKGCRRGHMGCKEQLIIDSVIHKHATSKNRNLHCTYIDYKKAFDSIPHSWLIQILHIYKVNHTIIHFLRNIMTHWKTTLHLNHCNKLISTREINIRKGIYQGDSLSPLWFCLALNPLSNLLRHCGAGYRFNKMVDGTTFSHLVYMDDIKLYSTTDKDMKKLVETTTKFSKDINMEFGLDKCKTLHIIKGKIKPGNYTLNNTDLITAMEPSDVYKYLGYNQSKGMQHTTIKHTLTKEFKRRINAISKTQLSGKHLTKAINTYAIPILTYSFGVVKWSKTDIENIERTTRTTLTKHNHLHPKSAIERLTIKRQDGGRGITDIQHLWQKQIKGLRQFFFIKSTVSNIHNEIRQNDKNFTPLNMIEHTDQQDNIDPHRHNNIDPQKRKIEDWKKKILHGRHPHDLEHKHVDKIASNKWLKIGNLFPETEGFMIAIQDQVVNTKNYRKHIIKDPNITNDKCRRCHKQPETIQHITGACTSLTQTDYTHRHNQVANIIHQKLAMKHKLIQNTNTPYYKYIAHTILENETHKLYYDRAVLTDRTIHYNRPDIILQDKTNKTTYLIDVAVPNTHNVQKTIVEKINKYAELKEEVMRIWKQDKVYVIPIVLSTTGVIPYHIHQSLNLIGLAQSTFIQLQKAAILNTCRIVRKFMQIEENEATPHNISQPTAISL

SEQ ID NO: 21044 - protein, 1029 aa, Codatractus alcaeus
MYDKLQAALTQFSGMDPTTRPKLPRLKYTKHLNNLVHLFNQHILHRFISKETQLNDIHTLIYCTALVIAEELNFKIIHNTTHIKSKHYNKPSWQTRLERDIEILRADIGRLTQYINNNRSDSLVKKVQHIFHRITKHTKHEANNRKPEEFLDTLKQRLALKTHRLKRYKKTQQRLRDNNQFASNEKLFYRNLCKPKIDVTSRENNTENHTEIPTKEEIEKYWSNIWEENVTHNDKADWIAKEKSKWQEIDEMVFQEITERDIVNITARLHNWKSPGIDRVHNYWYKKLTTLHQPLARALTAIILGKQSIPNFITIGITYMLPKSNNPTQPSQYRPITCLPTIYKILTSAIASKITIHIEQHNVLAEEQKGCRRGHMGCKEQLVIDSVIHKHATLKHRNLHCTYIDYTKAFDSIPHSWLIQILQIYRISPVIIDFLRSIMSHWNTNLHLNQGNKSFISRRINIKKGIYQGDSLSPLWFCLALNPLSNLLHSYQTGYRFNNRPEETTISHLIYMDDIKLYAKTQKDMQDLLDTTTQFSKDINMQFGLDKCKTVHIVKGKIQPGDHVINNTEVISAMEPTDVYKYLGYNQLKGLLHTNIKHTLRKEFRRRMDSICKSHLSGKHLTKAINTYAIPILTYSFGIIKWTKTDIEQLERITRTTLTKHNNLHPKSAVERLTIKRQDGGRGILDINYLWQKQIINLRGFFFMKSSTSNIHSTTTRNDINFTPLNLSDCIDQRITLNTDHTRNNRNHQLQKIENWKNKVLHGRHPHDLNHTHVDKTASNKWLKVGNLFPETEGFMIAIQDQVINTKNYRKHIIKDPNVKNDKCRRCHTQPETIQHITGACTNLTQTDYTHRHNQIANIIHQKLALKHNLIQNTNTPYYKYTPQSVLENTLHKLYYDRAILTDRTIHYNRPDIILQDKLNKVSYLIDIAVPNTHNIQKTIAEKINKYAELKEEVTRIWKQNKVYVVPIVLSTTGVIPYHLHYSLKLISLTHSTYIILQKAALLNTCRIVRKFMQIEENEVGSNNITQQT

SEQ ID NO: 21045 - protein, 1172 aa, Hestina assimilis
MRWSKDVNIFIMRTYYLVTKLETDMTTYRKHLHENFSRQYPDIKVTEQRVSDQRRTIIRNKLLTEEILNRLKEEIKIQIEVNKDNNIDVTPLTHNQIGNNLQSQSQPNTFPQPQQLTQTSQSTLSTSISTQTEFTTLLLENEVDTLVNPVTETNSQEILQKFRTALTKFSGMDPCARPRLPKLKYGFRLSQLIQLFNQHILPQFITPDIQLIDLHTITYCTAVVIIEEFNYKIIQNHIPQSKNDKPPWQIRLEKDIEKLRADCGRLTQYINNNRSNKVVKRVEEIFKSRITHTRHENNNRTPEEFLDTLKQKLALKVHRLRRYKKAHQRKHENTLFSSNEKIFYRNLGKSSNKTHSTQNTDLPTKTQLETFWSNIWEQQVKHNDKAEWITKEETKWSTIEEMEFDKISESDITSITNRLHNWKSPGIDKVHNFWYKKLTSLHNPIAQTLTKIILGHHNIPEFIATGLTYMIPKTSQTLQPSQYRPITCLPTIYKILTAAISRKITSHIEHNKIIAEEQKGCRRAHMGCKEQLIIDSTIHKHAISKNKNLHCTYIDYQKAFDSIPHTWLLRILQIYKINPKITSFLRNIMPFWKTTLKLNNCSENISTRQLLIRKGIYQGDSLSPLWFCLAMNPLSHLLHNCRAGFSLKNGTEETVISHLIYMDDIKLYSKSEKEMKKLIETTAQFSKDINMQFGLDKCKTLHIIRGKVRPGDYAVDDNSTISAMEPNDLYKYLGYKQLKGLDHTTIKHTLNTEYIKRTNAICKTQLSGKHLIKALNTYAIPILTYSFGIIKWSKTDIEQIERTTRTTLTKHNHLHPKSAIERLTIKRQNGGRGLIDIYQLWLKQIHTLRSFFHTKSLTSSIHKAITQTDSNYTPLNLKEHTNTQNHNSFNSQTQKIDDWKKKVLHGRHPHDLEQPHIDSIASNKWLQIGSLFPETEGFIIAIQDQIIKTKNYRKYIVKDPSFTNDKCRKCHTQSETIQHITGACKNLAQTDYTYRHNQISNIIHQNLALKFKLIQNTNTPYYKHSPQTILENATHKLYYDRAILTDKTIHYNRPDITLQDKINKITYLIDIAVPNTHNLKKTIAEKISKYADLKDEVARIWRQEKVYVVPIVISTTGIIPKHLHHSLKLIDLKESLYITLQKAIILNTCRIVRKFMQIEENPITTPHTANPT

SEQ ID NO: 21046 - protein, 1298 aa, Hestina assimilis
MVMQLRSKRIGPLPGGDRRGAPGADAGCLSMRTVSGEELIRRAPSGSPENTTANLTDNKQTDSDNISLNSVSIAEPFSPSTISYIPTPVSSVDENSREALTPTSSAAQEVNSFLPASTKAGKPRVRMRWSKDVNIFIMRTYYLVTKLETDMTTYRKHLHEHFSRQYPDIKVTEQRVSDQRRTIIRNKLLTEEILNRLKEEIKIQIEVNKDNNIDVTPLTHNQIGNNLQSQSPPNTFPQPQQLTQTSQSILSTSISTQTEFTTLLLENEVDTLVNPVTETNSQEILQKFRTALTKFSGMDPCARPRLPKLKYGFRLSQLIQLFNQHILPQFITPDIQLIDLHTITYCTAVVIIEEFNYKIIQNYIPQSKNDKPPWQIRLEKDIEKLRADCGRLTQYINNNRSNKVVKRVEEIFKSRITHTRHENNNRTPEEFLDTLKQKLALKVHRLRRYKKAHQRKHENTLFSSNEKIFYRNLGKSSNKTHSTQNTDLPTKTQLETFWSNIWEQQVKHNEKAEWITKEETKWSTIEEMEFDKISESDITSITNRLHNWKSPGIDKVHNFWYKKLTSLHNPIAQTLTKIILGHHNIPEFIATGLTYMIPKTSQTSQPSQYRPITCLPTIYKILTAAISRKITSHIEHNKIIAEEQKGCRRAHMGCKEQLIIDSTIHKHAISKNKNLHCTYIDYQKAFDSIPHTWLLRILQIYKINPKITNFLRNIMPFWKTTLKLNNCSENITTRQLLIRKGMYQGDSLSPLWFCLAMNPLSHLLHNCRAGFSLKNGTEETVISHLIYMDDIKLYSKSEKEMKKLIETTTQFSKDINMQFGLDKCKTLHIIRGKVRPGDYAVDDNSTISAMEPNDLYKYLGYKQLKGLDHTTIKHTLNTEYIKRTNAICKTQLSGKHLIKALNTYAIPILTYSFGIIKWSKTDIEQIERTTRTTLTKHNHLHPKSAIERLTIKRQNGGRGLIDIYQLWLKQIHTLRSFFNTKSLTSSIHKAITQTDSNYTPLNLKEHTNTQNHNSFNSQTQKIYDWKKKVLHGRHPHDLEQPHIDSIASNKWLQIGSLFPETEGFIIAIQDQIIKTKNYRKYIVKDPSVTNDKCRKCHTQSETIQHITGACTNLAQTDYTYRHNQISNIIHQNLALKYKLIQNSNTPYYKHSPQTILENTTHKLYYDRAILTDKTIHYNRPDITLQDKINKITYLIDIAVPNTHNLKKTIAEKISKYADLKDEVARIWRQEKVYVVPIVISTTGIIPKHLHHSLKLIDLKESLYITLQKAVILNTCRIVRKFMQIEENPITTPHTANPT

SEQ ID NO: 21047 - protein, 1296 aa, Aeromachus stigmata
METRSKSKRLGPLPGGDRRGTPGADAGCHSMRTVSGEELSRRAPSGSPEYTTAKQTDDNNSLDSSLSTLEPYSPSSASYTPSVVSLTDENSDRAPTPILSVAQEGNTFLPASTKTGKQRLRMTWSKEVNIFIMRSYFYITKLETDMTTYRKQLHEHFSRHYPEIQVTEQRIADQRRTIIKNKRLSQEIINQIKEEVRIQLQEQIDSQDSGNSNAQNTQPNQIQSGIQLTHEAPSVSHISLISLLSPTATPIEEINTVLSENNREIHETNVPTTHSYIQIIRSKFESALAQFSGMDPTTRPKLPKLKYCSKLLQLIHIFNNFILVHFLTNKSQLADIHTFIYCTAAVISQELNYKIKDSTNVIKIKQISRPPWQIRLENDIEKLRADCGRLTQYINNNRSKKVIKKVEEIFKRSNTHTKHENNNKKPEEFLDTLKQKLALKVHRLRRYKKAQKRKDDNTLFSTNEKLFYRKLLRTQNDSLVRNNTDTPTKSHLETFWSSIWEKEVQHNDRADWIKEEQTRWSTIEEMKFDDITEIDIKNITAKLHNWKSPGVDKIHNYWYKKLTVLHKTIAKNFTELMLGNQNIPEFIATGITYMIPKTTIVPQPSQYRPITCLPTIYKILTSVIAAKITTHIEHNRIVAEEQKGCRRGHMGCKEQLIIDSTIHKHATSKNRNLHCTYIDYKKAFDSIPHSWLLQILQIYKINPHIIKFMSGIMNYWKTTLQINSSSNTIKTREIHIKTGIYQGDSLSPLWFCLALNPLSHLLHRSQAGYCLKHISHKTIISHLIYMDDIKLFSQNITQMKKLVNITIEFSKDINMEFGLDKCKAVHIIKGKIQPGDYTIDDNNSITALESTDMYKYLGYHQLKGLHHTTLKQTLMTEYKRRISSICKTQLSGRHTIKAINTYAIPILTYSFGVIKWTKTDIEQLERTTRTTLTKHNYLHPKSAIERLTIKRDSGGRGLIDIHNLWLKQIHNLKTFFHNKAQTSNIHKVITHNDNNFTPLNLYEEQQRDNFIDTDLQTRKNENWKKKTLHGRHPHDLEQSHIDSTASNKWLKVGNLFAETEGFIIAIQDQIINTKNYRKFILKDPSTLNDKCRKCHKQPETIQHITGACITLTQTDYTHRHNQIVNIIHQKLALKHNLIENTNTPYYKYTPSTVLENSTHKLYYDRALLTDKTIHYNRPDITLKDKIKKTTYLIDIAVPNTHNLQKTIAEKINKYTDLKEEITRIWKQDKVYIVPIVLSTTGVIPKHLHHSIKQINLNENIYINLQKAAILNTCRIVRKFMDIEENEIVPHQITSTT

SEQ ID NO: 21048 - protein, 1283 aa, Cecropterus evenus
MRRSVRLKNKHSAQSGTVAEIVSNPPSPTSSTPSLFQSTNSTPLSFEYSRNSISRSSTVSPISVDIEKSQNVTLPASAVARGANPFMPASTKAGKPRIRMKWSQDVNIFIMRTYYHITKLETDMTTYRKTLHELFSIQYPDVNVSEQRVSDQRRMIIKNKYLAQEVLDQLKEEVSRNLQEETRINELNNSNHVQIEVDQYTLESQTSTTLQNNPSLNLPELNAQTFIPTSHSSTYTENITQMKETETITELVASNDSSFRDMYDKLQTAITQYSGMDPTARPKLPRIKNTTHLNDLVNLFNQHLLHRFISKETNLSDIHTLIYCTALVIAEELNYTILHNTTHKKPKDYIKPSWQIRLERNIESLRVDIGRLTQYINNNRSDRLVKKVEHIFNRITKHTKHESNNRKPEEFLDTLKQKLALKTHRLKRYKKTQQRKKDNIQFATNEKVFYRNLSKPKLDLKTKTENDTVIPTKEEFETYWSNIWEKNIKHNDKADWITEEQRKWMVIDEMLFKEITELDITNITARLHNWKAPGVDRIHNYWYKKLTTLHNPLAKALTEIILGKQNIPQFITIGITYMLPKTNNATQPSHYRPITCLPTIYKILTSAITVKINTHIENHNVLAEEQKGCRRGHMGCKEQLVIDSIVHKHATLKHRNLHCTYIDYKKAFDSIPHSWLIQILQIYRVSPIIVDFLRNIMPLWKTTLHLNQGHKSITTRQIYINKGIYQGDSLSPLWFCLALNPLSNLLHKCEIGYRLNNSIQEFRICHLIYMDDIKLYADTHKSMQKLLDKTTQFSKDIGMQFGLDKCKTLHIIKGKVQSGDYRVNNTDVISAMEPTDVYKYLGYNQLKGLLHTNIKYTLTTEYKRRIDAICKTHLSGKHLTKAINTYAIPILTYSFGIIKWTKTGIEQLERITRTTLTKHNYLHPKSAVERLNIKRQDGGRGVIDINYLWQKQINNLRHFFFMKSTTSNIHSAITHIDENFTPLNLSDHTNQHTLNNRTPQVQKIENWKNKVLHGRHPHYLEQTYVDKIASNKWLKVGNLFPETEGFMIAIQDQVINTKNYRKHIIKDPNVKNDICRRCHTQPETIQHITGACTNLTQTDYTHRHNQIANIIHQNLALKHNLIQNTNTTYYKYIPQTVIENTSHKIYYDRAVLTDRTIHYNRPDIILQDKLNKITYLIDIAVPNTHNIQKTIVEKINKYVDLKEEVTRIWKQNKVYVVPIVLSTTGVIPYHLHQSLKLIGLKHSLYIPLQKAAILNTCRIVRKFMQIDEKEVGSHNLTQSIVPP

SEQ ID NO: 21049 - protein, 1298 aa, Mellicta athalia
METRSMKRRIGPLPGGDRRGTPGAGAGCLSMRTVSGEELNRRAPTGSSENATADTDRLTDRTTPTEPYSPSTISYTPSIPSSPLSNRDSLTPTLDVAREANAFLPTSTKAGKPRVRMKWSKEVNLFIMRTYYYITKLETDLTTYRKQLHELFLRKYPELNVTEQRIADQRRAIVKNNLLNQETLNIIKEEIKSKLETENENHIHINSSVSTNDVIQCSSTQPKPDARHTTPSNTFTYNTQSLCTFSNNTQTSHMSTQTEFVTIMIDSDIDTVLDHNISTNTQIEEICDKFKTALTQYSGMDPIVRPKLPKLRYSSYLFQLVHMFNRDILHRFISDDTKLTDIHTIVYCVALVISEELNYKVTEYIRSTKPKESNKPPWQIRLEKDIEKLRADCGRLTQYINNNRSHKIIKHVKAIFETRNTHTKHENSNTKPEEFLDTLKQKLALKVHRLKRYKKAQQRKNDNIMFSTNEKTFYRNLHKPKIDTDTVNNPIMPTQKQLETLWSDIWEQQVHHNDKADWIMEEENKWNAIEEMEFTEITETDISNITARLHNWKSPGIDKIHNFWYKKLFSLHKIMAKNFTDIIIGKQKIPDFIATGITYMLPKLQISPQPSQYRPITCLPTIYKILTSVITTKINKHVEQYNIIAEEQKGCRRGHMGCKEQLIIDSTIHKHATSKNRNLHCTYIDYKKAFDSIPHSWLIKILQIYKINSKIINFLRDIMSKWKTTLHLTANRTNITTREIVIRKGIYQGDSLSPLWFCLALNPLSHLLRGCRAGYCLKYDIQNTIVSHLIYMDDIKLYGKTEMEMKKLIDTTAKFSKDINMEFGLDKCRTLHIKRGKIWPGHYTVNDTDIITALEPSEFYKYLGYKQLRGLDHTEIKNTLTIEFKKRINALCKTQLTGKHLIKSLNTYAIPILTYSFGIIKWTKTDIEQIERTIRTTLTKHNNLHPKSAIERLTIKREYGGRGLIDLNHLCQKQVGNLKAFFHLKSQTSEIHKAIVQNDLNYTPLNLHEDITSQNTQSSDPQIQKLDSWKRKVLHGRHPHDLEKPHINTAASNKWLKIGNLFPETEGFIIAIQDQIVNTKNYRKFIIKDPSISNDKCRKCHVQPETIQHITGACTTLTQTDYTHRHNQVVNIIHQKLALKHKLIQNTNTPYYKYKPQTVLENDTHKLYFDRAILTDRTIHCNRPDITLLDKLNKITYLIDIAVPNTHNLQKTISEKINKYTELKDEVARIWNQNKVYIIPIVLSTTGVIPNHLLHSLKALKLNENLYITLQKAAILNTCRIVRKFLQIDENEIPHNAS

SEQ ID NO: 21050 - protein, 1298 aa, Mellicta athalia
METRSMKRRIGPLPGGDRRGTPGAGAGCLSMRTVSGEELNRRAPTGSSENATADTDRLTDRTTPTEPYSPSTISYTPSIPSSPLSNRDSLTPTLDVAREANAFLPTSTKAGKPRVRMKWSKEVNLFIMRTYYYITKLETDLTTYRKQLHELFLRKYPELNVTEQRIADQRRAIVKNNLLNQETLNIIKEEIKSKLETENENHIHINSSVSTNDVIQCSSTQPKPDARHTTPSNTFTYNTQSLCTFSNNTQTSHMSTQTEFVTIMIDSDIDTVLDHNISTNTQIEEICDKFKTALTQYSGMDPIVRPKLPKLRYSSYLFQLVHMFNRDILHRFISDDTKLTDIHTIVYCVALVISEELNYKVTEYIRSTKPKESNKPPWQIRLEKDIEKLRADCGRLTQYINNNRSHKIIKHVKAIFETRNTHTKHENSNTKPEEFLDTLKQKLALKVHRLKRYKKAQQRKNDNIMFSTNEKTFYRNLHKPKIDTDTVNNPIMPTQKQLETFWSDIWEQQVHHNDKADWIMEEENKWNAIEEMEFTEITETDISNITARLHNWKSPGIDKIHNFWYKKLFSLHKIMAKNFTDIIIGKQKIPDFIATGITYMLPKLQISPQPSQYRPITCLPTIYKILTSVITTKINKHVEQYNIIAEEQKGCRRGHMGCKEQLIIDSTINKHATSKNRNLHCTYIDYKKAFDSIPHSWLIKILQIYKINSKIINFLRDIMSKWKTTLHLTANRTNITTREIVIRKGIYQGDSLSPLWFCLALNPLSHLLRGCRAGYCLKYDIQNTIVSHLIYMDDIKLYGKTEMEMKKLIDTTAKFSKDINMEFGLDKCKTLHIKRGKIWPGHYTVNDTDIITALEPSEFYKYLGYKQLRGLDHTEIKNTLTIEFKKRINALCKTQLTGKHLIKSLNTYAIPILTYSFGIIKWTKTDIEQIERTIRTTLTKHNNLHPKSAIERLTIKREYGGRGLIDLNHLCQKQVGNLKAFFHLKSQTSEIHKAIVQNDLNYTPLNLHEDITSQNTQSSDPQIQKLDSWKRKVLHGRHPHDLEQPHINTAASNKWLKIGNLFPETEGFIIAIQDQIVNTKNYRKFIIKDPSISNDKCRKCHVQPETIQHITGACTTLTQTDYTHRHNQVVNIIHQKLALKHKLIQNTNTPYYKYKPQTVLENDTHKLYFDRAILTDRTIHCNRPDITLLDKLNKITYLIDIAVPNTHNLQKTISEKINKYTELKDEVARIWNQNKVYIIPIVLSTTGVIPNHLLHSLKALKLNENLYITLQKAAILNTCRIVRKFLQIDENEIPHNAS

SEQ ID NO: 21051 - protein, 1180 aa, Leptidea sinapis
MKWSKEMNLFIMRTYYYITKLETDLTTYRKQLHELFLQKYPDLNVTEQRIADQRRVIVKNKLLNQETLNQIKEEIKSQLEIENENQFHINISEPTNDVIPCSSTQTIPNTQHNQSLNTFTYNIQSLQTFSYITQTSHNMPTQTEFVTIMMENDIDTVLDHNPGTNTEIEEICYKFKTALTQYSGMDPLVRPKLPKLRYNSHLFQLVNMFNSDILSRFISDDTKLTDIHTIVYCVALVISEELNYKVTEYIRSTRPKDCYKPPWQIRLEKDIEKLRADCGRLTQYINNNRSRKIIKHVKVIFKTGNTHTKHENSNIKPEEFLDTLKQKLALKVHRLKRYKKAQERKNDNTMFSTNEKNFYRNLHKLKTDTVNNPNVPTQEQLETFWSGIWEEQVHHNDKADWIIEEENKWNAIEEMDFTEITETDINNITARLHNWKSPGIDKIHNFWYKKLFSLHKIMAKNITDIIIGKQKIPDFIATGITYMLPKLQISPLPSQYRPITCLPTIYKILTSAITTKINKHVEHYNIIAEEQKGCRRGHMGCKEQLIIDSTIHKHATSKNRNLHCTYIDYKKAFDSIPHSWLIKILQIYKINPKIINFLHDIMSRWKTTLYLNTNQNTITTREIAIRKGIYQGDSLSPLWFCLALNPLSHLLRDCRAGYRLKHDIQETIVSHLIYMDDIKLYGKTEMEMKKLIDTTAQFSKDINMEFGLDKCRTLHVKRGKIRPGDYAVNDIDIIRAMEQTELYKYLGYKQLRGLDHTEIKNTLTIEFKKRINALCKTQLTSKHLIKSLNTYAIPILTYSFGIIKWTKTDIEQIERTIRTTLTKHNNLHPKSAIERLTIKREYGGRGLIDLNHLCQKQVGNLKDFFHLKSQTSEIHKAIVKNDVNFTPLNLHEDISSQNTRRNDPQIQKLDSWKRKVLHGRHPHDLEQSHINTAASNKWLKIGNLFPETEGFIIAIQDQVVNTKNYRKFIIKDPSISNDKCRKCHVQPETIQHITGGCTTLTQTDYTHRHNQVVNIIHQKLALKHKLIQNTNTPYYKYKPQTVLENDTYKLYFDRAILTDRTIHYNRPDITLKDKLNEITYLIDIAVPNTHNLQKTISEKINKYTELKDEVARIWNQKKVYVIPIVLSTTGVIPNHLLHSLKLLELKETLYITLQKVAILNTCRIVRKFLQIDEHDISPYT

SEQ ID NO: 21052 - protein, 1297 aa, Leptidea sinapis
METRSMKKRKIGPLPGGDRRGTPGAGAGCPSMRTVSGEELNRRAPTGSSENTTAENDRLTDRTTPTEPYSPCTISYTPSIPSSPLSSRYSPTPTLDAAREANAFLLASTKAGKPRVRMKWSKEMNLFIMRTYYYITKLETDLTTYRKQLHELFLQKYPDLNVTEQRIADQRRVIVKNKLLNQETLNQIKEEIKSQLEIENENQFHINISEPTNDVIPCSSTQTIPNTQHNQSLNTFTYNIQSLQTFSYITQTSHNMPTQTEFVTIMMENDIDTVLDHNPGTNTEIEEICYKFKTALTQYSGMDPLVRPKLPKLRYNSHLFQLVNMFNSDILYRFISDDTKLTDIHTIVYCVALVISEELNYKVTEYIRSTRPKDCYKPPWQIRLEKDIEKLRADCGRLTQYINNNRSRKIIKHVKAIFKTGNTHTKHENSNIKPEEFLDTLKQKLALKVHRLKRYKKAQERKNDNTMFSTNEKNFYRNLHKLKTDTVNNPNVPTQEQLETFWSGIWEQQVHHNDKADWIIEEENKWNAIEEMDFTEITETDINNITARLHNWKSPGIDKIHNFWYKKLFSLHKIMAKNITDIIIGKQKIPDFIATGITYMLPKLQISPLPSQYRPITCLPTIYKILTSAITTKINKHVEHYNIIAEEQKGCRRGHMGCKEQLIIDSTIHKHATSKNRNLHCTYIDYKKAFDSIPHSWLIKILQIYKINPKIINFLHDIMSRWKTTLYLNTNQNTITTREIAIRKGIYQGDSLSPLWFCLALNPLSHLLRDCRAGYRLKHDIQETIVSHLIYMDDIKLYGKTEMEMKKLIDTTAQFSKDINMEFGLDKCRTLHIKRGKIRPGDYAVNDIDIIRAMEQTELYKYLGYKQLRGLDHTEIKNTLTIEFKKRINALCKTQLTSKHLIKSLNTYAIPILTYSFGIIKWTKTDIEQIERTIRTTLTKHNNLHPKSAIERLTIKREYGGRGLIDLNHLCQKQVGNLKDFFHLKSQTSEIHKAIVKNDINFTPLNLHEDISSQNTRRNDPQIQKLDSWKRKVLHGRHPHDLEQSHINTAASNKWLKIGNLFPETEGFIIAIQDQVVNTKNYRKFIIKDPSISNDKCRKCHVQPETIQHITGGCTTLTQTDYTHRHNQVVNIIHQKLALKHKLIQNTNTPYYKYKPQTVLENDTYKLYFDRAILTDRTIHYNRPDITLKDKLNEITYLIDIAVPNTHNLQKTISEKINKYTELKDEVARIWNQKKVYVIPIVLSTTGVIPNHLLHSLKLLELKETLYITLQKVAILNTCRIVRKFLQIDEHDISPYT

SEQ ID NO: 21053 - protein, 1297 aa, Leptidea sinapis
METRSMKKRKIGPLPGGDRRGTPGAGAGCPSMRTVSGEELNRRAPTGSSENTTAENDRLTDRTTPTEPYSPCTISYTPSIPSSPLSSRYSPTPTLDAAREANAFLLASTKAGKPRVRMKWSKEMNLFIMRTYYYITKLETDLTTYRKQLHELFLQKYPDLNVTEQRIADQRRVIVKNKLLNQETLNQIKEEIKSQLEIENENQFHINISEPTNDVIPCSSTQTIPNTQHNQSLNTFTYNIQSLQTFSYITQTSHNMPTQTEFVTIMMENDIDTVLDHNPGTNTEIEEICYKFKTALTQYSGMDPLVRPKLPKLRYNSHLFQLVNMFNSDILYRFISDDTKLTDIHTIVYCVALVISEELNYKVTEYIRSTRPKDCYKPPWQIRLEKDIEKLRADCGRLTQYINNNRSRKIIKHVKAIFKTGNTHTKHENSNIKPEEFLDTLKQKLALKVHRLKRYKKAQERKNDNTMFSTNEKNFYRNLHKLKTDTVNNPNVPTQEQLETFWSGIWEQQVHHNDKADWIIEEENKWNAIEEMDFTEITETDINNITARLHNWKSPGIDKIHNFWYKKLFSLHKIMAKNITDIIIGKQKIPDFIATGITYMLPKLQISPLPSQYRPITCLPTIYKILTSAITTKINKHVEHYNIIAEEQKGCRRGHMGCKEQLIIDSTIHKHATSKNRNLHCTYIDYKKAFDSIPHSWLIKILQIYKINPKIINFLHDIMSRWKTTLYLNTNQNTITTREIAIRKGIYQGDSLSPLWFCLALNPLSHLLRDCRAGYRLKHDIQETIVSHLIYMDDIKLYGKTEMEMKKLIDTTAQFSKDINMEFGLDKCRTLHIKRGKIRPGDYAVNDIDIIRAMEQTELYKYLGYKQLRGLDHTEIKNTLTIEFKKRINSLCKTQLTSKHLIKSLNTYAIPILTYSFGIIKWTKTDIEQIERTIRTTLTKHNNLHPKSAIERLTIKREYGGRGLIDLNHLCQKQVGNLKDFFHLKSQTSEIHKAIVKNDINFTPLNLHEDISTQNTRRNDPQIQKLDSWKRKVLHGRHPHDLEQSHINTAASNKWLKIGNLFPETEGFIIAIQDQVVNTKNYRKFIIKDPSISNDKCRKCHVQPETIQHITGGCTTLTQTDYTHRHNQVVNIIHQKLALKHKLIQNTNTPYYKYKPQTVLENDTYKLYFDRAILTDRTIHYNRPDITLKDKLNEITYLIDIAVPNTHNLQKTISEKINKYTELKDEVARIWNQKKVYVIPIVLSTTGVIPNHLLHSLKLLELKETLYITLQKVAILNTCRIVRKFLQIDEHDISPYT

SEQ ID NO: 21054 - protein, 1274 aa, Leptidea sinapis
MKWSKEMNLFIMRTYYYITKLETDLTTYRKQLHELFLQKYPDLNVTEQRIADQRRVIVKNKLLNQETLNQIKEEIKSQLEIENENQFHINISEPTNDVITCSSTQTIPNTQHNQSLNTFTYNIQSLQTFSYITQTSHNMPTQTEFVTIMMENDIDTVLDHNPGTNTEIEEICYKFKTALTQYSGMDPLVRPKLPKLRYNSHLFQLVNMFNSDILSRFISDDTKLTDIHTIVYCVALVISEELNYKVTEYTDKDCYKPPWQIRLEKDIEKLRADCGRLTQYINNNRSRKIIKHVKAIFKTGNTHTKHENSNIKPEEFLDTLKQKLALKVHRLKRYKKAQERKNDNTMFSTNEKNFYRNLHKLKTDTVNNPNVPTQEQLETFWSGIWEQQVHHNDKADWIIEEENKWNAIEEMDFTEITETDINNITVRLHNWKSPGIDKIHNFWYKKLFSLHKIMAKNITDIIIGKQKIPDFIATGITYMLPKLQISPLPSQYRPITCLPTIYKILTSAITTKINKHVEHYNIIAEEQKGCRRGHMGCKEQLIIDSTIHKHATSKNRNLHCTYIDYKKAFDSIPHSWLIKILQIYKINPKIINFLHDIMSRWKTTLYLNTNQNTITTREIAIRKGIYQGDSLSPLWFCLALNPLSHLLRDCRAGYRLKHDIQETIVSHLIYMDDIKLYGKTEMEMKKLIDTTEKFSKDINMEFGLDKCRTLHIKRGKIRPGDYAVNDIDIIRAMEQTELYKYLGYKQLRGLDHTEIKNTLTIEFKKLINALCKTQLTSKHLIKSLNTYAIPILTYSFGIIKWTKTDIEQIERTIRTTLTKHNNLHPKSAIERLTIKREYGGRGLIDLNHLCQKQVGNLKDFFHLKSQTSEIHKAIVKNDINFTPLNLHEDISSQNTRRNDPQIQKLDTWKRKVLHGRHPHDLEQSHINTAASNKWLKIGNLFPETEGFIIAIQDQVVNTKNYRKFIIKDPSISNDKCRKCHVQPETIQHITGGCTTLTQTDYTHRHNQVVNIIHQKLALKHKLIQNTNTPYYKYKPQTVLENDTYKRYFDRAILTDRTIHYNRPDITLKDKLNEITYLIDIAVPNTHNLQKTISEKINKYTELKDEVARIWNQKKVIIIIIIIIIIIIIIIIIIIIIIIIIIIIIIIIIIIIIIIIIIIIIIIIIIIIIIIIIIIIIIIIIIIIIIIIIIIIIIIIIIIIIIIIIIIIIIIIIIIIIIIIIIIIIIIIIIIIIIIIIIIIIIIIIIIIIIIIIIIIIIIIIIIINYNLIAVGPTY

SEQ ID NO: 21055 - protein, 1304 aa, Apodemia nais
METRSKKKRIGPLPGGDRRGTSGADAGCDSIRTVSGDEYRQAHSGSPEDATASLTENQQTDIDSISLNSFSPLVEHFSPSTASYVPTPVSVVDEHSRETLSPCPALAVARVANAFLPASTKAGKPRMRMKWSQDVNQFIMRTYYYITKLETDMTIYRKKLHEYFSLQYPDVNVSEQRVSDQKRAIERNKLLSTATLEKLKDEVRKQLQEEETRNNDSEHTELQTTEQPTHLYTPTQSLAHTHQITLSPYTSTANSQTSHSSTQTEVVTVLIENDIDTLKNTDLVNDTYIQEVTGKLRSTLTLYSGMDPMVRPKLPKLKYSQKLFELIDLFNQNILNEFISPDTQLKDIHTLTYCTALVISEELNYKITDNLGTTRGKNTYKPAWQLRLEKDIEKLRVDIGKLTQYINNNRSTKVVKRVEIIFRNTTIHTRHENNNKKPEEYLDTLKQKLALKVHRLKRYKKAEQRKKDNITFATNEKLFYRNLGKQETVTHENNTQIPTKQQTEEYWAGIWEDQVPHKESADWITEEEKRWNAIEEMEFEQISEDEIRNITTKLHNWKSPGSDKVHNFWFKKLIILHSPLAKIFTEIIRGQQNIPGFIAAGITYMLPKSNNPTQSSQYRPITCLPTIYKLLTSVIAKRINIHIEQNNILAEEQKGCRRGHMGCKEQLIMDSTIVKHATSNHRNLHCTYIDYKKAFDSIPHSWLIKILEIYKINPYIVNCLRNIMTLWKTTLHLHNRNTDIITREIAIKKGIFQGDSLSPLWFCLALNPLSYRLHSDRAGYRLKYSNNEKVISHLIYMDDIKLYAKNDKEMKQLIKTTTDFSTDINMQFGLDKCKAVHIIKGKIRPGDYAIDDNNNITAMEPNEVYKYLGFQQLKGLDHTNIKQSLTLEYKRRINAICKSQLSAKHLIKAINTYAIPILTYSFGIIKWTKTDLEQTERTTRTLLTKHNKLHPKSAIERLTIRRQDGGRGLIDVQHLWHNQVYSLKSFFHTKSQTSNLHKAIVQNDINYTPLNLEQELSQENPRNIDPQKKKLEDWKKKVLHGRHPYDLNQSHIDTKASNMWLKNGTLFPETEGFIIAIQDQVINTKNYRKYIIKDPTVINDKCRKCQLQPETIQHITGACTNLTQTDYTHRHNQIANIIHQKLAHKHKLIQDTNTPYYKYTPQTVLENTTHKLYYDRAILTDRTIHFNRPDITLQDKINKTTYLIDIAVPNTHNLQKTIAEKINKYTELKEEVIRIWNQEKVYIVPIIISTTGVVPNNIRNSLKLIDLKPNILTTIQKAAILNTCRIVRKFMQLEETDRILPHTL

SEQ ID NO: 21056 - protein, 869 aa, Apodemia multiplaga
MDPMARPKLPKLKYSQKLFEIIDLFNQNILNAFISLDTQLKDIHTLTYCTALVISEELNYNITNNLKTTRGKNEYKPAWQHRLEKDIEKIRVDIGKLTQYINNNRSKKVVKRVEEIFNNTTIHTKHENDNRKPEEYLDTLKQKLALKVHRLKRYKKSEQRKKDNTTFATNEKLFYRNLVKRDTIPPVNNTQVPTKQQMEEYWAGIWENQTLHKESAGWITEEERRWNAIEEMKFEQISEDEIRNITTKLHNWKSPGLDKVHNFWFKKLIILHRPLARIFSEIIQGQQNIPEFIAAGITYMLPKSNNPTQPSQYRPITCLPTIYKLLTSVITKRINTHIEQNNILAEEQKGCRRGHMGCKEQLIIDSTIVKHATSNQRNLHCTYIDYKKAFDSIPHSWLIKILEIYKINPKIVNCLRNITTLWKTTLHLHNRNSDIISREIAIKKGIYQGDSLSPLWFCLALNPLSYRLHSDRAGYRLKYSNNEKIISHLIYMDDIKLYAKSDKEMKQLIETTTDFSTDINMHFGLEKCKAVHIIKGKIRPGDYAIDDTNNITAMESNDVYKYLGFQQLKGLDHINIKQTLTLEYKRRINEICKSQLSAKHLIKAINTYAIPILTYSFGIIKWTKTDLEQTERTTRTLLTKHNNLHPKSAIERLTIKRQDGGRGLIDVKHLWHKQVYNLKSFFHNKSQTSDLHKAIVQNDKNYTPLNLEQDPSQENSQSTDPQKKKLEDWKKKTLHGRHPHDLSQPHIDTKASNMWLKIGNLFPETEGFIIAIQDQVINTKNYRKYIIKDPTVTNDKCRKCQSQSETIQHITGACTNLTQTDYTHRHNQIANIIHQKLAEKHKLIQNTNTPYYKYAPQSVLENITHKQNI

SEQ ID NO: 21057 - protein, 1301 aa, Apodemia walkeri
METRSKRKRIGPLPGGDRRGTSGADAGCDSIRTVSGDEYRQARSGSPEDATASLTENRLTDIDNISLNSFSSLLEPFSPSTISYIPTPVSVVEEHSQETPRPSPTLAVARVANAFLPASTKAGKPRMRMKWSQDVNLFIMRTYYYITKLETDMTTYRKKLHELFSLQYPDVNVSEQRVSDQKRAIERNKLLSTAILEKLKDEVRNHLQVEEIRNNNNEHTELQSSEQPTHLYTQIRSQAHTQQITLSPYTSVANTQTSHSSTQTETLTVLIENDIDTLINIHFVNDTYIQDVAEKLRSKLTLYSGMDPMFRPKLPKLKYGQKLFKLIDLFNQNILNEYISPNTQLKDIHTLTYCTALVISEELNHKITDNLRTTRVKDKPKPAWQHRLEKDVEKLRVDIGKLTQYINNNRSTKVVKRVEKIFRNITIHTRHENNNRKPEEYLDTLKQKLALKVHRLKRYKKSEQRKKDNATFSTNEKLFYRNLNKQETVTHENNTQIPTKQQLEEYWAGIWEDQVPHKECASWITEEENRWNAIEEMEFEQVSEDEISKIAAKLHNWKSPGLDKIHNFWFKKLTILHNPLAKIFSEIIQCQQNIPEFIATGITYMLPKSNNPTQPSQYRPITCLPTIYKLLTSVLAKRIGTHIERNNILAEEQKGCRRGHMGCKEQLIIDSTIVKHATSNHRNLHCTYIDYKKAFDSIPHSWLIKILKIYKINPKIVNCLQNIMKLWKTTLHLHNRSTDIITREIAIKKGIYQGDSLSPLWFCLALNPLSYRLHSDRAGYRLKHSNNETIISHLIYMDDIKLYAKNDKEMKQLIKTTTDFSTDINMQFGLDKCKTVHIIKGKIRPGDYAIDENKNITAMEVNEVYKYLGFQQLKGLDHANIKQSLTLEYKRRIIAICKTQLSAKHLIKAINTYAIPILTYSFGIIKWTKTDLEQTERTTRTLLTKHHNLHPKSAIERLTIRRQDGGRGLIDLQHLWQKQIYSLKSFFRAKSETSVLHKAIIQNDRNYTPLYLEQDPSQDNPWNIDPQKKKLEDWKKKVLHGRHPHDLNQPHIDTKASNMWLKTGSLFPETEGFIIAIQDQVINTKNYRKYIIKDPTVTNDKCRKCQSQPETIQHITGACTNLAQTDYTHRHNQIANIIHQALAHKHKLIQDTNTPYYKYTPQTVLENTTHKLYYDRAILTDRTIHFNRPDITLQDKINKTTYLIDIAIPNTHNLQKTISEKINKYTELKEEVIRIWKQEKAYIVPIVISTTGVVPNNIHNSLNLIDLKPYILSIIQKAAILNTCRIVRKFMQLEETDRTLL

SEQ ID NO: 21058 - protein, 1305 aa, Calephelis perditalis
METRSKKKRKGPLPGGDRRGTSGADAGCDSIRTVSGVEYGQARSGSPEDATAFLTEDRQTDVDNDIFHSLSPLVEPFSPSTASYAPTPVSVVDENSRETPSPSPTLAVARVANAFLPTSTKAGKPRLRMKWSQDVNLFIMRTYYYVTKLETDLTIYRKKLHERFSLQYPDVNVSEQRVSDQKRTIERNKLLSTDILEKLKEEVRLQLQEDEIRNNDSGRVEVQTPEQLTNYYTPNTSIPHSHHITPSPYTSINNTQTSHTSTQTDSLTLLIENDIDTLININPINDVYTQEMIDKLRITLTLYSGMDPMVRPKLPKLKYSQKLIKLVDLFNTKILNEFISPDLQLKDIHTLIYGTALVISEELNYKITNDTEARQHKGDYKPAWQHRLEKDIEKLRVDIGQLTQYINNNRSRKVVKRVETIFRNTATHTRHENNNRKPEEYLDTLKQKLALKANRLKRYKKSEQRKKDNSTFATNEKLFYRRLGNQKSDTHINNQETPTKEQIEQYWGGIWGEQTPHKDNAGWIAEEEQRWNTIEEMEFEHISVDEIRNITAKLHNWKSPGLDKIHNFWYKKLTIVHNTLAKIISEIILGKQNIPEFIAKGITYMLPKTNSSTQPSQYRPITCLPTIYKILTSAIAKRINIHIEHNNILAEEQKGCRRGHMGCKEQLVIDSTIVKHATSNHRNLHCTYIDYKKAFDSIPHSWLIKILEIYKVNHAIVTFLRNIMEMWKTKLHLYNRDTSITTREIAIKKGIYQGDSLSPLWFCLALNPLSYRLHSARAGYKLKYDNSETTISHLIYMDDIKLYARNDKEMKKLIKTTSDFSTDINMDFGLDKCKTIHIIKGKIRPGDYAIDDSSSITAMEQNELYKYLGFQQLKGLDHTHIKQTLTTEYKRRTNNICKTQLSGKYLIKAINTYAIPILTYSFGIIKWTKTDLEQIERTTRTQLTKHNDLHPKSAIERLTIKRQDGGRGLTDVQHLWQKQIYSLKSFFHRKSQTSDMHRAIVQNDRNYTPLNLEQDLPPENPRNVDPQNKKMEDWKKKTLHGRHPHDLNQPHIDKKASNMWLKTGSLFPETEGFMIAIQDQVINTRNYRKYIIKDPTITNDKCRRCHSQPETIQHITGACTNLTQTDYTHRHNQIVNIIHQRLALKHKLIQDTNTPYYKYTPQTVLENTTHKLYYDRAILTDRTIHYNRPDITLQDKINKSTYLIDVAVPNTHNLQKTITEKISKYTELKEEVIRIWKQDKVYIVPIVISTTGVIPINIHNSLTLIDLEPYILTIIQKAAILNTCRIVRKFMQLEESESPTPHHTL

SEQ ID NO: 21059 - protein, 1273 aa, Celaenorrhinus aurivittatus
MRLRSANKLPQAGTGANSNGESRPETQRSGCPTYSGGDIVSQTSAQLNTVADTNTHTIHSHSPTHTDDNISLNTSLSINEPYSPSTASYIPSPVSSADQNARETPNPSLSVAQEGSAFLPASTKAGKRRVRMSWSKDVNIFIMRTYYYITKLEKDMTTYRKKLLEIFTSQYPNINVSEQRISDQRRTIIRNKLLSEEILIQLKEEVRKQLEEEINNEPTTHVHGSAYITSNCEINSQSRLTHLILTQAQTHSQKHTQKSHASTQTESEVLIMENDVEILVDHNDINETYTQKIYQKLKTALIKYSGMDPSVRQKLPKLNYNPKLSKLIHIFNHNILHQFLSDNTQLTDIHTLIYCTAVVIAEELDYKITNNMDFIRPKNSQKPSWQVRLEKDIEKLRADCGRLTQYINNNRSNKVIRRVEEIFKNSIRHSMHENNNKKPEEFLDTLKQKLALKVHRLRRYKKAQQRKKDNIMFSTNEKKFYRNLLKPDTNESIDPPTSSQLETFWSGIWEEQIHHNDKASWITQEKNRWTTIEEMNFDEITELDIASITTKLHNWKSPGIDKIHNYWYKKLTSLHKPIARNLTDIVLGKQKIPEFIATGITYMLPKTKHSQQPSQYRPITCLPTIYKILTSAIANKINTHIEHHQIIAEEQKGCRRGHMGCKEQLVIDSTIHKHANTKNRNLHCTYIDYKKAFDSIPHSWLLKVLQIYKINPKLINFLQKIIKHWKTTLHLNTHKMTIVTRQIAIKKGIYQGDSLSPLWFCLALNPLSHLLNNCQFGYRFTTDQTPISHLIYMDDIKLYAKTENEMKKLINTTIEFSKDINMEFGLDKCKILHVIRGKIKPGNFAINDNSSISAMEPTDIYKYLGYNQLKGLDHTSVKLILSTEYRRRINAICNTQLSGKNLIKALNTYAVPILTYSFGVIKWSNTDIENLERNTRTTLTKYNHLHPNSAIERLTIKRHSGGRGFIDIHNLWQKQIRSLRTFFHTKSHSSSMHKAIAQNDRNYTPLNLNENLNITSVNDDPQTQKIENWKKKILHGRHPHDLEQSHIDPVASNKWLKIGNLFPETEGFMLAIQDQIINTKNYRKFIIKDPSIINDKCRKCHIQPETIQHITGACTLLTQTDYTHRHNQVTNIIHQKLALKYNLIENTNTPYYKYTPQTVLENASYKLYYDRAILTDKTIHYNRPDIILKDKNNNTTYLIDIAVPNTHNIQKTIAEKINKYEELKAEILRIWNQDKVYIVPIVISATGVVPKYLFQSLKLLDLKENIYMTVQKA

SEQ ID NO: 21060 - protein, 1274 aa, Pythonides amaryllis
MRLRSRLLPQAGTREGESRPGPSSSGCPAYSGVGNVSHMTAQSHTVAVNIQSPPINADPPSTPASSTRSLFRSPSSSPRSYQLLNPSSRSSTITSSPTSQISTNSPTLTLDVAQGANAFLPASTKAGKKRVRMSWSKEVNLFIMRTYYYITKLETDFTTYRKQLYELFSRQYPDVNVTEQRIADQRRTIVKNKRISQETLDQLKEEVRMQIEAESQINTADSGAIGHQIQNVSESQRALHQSSTQSRLSIHNTAPSQTTAQKNQPSHTTAINIQSSHTSTQTGSINLTLENDINIIECTNVTTDINTQDMYDKFRTTLTQYSGIDPVVRPKLPKLRYSHQLFKLVSIFNHNILTQFTSEDTQLTDIHTIIYCTALVISQELNYKIKDNTANIRTMHHNKPEWQIRLEKDIEKLRANCGRLTQYIKGNRSKNIRKHVEVLFQTTNTHTKYEKENRNPEEFLDTLKQKLYLKVGRLKRYNKALQRKANNTLFTTNEKIFYRNLQTPITDSTSVNNPDLPTKEQLETFWSGIWEKPIQHNVKADWIEEEKNKWSTIEEMKFAEITETDITNITNRLHNWKSAGVDKIHNFWYKKLFTLHKLIAKNLTDIILGKQDVPEFITTGITYMLPKTQYTEEPSQYRPITCLPTIYKILTSAITLKITEHIEQHEIIAEEQKGCRRGHMGCKEQLIIDSTIHKHATTKNRNLHCTYIDYKKAFDSIPHSWLIEILQIYKINPKIISFLRNTMSKWKTTLQLSTRHKSITTRQIAIRRGIYQGDALSPLWFCLALNPLSHLLKRSQVGYCLKHDTKETNISHLIYMDDIKLYAKTEKDMKKLLDITTQFSTNINMEFGLDKCKILHIIRGKVRPGNYAINDTDTIEALEPNDMYKYLGYKQLTKLDHTTIKNTLTIEYRKRINALCKTQLSGKNLIKSFNTYAIPILTYSFGIIKWTKTDIEQLERTTRTLLTKHNNLHPKSAVERLTIKRQDGGRGLVNMYQLWQKQINSLKHFFNTKSQTSDIHKAIVHNDENYTPLNLKEETRKQYTQFTQSSNNNINLQKQKIEDWKKKILHGRHPHDLEQPHIDAIASNKWLQIGNLFPETEGFMIAIQDQIINTKNYRKYIIKDPTILNDTCRKCHTHSETIQHITGACTNLTQTDYTHRHNQVANIIHQKLAVKYKLIHNTNTPYYNYTPQTILENDTHKLYYDRAILTDKTIHYNRPDITLRDKIKNVTYLIDIAVPNTHNLQKTITEKISKYAELKEEVTRIWKQEKVFIVPIVL

SEQ ID NO: 21061 - protein, 1336 aa, Morvina fissimacula
MRLRCRLLPQAGTREGESRPGPSSPGSPSYSGVGNVSHIAAQSHTVAVSKTHSHIIPNPSTDETDILTDRTTPIEPYSPSTSSYTPSIQTSPSHNSCKSTHSPTPTLDVAQTAIAFLPASTKAGKPRVRMSWSKEVNLFIMRTYYYITKLETDFTTYRKQLHERFSRQYPEINVSEQRIADQRRTIVKNKRLNQDILNQLKEEVRMRLEEENQIHTPDNGSTDPIENVIQPQNYSSHQNLSQSQLSFSSTVLSQSTLHTRTQSSHITTQNTQSSHMFTQTESVTLMLENDINILEYNNATTNNNIQEMYEKFRTTLTQYSGTDPELRPKLPKLRYSPLLSQLINIFNHDILIQFISDDTQLTDIHTIIYCTALLISQELNYKITDNTENIRPKNLKKPPWQVRLEKDIEELRANCGRLTQYIKGNRSRKTVKHIEKLFKNSSIHTRYEKENRKPEDFLDTLKQKLALKANRLKRYKKAQQRKRDNVLFATNEKIFYRNLQKLETESTVKNNTDLPTVEQLETFWSGIWEKQVQHNETADWIVEEKTKWNTIEEMTFVEITETDISNITNRLHNWKSAGVDKIHNFWYKKLSILHKLIAKNLTDIILGKQDAPEFITTGITYMLPKTGYSQEPSQYRPITCLPTIYKILTSAITQKINKHIEQYNIIAEEQKGCRSSHMGCKEQLIIDSTIHKHATSKNRNLHCTYIDYKKAFDSIPHSWLIEILHIYKISPKIIDFLRNTMNRWKTSLHLSTRDKSITTRQILIRRGIYQGDALSPLWFCLALNPLSHLLHRCQVGYSLKHDTRDTTISHLIYMDDIKLYAKTQKDMTKLLDFTSQFSKDINMEFGLDKCKILHIVRGKVRPGDYEMNNTDIITAMEPTDVYKYLGYKQLKKLDHTEIKSTLTTEYRKRINALCKTQLSAKHLIKSLNTYAIPILTYSFGIIKWTKTDIDQIERTTRTILTKHKNLHPKSAIERLTIKRQDGGRGLINIHHLWQNQISRLKYFFYTKSYTSDIHKAIVQNDNNYTPLNLKEEANIQLTQTSTHLTQTNSNNDSHKQKIENWKKKVLHGRHPHDLQQPHIDTIASNKWLQIGNLFPETEGFMIAIQDQIINTKNYRKYIIKDPTILNDKCRKCHTQPETIQHITGACITLTQTDYTHRHNQVANIIHQKLALKFKLIQNTNTPYYNYTPQTILENETHKLYYDRAILTDKTIHYNRPDVTLLDKINKVTYLIDIAVPNTHNLQKTITEKISKYTELKEEVIRIWRQEKVYIVPIVLSTTGVIPKHLRHSINQLELKDSIYITLQKAAILNTCRIVRKFMQIDENDIVPHCNTPNTVT

SEQ ID NO: 21062 - protein, 1295 aa, Parapoynx stratiotata
METRNKRKRLGPLPGGNRRGTPGADAGCFSMRSVSGEELSRRASTTQNSTADETHTYCSNSPYSEPYSPSTISYTPSTLSSPTTVSSNRNSPTPASDVAQEATAFLPASTKAGKPRVRMSWSKEVNIFIMRTYYLITKLETDMTTYRKRLHELFTEQYPQVKVTEQRISDQRRTIIRNKLLSEEVLNEIKYQVQMQLNQENTDDNTSNISPDININTTLNTQVSFNSQTLTDTQTYAQTQPLTYTQRSTHSSHISTQTEVITLTLENNIDIIPDTYPINDTNTEILVDKLKTALTKYSGMDPTTRPRLPKLRYTPILTNLINVFNAILTQFVAVIAQLMDIHTLIYCTALVISEELHYKIGDHTNIPRSSNTKKPPWQIRLEKDIEKLRADCGRLTQYINYNRSNKVVKCVETIFKSRTVHSRHEKDNKKPEEFLDTLKQKLALKAHRLKRYKKALQRKNENITFTTNERQFYRNLQKPKIEINENTREIPTQEQLERFWSEIWEQQIQHNTNADWIVEEKSKHNTIEEMEFKEITESDIAIITSKLHNWKSPGVDKIQNYWYKKLTSLHLPLAKNITEIILGKQIIPEFIATGITYMLPKTSYSSQPSQYRPITCLPTIYKILTSAITLKINAHIQHYNILAEEQKGCRRGHMGCKEQLVIDSTIHKHATVNNRNLHCTYIDYKKAFDSIPHSWLIQILQLYKINTQIIDFLRNIMTQWKTTLHLKTQYDTVITRQISIKKGIYQGDSLSPLWFCLALNPLSRLLQQTKAGYILKYSTSEIVMSHLVYMDDIKLYAKSDKDMQKLIDITTQFSEDINMQFGLDKCKTLHIIRGKIRPGNYEINNTESITAMESTDLYKYLGYNQLKGLDHTSIKETIFTEYKRRTNIVCKLHLNSKNLIKAINTYAIPILTYSFGIIKWSKTDIEHLQRSTRTILTKHNDMHPKSAIERLTISRDKGGRGLIDICHLWQKQISKLKTFFYTKSASSQIHNAIVKNDNNYTPLNLNSQTTSMNVTSNEDIQKQKIENWKTKVLHGRHAHDLEQSHVDPIASNKWLKVGNLFPETEGFMVAIQDQIINTKNYRKYIIKDPTTTNDKCRKCHNHPETIQHITGACTNLTQTDYTHRHNQVANIIHQTLALKHKLIQNTDTPYYKYAPLTVLENSSYKLYYDRAILTDRTIHYNRPDIILQDKLRKTSYLIDIAVPNTHNLQKTIAEKINKYTDLREEVVRIWKQDKVYIIPIVLSVTGVIPRHLHHSLKMLDLNDTLYITLQKAAILNTCRIVRKFLQTEENHVPTP

SEQ ID NO: 21063 - protein, 943 aa, Parapoynx stratiotata
MDIHTLIYCTALVISEELHYKIGDHTNIPRSSNTKKPPWQIRLEKDIEKLRADCGRLTQYINHNRSNKVVKCVETIFKSRTVHSRREKDNKNPEEFLDTLKQKLALKAHRLKRYKKALQRNNENITFTTNERQFYRNLQKPKIEINENTREIPTQEQLERFSSEIWEQQIQHNTNADWIVEEKSKHNTIEEMEFKEITESDIAIITSKLHNWKSPGVDKIQNYWYKKLTSLHLPLAKNITEIILGKQIIPEFIATGITYMLPKISYSSQPSQYRPITCLPTIYKILTSAITQKINAHIQHYNILAEEQKGCRRGHMGCKEQLVIDSTIHKHATVNNRNLHCTYIDYKKAFDSIRHSWLIQILQLYKINTQIIDFLRNIMTQWKTTLHLKTQYDTVITRQISIKKGIYQGDSLSPLWFCLALNPLSRLLQQTKAGYILKYSTSEIVMSHLVYMDDIKLYAKSDKDMQKLIDITTQFSEDINMQFGLDKCKTLHIIRGKIRPGNYEINNTESITAMESTDLYKYVGYNQLKGLDHTAIKETIFTEYKRRTNIVCKSHLNSKNLIKAINTYALPILTYSFGIIKWSKTDIEHLQRSTRTILTKHNDMHPKSAIERLTISRDKGGRGLIDICHLWQKQISKLKTFFHTKSASSQIHNAIVKNDNNYTPLNLNSQTTSMNVTSNEDIQKQKIENWKTKVLHGRHAHDLEQTHVDPIASNKWLKVGNLFPETEGFMVAIQDQIINTKNYRKYIIKDPTTTNDKCRKCHKHPETIQHITGACTNLTQTDYTHRHNQVANIIHQTLALKHKHIQNTDTPYYKYAPLTVLENSSYKLYYDRAILTDRTIHYNRPDIILQDKLRKTSYLIDIAVPNTHNLQKTIAEKINKYTDLREEVVRIWKQDKVYIIPIVLSVTGVIPRHLHHSLKMLDLNDTLQGVPRPCHMEGKYIKY

SEQ ID NO: 21064 - protein, 766 aa, Parapoynx stratiotata
MEFKEITESDIAIITSKLHNWKSPGVDKIQNYWYKKLTSLHLPLAKNITEIILGKQTIPEFIATGITYMLPKTNYSSQPSQYRPITCLPTIYKILTSAITQKINAHIQHYNILAEEQKGCRRGHMGCKEQLVIDSTIHKHATVNNRNLHCTYIDYKKAFDSIPHSWLIQILQLYKINTQIIDFLRNIMTQWKTTLHLKTQYDTVITRQISIKKGIYQGDSLSPLWFCLALNPLSRLLQQTKAGYILKYSTSELVMSHLVYMDDIKLYAKSDKDMQKLIDITTQFSEDINMQFGLDKCKTLHIIRGKIRPGNYEINNTESITAMESTDLYKYLGYNQLKGLDHTSIKETIFTEYKRRTNIVCKSHLNSKNLIKAINTYAIPILTYSFGIIKWSKTDIEQLQRSTRTILTKHNDMHPKSAIERLTISRDKGGRGLIDICHLWQKQISKLKTFFYTKSASSQIHNSIVKNDNNYTPLNLNSQTTSMNVTSNEDIQKQKIENWKTKVLHGRHAHDLEQSHVDPIASNKWLKVGNLFPETEGFMLAIQDQIINTKNYRKYIIKDPTTTNDKCRKCHNHPETIQHITGACTNLTQTDYTHRHNQVANIIHQTLALKHKLIQNTDTPYYKYAPLTVLENSSYKLYYDRAILTDRTIHYNRPDIILQDKLRKTTYLIDIAVPNTHNLQKTIAEKINKYTDLREEVVRIWKQDKVYIIPIVLSVTGVIPRHLHHSLKMLDLNDTLYITLQKAAILNTCRIVRKFLQTEDNHVLTP

SEQ ID NO: 21065 - protein, 1295 aa, Leptidea sinapis
METRSMKKRKIGPLPGGDRRGTPGAGAGCLSMRTVSGEELNRRAPTGSSENTTAENDRLTDRTTPTEPYSPCTISYTPSIPSSPLSSRYSPTPTLDAAREANAFLLASTKAGKPRVHMKWSKEMNLFIMRTYYYITKLETDLTTYRKQLHELFLQKYPDLNVTEQRIADQRRVIVKNKLLNQETLNQIKEEIKSQLEIENENQFHINISEPTNDVIPCSSTQTIPNTQHNQSLNTFTYNTQSLQTFSYITQTSHNMPTQTEFVTIMMENDIDTVLDHNPGTNTEIEEICYKFKTALTQYSGMDPLVRPKLPKLRYNSHLFQLVNMFNSDILSRFISDDTKLTDIHTIVYCVALVISEELNYKVTEYIRSTRPKDCYKPPWQIRLEKDIEKLRADCGRLTQYINNNRSIIKHVKAIFKTGNTHTKHENSNIKPEEFLDTLKQKLALKVHRLKRYKKAQERKNDNTMFSTNEKNFYRNLHKLKTDTVNNPNVPTQEQLETFWSGIWEQQVHHNDKADWIIEEENKWNAIEEMDFTEITETDINNITARLHNWKSPGIDKIHNFWYKKLFSLHKIMAKNITDIIIGKQKIPDFIATGITYMLPKLQISPLPSQYRPITCLPTIYKILTSAITTKINKHVEHYNIIAEEQKGCRRGHMGCKEQLIIDSTIHKHATSKNRNLHCTYIDYKKAFDSIPHSWLIKILQIYKINPKIINFLHDIMSRWKTTLYLNTNQNTITTREIAIRKGIYQGDSLSPLWFCLALNPLSHLLRDCRAGYRLKHDIQETIVSHLIYMDDIKLYGKTEMEMKKLIDTTAQFSKDINMEFGLDKCRTLHIKRGKIRPGDYAVNDIDIIRAMEQTELYKYLGYKQLRGLDHTEIKNTLTIEFKKRINALCKTQLTSKHLIKSLNTYAIPILTYSFGIIKWTKTDIEQIERTIRTTLTKHNNLHPKSAIERLTIKREYGGRGLIDLNHLCQKQVGNLKDFFHLKSQTSEIHKAIVKNDINFTPLNLHEDISSQNTRRNDPQIQKLDSWKRKVLHGRHPHDLEQSHINTAASNKWLKIGNLFPETEGFIIAIQDQVVNTKNYRKFIIKDPLISNDKCRKCHVQPETIQHITGGCTTLTQTDYTHRHNQVVNIIHQKLALKHKLIQNTNTPYYKYKPQTVLENDTYKLYFDRAILTDRTIHYNRPDITLKDKLNEITYLIDIAVPNTHNLQKTISEKINKYTELKDEVARIWNQKKVYVIPIVLSTTGVIPNHLLHSLKLLELKETLYITLQKVAILNTCRIVRKFLQIDEHDISPYT

SEQ ID NO: 21066 - protein, 973 aa, Leptidea sinapis
MFNSDILSRFISDDTKLTDIHTIVYCVALVISEELNYKVTEYIRSTRPKDCYKPPWQIRLEKDIEKLRADCGRLTQYINNNRSRKIIKHVKAIFKTGNTHTKHENSNIKPEEFLDTLKQKLALKVHRLKRYKKAQERKNDNTMFSTNEKNFYRNLHKLKTDTVNNPNVPTQEQLETFWSGIWEQQVHHNDKADWIIEEENKWNAIEEMDFTEITETDINNITARLHNWKSPGIDKIHNFWYKKLFSLHKIMAKNITDIIIGKQKIPDFIATGITYMLPKLQISPLPSQYRPITCLPTIYKILTSAITTKINKHVEHYNIIAEEQKGCRRGHMGCKEQLIIDSTIHKNATSKNRNLHCTYIDYKKAFDSIPHSWLIKILQIYKINPKIINFLHDIMSRWKTTLYLNTNQNTITTREIAIRKGIYQGDSLSPLWFCLALNPLSHLLRDCRAGYRLKHDIQETIVSHLIYMDDIKLYGKTEMEMKKLIDTTAQFSKDINMEFGLDKCRTLHIKRGKIRPGDYAVNDIDIIRAMEQTELYKYLGYKQLRGLDHTEIKNTLTIEFKKRINALCKTQLTSKHLIKSLNTYAIPILTYSFGIIKWTKTDIEQIERTIRTTLTKHNNLHPKSAIERLTIKREYGGRGLIDLNHLCQKQVGNLKDFFHLKSQTSEIHKAIVKNDINFTPLNLHEDISSQNTRRNDPQIQKLDSWKRKVLHGRHPHDLEQSHINTAASNKWLKIGNLFPETEGFIIAIQDQVVNTKNYRKFIIKDPSVSNDKCRKCHVQPETIQHITGGCTTLTQTDYTHRHNQVVNIIHQKLALKHKLIQNTNTPYYKYKPQTVLENDTYKLYFDRAILTDRTIHYNRPDITLKDKLNEITYLIDIAVPNTHNLQKTISEKINKYTELKDEVARIWNQKKVYVIPIVLSTTGVIPNHLLHSLKLLELKETLYITLQKVAILNTCRIVRKFLQIDEHDISPYT

SEQ ID NO: 21067 - protein, 1297 aa, Leptidea sinapis
METRSMKKRKIGPLPGGDRRGTPGAGAGCLSMRTVSGEELNRRAPTGSSENTTAENDRLTDRTTPTEPYSPCTISYTPSIPSSPLSSRYSPTPTLDAAREANAFLLASTKAGKPRVRMKWSKEMNLFIMRTYYYITKLETDLTTYRKQLHELFLQKYPDLNVTEQRIADQRRVIVKNKLLNQETLNQIKEEIKSQLEIENENQFHINISEPTNDVIPCSSTQTIPNTQHNQSLNTFTYNIQSSQTFSYITQTSHNMSTQTEFVTIMMENDIDTVLDHNPGTNTEIEEICYKFKTALTQYSGMDPLVRPKLPKLRYNSHLFQLVNMFNSDILSRFISDDTKLTDIHTIVYCVALVISEELNYKVTEYIRSTRPKDCYKPPWQIRLEKDIEKLRADCGRLTQYINNNRSRKIIKHVKAIFKTGNTHTKHENSNIKPEEFLDTLKQKLALKVHRLKRYKKAQERKNDNTMFSTNEKNFYRNLHKLKTDTVNNPNVPTQEQLETFWSGIWEQQVHHNDKADWIIEEENKWNAIEEMDFTEITETDINNITARLHNWKSPGIDKIHNFWYKKLFSLHKIMAKNITDIIIGKQKIPDFIATGITYMLPKLQISPLPSQYRPITCLPTIYKILTSAITTKINKHVEHYNIIAEEQKGCRRGHMGCKEQLIIDSTIHKNATSKNRNLHCTYIDYKKAFDSIPHSWLIKILQIYKINPKIINFLHDIMSRWKTTLYLNTNQNTITTREIAIRKGIYQGDSLSPLWFCLALNPLSHLLRDCRAGYRLKHDIQETIVSHLIYMDDIKLYGKTEMEMKKLIDTTAQFSKDINMEFGLDKCRTLHIKRGKIRPGDYAVNDIDIIRAMEQTELYKYLGYKQLRGLDHTEIKNTLTIEFKKRINALCKTQLTSKHLIKSLNTYAIPILTYSFGIIKWTKTDIEQIERTIRTTLTKHNNLHPKSAIERLTIKREYGGRGLIDLNHLCQKQVGNLKDFFHLKSQTSEIHKAIVKNDINFTPLNLHEDISSQNTRRNDPQIQKLDSWKRKVLHGRHPHDLEQSHINTAASNKWLKIGNLFPETEGFIIAIQDQVVNTKNYRKFIIKDPSVSNDKCRKCHVQPETIQHITGGCTTLTQTDYTHRHNQVVNIIHQKLALKHKLIQNTNTPYYKYKPQTVLENDTYKLYFDRAILTDRTIHYNRPDITLKDKLNEITYLIDIAVPNTHNLQKTISEKINKYTELKDEVARIWNQKKVYVIPIVLSTTGVIPNHLLHSLKLLELKETLYITLQKVAILNTCRIVRKFLQIDEHDISPYT

SEQ ID NO: 21068 - protein, 1299 aa, Leptidea sinapis
METRSMKKRKIGPLPGGDRRGTPGAGAGCLSMRTVSGEELNRRAPTGSSENTTAENDRLTDRTTPTEPYSPCTISYTPSIPSSPLSSRYSPTPTLDAAREANAFLLASTKAGKPRVRMKWSKEMNLFIMRTYYYITKLETDLTTYRKQLHELFLQKYPDLNVTEQRIADQRRVIVKNKLLNQETLNQIKEEIKSQLEIENENQFHINISEPTNDVIPCSSTQTIPNTQHNQSLNTFSYNIQSLQTFSYITQTSHNMPTQTEFVTIMMENDIDTVLDHNPGTNTEIEEICYKFKTALTQYSGMDPLVRPKLPKLRYNSHLFQLVNMFNSDILSRFISDDTKLTDIHTIVYCVALVISEELNYKVTEYIRSTRPKDCYKPPWQIRLEKDIEKLRADCGRLTQYINNNRSRKIIKHVKAIFKTGNTHTKHENSNIKPEEFLDTLKQKLALKVHRLKRYKKAQERKNDNTMFSTNEKNFYRNLHKLKTDTVNNPNVPTQEQLETFWSGIWEQQVHHNDKADWIIEEENKWNAIEEMDFTETEITETDINNITARLHNWKSPGIDKIHNFWYKKFFSLHKIMAKNITDIIIGKQKIPDFIATGITYMLPKLQISPLPSQYRPITCLPTIYKILTSAITTKINKHVEHYNIIAEEQKGCRRGHMGCKEQLIIDSTIHKHATSKNRNLHCTYIDYKKAFDSIPHSWLIKILQIYKINPKIINFLHDIMSRWKTTLYLNTNQNTITTREIAIRKGIYQGDSLSPLWFCLALNPLSHLLRDCRAGYRLKHDIQETIVSHLIYMDDIKLYGKTEMEMKKLIDTTAQFSKDINMEFGLDKCRTLHIKRGKIRPGDYAVNDIDIIRAMEQTELYKYLGYKQLRGLDHTEIKNTLTIEFKKRINALCKTQLTSKHLIKSLNTYAIPILTYSFGIIKWTKTDIEQIERTIRTTLTKHNNLHPKSAIERLTIKREYGGRGLIDLNHLCQKQVGNLKDFFHLKSQTSEIHKAIVKNDINFTPLNLHEDISSQNTRRNDPQIQKLDSWKRKVLHGRHPHDLEQSHINTAASNKWLKIGNLFPETEGFIIAIQDQVVNTKNYRKFIIKDPSISNDKCRKCHVQPETIQHITGGCTTLTQTDYTHRHNQVVNIIHQKLALKHKLIQNTNTPYYKYKPQTVLENDTYKLYFDRAILTDRTIHYNRPDITLKDKLNEITYLIDIAVPNTHNLQKTISEKINKYTELKDEVARIWNQKKVYVIPIVLSTTGVIPNHLLHSLKLLELKETLYITLQKVAILNTCRIVRKFLQIDEHDISPYT

SEQ ID NO: 21069 - protein, 1311 aa, Pyrgus malvae
METRSRKKKRLGPLPGGDRRGTPGADAGCYSMRTVSGEELSRRAPTGLSENATAENDILTDRNTPTEPYSPSTTSYTPSVCTSPSTNVSNTNSPTLSLDVARVANAFLPTSTKAGKPRVRMCWNNEVNIFIMRTYYYITKLETDFTTYRKQLYEHFTRQYPEVKVTEQRIADQRRTIVRNKRLNQETLQQLKEEVRVQLEAEGASEIQNDVSTLVDHQPENILRSQSFSQLHNNLQLQQFPCSSQTSHLFIQNLQSSHLPRNISTQTESVTFVLENEVDALEEQNRTTNIQIQEIYDKFKATLIQYSGTDPVSRPKLPKIRYSPKLFELIALFNRDILDKFISHEMKLPDIHTLVYCTAVVISQELKYNIKNYTQNTRSKYHNKPPWQIRLEKDIEKIRADCGRLTQYISGNRSKKVMKHVEAIFKFRTKHTRHENNNRKPEEFLDTLKQNLALKVNRLKRYKKAQGRKKDNAVFSTNEKIFYRNLKKQNTDSSENNINLPKKEDLETYWSGIWENPTHHNRTADWISDEEEKWSSIEEMEFAEITATEITNITARLHNWKSPGVDKIHNFWFKKLIILHKLIAKNLTDIILGKQDVPEFIATGITYMLPKTQYSPEPSQYRPITCLPTIYKILTTAIAIKINKHIEHFNIIAEEQKGCRRGHMGCKEQLVIDSIIHKNATSKNRNLHCTYIDFKKAFDSIPHSWLIHVLKIYKISPKLVDFLGKIMTRWKTSLHISTRDKIVTSREIIIRKGIYQGDSLSPLWFCLALNPLSHLLNRCQVGYSLKHNLTDTIFSHLIYMDDVKLYAKSEKDMKKLLDRTTNFSKDINMELGLEKCKTLHIFRGKVRPGDYIINDSEVIAALEPSDFYKYLGYKQLKGIDHSVIKETLTAEYTKRVNMLCKKQLRGKNLIKAINTYAIPVLTYSFGIVKWSKTDIERLERTTRTTLTKHNYLHPKSAIERLTIKREDGGRGLIDIHQLWQKQIQTLKSFFYRKSQTSHLHEAIVQNDYNYSPLNLSKNENIENTESTHNEIPHHKIQNWKQKILHGRHPHDLEQPHIDKIASNKWLQIGNIFPETEGFIIAIQDQIINTKNHRKYIIKDPTVTNDKCRKCRNQPETIQHITGACTTLTQTDYTHRHNQVVNIIHQKLALKHKLIQNTNTPYYNYTPQTILENESYKLYYDRAILTDKTIHYNRPDITLQDKVNKVTFLIDIAVPNTHNLQKTITEKISKYGDLKEEIIRIWKQQKVFIVPIVLSTTGVIPKHLRHSLRQLDLKDTTYILLQKAAILNTCRIVRKFLQIEENDDTAPQPQLT

SEQ ID NO: 21070 - protein, 1207 aa, Notocrypta feisthamelii
MDETSRGTPTPVLTVAQEVNTFLPASTKAGKPRVRMRWNKEVNMFIMRTYYHITKLETDMTVYRKQLHELFSRQYPEINVTEQRISDQRRTIIRNKLLSDKIISEIKEEVRATLQVEVNADNGCYSDENIPLNLSNSPTQTHSNLISQTPLLTSTQISHIATQTECETLLLESEVELLVDNNPLADIYIQEISSKLRSALIKYSGMDPTTRPQLPKLKYCRKLLKLINLFNKHILNHFLSDDTKLVDIHTLIYCTAVVIAEEFNYKIIAHPSHSKTKNITKPPWQIRLEKDIEKLRADCGRLTQYIHNNRSKKVVKKVEEIFKKQITHTRHENGNRKPEEFLDTLKQKLAIKVHRLRRYNKAQQRRNDNTLFATQEKQFYRKLHTIHPATSPTKITDIPTKTQLESFWSGIWEEQIEHNNKAEWIVEEEKRWNTIKEMDFDGFTEIDITSITTKLHNWKAPGVDKIHNYWFKKLTSLHKHIAKNLSHVVLGKQSIPQFIATGITYMIPKTTYSPQPSQYRPITCLPTIYKILTSAIARKINKHVHDNEILAEEQKGCRQNHMGCKEQLIIDATIHKHATTKNKNLHCTYIDYKKAYDSIPHSWLLQILKIYKINSHITNFMFNIMAHWKTSLLLNTKVNSITTREIIIKRGIYQGDSLSPLWFCLALNPVSHLLHRCQVGYSLKHTTENTTISHLIYMDDIKLYSKTHNDMEKLVNTVSEFSNDIKMELGLDKCKTLHIVRGKIQPGNYEIDDNKFIEALESTDMYKYLGYKQLKGLDHTVLKQTLITEYKKRINAICKTQLSGRHTIKALNTYAIPILTYSFGIIKWSKTDIERIERTTRTTLTKHNYLHPKSAVERLTIRRHQGGRGMIDIHHLWQKQIYHLKTFFQLKSRDSNIHKAIAHNDYNFTPLNLNDSSIVDPTNVDPQEQKIENWKKKALHGRHPYDLEQSHIDSLASNKWLKDGNLFAETEGFLIAIQDQIINTKNYRKFIIKDPLVTSDKCRRCHSQAETIQHITGACKTLTQTDYTHRHNQITNIIHQQLALKYKLIQNTNTPYYKYVPQTVFENTSYKLYYDRAILTDKTIHYNRPDITLQDKVNKTTYLIDIAVPNTHNIQKTIAEKISKYAELKEEVSRIWRQDKVYIVPIVLSTTGVIPKHLHHSIQQLGLKERLYVYLQKAAILNTCRIVRKFMQIDESDLSTQPTTHNF

SEQ ID NO: 21071 - protein, 1297 aa, Telicota sp.
METRSKSKRSGPLPGGDRRGTPGADAGCYSMRTVSGEELNRRAPSGSPEYTTATQTNTDRDINSPTSIDEPYSPSTASYIPSPVSSTEEKSRGTPTPTLSVAQGVNPFLPASTKAGKPRVRMSWSKEVNIFIMRTYFYITKLETDLTTYRKQLHETFSLQYPQIQVTEQRLSDQRRAIIRNKLLTQQILNQIKEEVRIKLQETTDNTDTTNNYDHNSQHTLHPVHNCTATLATHLTPVSQSQNQTLHSSTQTETEIFTLENDIYTMMSNNSLDEDSVQELHTKLKTALLKYSGMGPTTRPKLPKLKYSAKLSQLIHIFNHNIITKYISYETQLLDLHTLIYCTAVVISEELNYKITENINNTKPKINKKPPWQVRLERDIVKLREDCGRLTQYINNNKTKKVVKKVEEIFKRRVRHTIHENDNKKPEEFLDSLEQKLALKASRLKRYNKAQQRKNDNILFSNNEKMFYKNQLKSQVNTTTNKNVQLPTQTQLETFWSSIWENNIQYNDKAEWIREEENRWTKIKEMEFKEITKEDITTTTTKLHNWKSPGIDRIHNYWYKNLTSLHKHIAKNLTDIILGKQNIPEFIATGVTYMLPKGNPTPEPSKYRPITCLPTIYKILTSTLARKINVHIENNNVIAEEQKGCRRGHMGCKEQLIIDSTIHKHATTKNRNLHCTYIDYKKAFDSIPHSWLLHILKIYKISPIVINFMKNIIPYWKTSLQLNSHNHTITTRMISIRKGIYQGDSLSPLWFCLALNPLSFLLQNCQAGYNFNNVRGETIISHLIYMDDIKLYSKTHKEMKKLIDITTQFSKNINMEFGLDKCKTLHIVRGTIQPGDYEIDNNSSITAMETTDMYKYLGYKQLKGLNHTQIKDTLTTEYKRRISNICNTKLSGKNIVKAINTYAIPILTYSFGIIKWTNTDIEKIERTTRTTMTKHNYLHPKSAIERLTIPRNRGGRGVIDINNLWKKQIHSLKSFFYAKSLVSNIHSAILKNDYNYTPLNLNEYQNTAIFENIDPQTHKITNWKKKTLHGRHPHDLEQAHIDTLASNKWLKTANLFPETEGFIIAIQDQIINTKNYRKYIIKDPTITSDKCRKCHIQPETIQHITGACTTLTQTDYTHRHNQLVNIIHQKLAVKHGLTQNTNTPYYKYTPQTVLENATHKLYYDRAILTDKTIHCNRPDITLQDKVNKITYMIDISVPNTHNLLKTISEKISKYTELQEEVTRIWKQDKVYIVPIVLSTTGVIPKHLHHSLKLIDLRANDYLILQKAAILNTCRIVRKFLNIDEDEVQHTQTSHDAN

SEQ ID NO: 21072 - protein, 1317 aa, Hesperopsis alpheus
METRSRKKKRSEPLPGGDRRGTPGADAGCFSMRTVSGVELNRRTPTGSTENATAETEIATDRSTSVEPYSPNTISYTSSGPSTHNIYSSIRNSAILTLDVAQVQHSFMPASTKAGKPRVRMSWSKEMNLFIMRAYITKLETDSTTYRKQLHEQFSRQYPEIKVTEQRIADQRRTIIKNNRLNQETLNQLKEEVKLQLEKGDEINISVDRYTSIPLDNCIVSTVQENLTPDCSVLQKPSQSLIITPGIQPTQQLIKSTRSPSKNQYLYNTFEQTNSVTLLMENDSNTAEVCSPNSTRNLCNSNIQENELYNKFKTVLTQYSEIDPVVRPKLPKLRYSPQLFQLISIFNQKILTKVVSENSQLTYIHTIIYCTALTISQELNCKITDCTRDVTSKRYHKPAWQMRLEKDIEKLRAECGRLTQYIKGNRSNKVMKFVQVIFQTKFIHTTHENNNRKPEEYLDTLKQKLAVKVNRLKRYKKAQKRRNDNIIFSKHEKIFYRTLQKSQTVIENESDIPTKEQLDTFWSNIWEDNLQHNEKAEWIREEETKWSTIEEMKFIEITETDIRNITHKLHNWKSPGVDKIYNFWYKKLYSMHKPISKNLTDIILGRQNIPKFITTGITYMLPKSKYTSDPSQYRPITCLPTIYKILTSVISQKINNHIEKHNILAEEQKGCRRGHMGCKEQLIIDSTIHKHATSKHRNLHCTYIDYKKAFDSIPHSWLLKILQIYRINSKVINFLDNIMRQWSTCLQLSTQNKTIKTRQISIKKGIYQGDSLSPLWFCLALNPLSHLLHRCQVGYSLKHDTTDTIISHLVYMDDIKLYSKTEIGMKKLLDTTTQFSKDIRMEFGLEKCKILHLKRGKILPGDYAINDIQTIAAMEPTDLYKYLGYNQLKGIHHTVIKESLTIEYKKRLNTLCKTQLSARNLIKSLNTYAIPILTYSFGIIKWTITDIEKLERLARTTLTKHNKLHPKSAIERLTIKRKDGGRGLIDICQLWKNQISKLKSFFDTKSSTSDIHKAIVQNDNNYTPLNLLSQNQLTTQNTHTSNINAQKQKIEDWKKKVLHGRHPQDLGQPHIDTLASNKWLQIGNLFPETEGFMIAIQDQIINTKNYRKHILKDHTLINDKCRKCHVQSETIQHITGACVTLTQTDYTHRHNQVANIIHQKLALKHKLMKNSNTPYYNYTPQPVLENKTYKLYFDRAILTDKAIHYNRPDITLQDKRNRVTFLIDIAVPNTHNIQKTIIEKISKYTELKEEVTRIWKQEKVYIVPIILSSTGVIPNHLQHSLKILDLKENTYIILQKAVILNTCRTVRKFMEIDDSEI

SEQ ID NO: 21073 - protein, 1195 aa, Pholisora mejicanus
MRTYYYITKLETDLTNYRKQLHEYFSRQYPEIKVTEQRIADQRRTIIKNNRLNQETLSQLKEEVKLQLEEDGARNMSTDTNISVEHGAINSVQAKISNECSEREKHSQSSSTITKSTQPIQVLTKNIQSSSIDQSLHNTPTQNNSENLFPHNESNVEDCNLNTIQNLHITNIQTQELYDKFRTSLTQYSEIDPVLRPKLPKLRYSPQLFQLINIFNHEILTSIISEDLQLTQIHTIIYCTALTISQELNYKITDCTQDVISKHHYKPPWQMRLERDIEKLRAECGRLSQYIMGNRSNKVIKHVQIIFKTRIIHSTHEKDNRKPEEYLDTLKQKLALKVNRLKRYKKAQNRRNDNIIFSTSEKIFYRNLQKQQTVTESEPDVPTEEQLETFWSGIWENKLQHNEKADWIREEEMKWSTIEEMEFIEITETDITNITHRLHNWKSPGIDKIHNFWYKKLYSLHKPISKNLTDIILGRQSIPEFIATGITYMLPKSKYTPHPSQYRPITCLPTIYKILTSVITVKINKHIEQHNILAEEQKGCRRGHMGCKEQLIIDSTIHKHATTKHRNLHCTYIDYKKAFDSIPHSWLLKILQIYKINPKVINFLHCIMKRWKTTIQLCTQFKSIKTRQIFIRKGIYQGDSLSPLWFCLALNPLSHLLHRCQVGYSLKCDTTDTIISHLIYMDDIKLYAKTEIGMTKLLDTTTKFSKDINMEFGIDKCKILHIKRGKVLPGDYAINDTHIITAMEPTDLYKYLGYNQLKGLDHTAIKETLTTEYKRRINTLCKTQLSGKHLIKSFNTYAIPILTYSFGIVKWTITDIQKLERMARTTLTKYNKLHPKSAIERLTIKRQDGGRGLIDICQLWKNQINSLKSFFYLKGQTSDIHNTIIQNDNNYTPLNLLSQNKTITQCTQTNNKIAQKEKIENWKKKVLHGRHPNDLEQPHVDTLASNKWLQIGNLFPETEGFMIAIQDQVITTKNYRKHIIKDPSLINDKCRKCHTQPETIQHITGACITLTQTDYTHRHNQVANIIHQKLALKHKLMDISNTPYYNYTPQIVLENKTHKLYYDRAILTDKTIHYNRPDIILQDKINRVTFLIDIAIPNTHNLQKTITEKITKYTELKEEVKRIWRQEKVYIVPIILSSTGVIPNHLRQSLKLIDLKYTTYIILQKAVILNTCRIVRKFMEIDESEVNAHHVAQPL

SEQ ID NO: 21074 - protein, 958 aa, Leptidea sinapis
MLNTIRISDATYKLILIIIIIIIIIIYIRSTRPKDCYKPPWQIRLEKDIEKLRADCGRLTQYINNNRSRKIIKHVKAIFKTGNTHTKHENSNIKPEEFLDTLKQKLALKVHRLKRYKKAQERKNDNTMFSTNEKNFYRNLHKLKTDTVNNPNVPTQEQLETFWSGIWEQQVHHNDKADWIIEEENKWNAIEEMDFTEITETDINNITARLHNWKSPGIDKIHNFWYKKLFSLHKIMAKNITDIIIGKQKIPDFIATGITYMLPKLQISPLPSQYRPITCLPTIYKILTSAITTKINKHVEHYNIIAEEQKGCRRGHMGCKEQLIIDSTIHKNATSKNRNLHCTYIDYKKAFDSIPHSWLIKILQIYKINPKIINFLHDIMSRWKTTLYLNTNQNTITTREIAIRKGIYQGDSLSPLWFCLALNPLSHLLRDCRAGYRLKHDIQETIVSHLIYMDDIKLYGKTEMEMKKLIDTTAQFSKDINMEFGLDKCRTLHIKRGKIRPGDYAVNDIDIIRAMEQTELYKYLGYKQLRGLDHTEIKNTLTIEFKKRINALCKTQLTSKHLIKSLNTYAIPILTYSFGIIKWTKTDIEQIERTIRTTLTKHNNLHPKSAIERLTIKREYGGRGLIDLNHLCQKQVGNLKDFFHLKSQTSEIHKAIVKNDINFTPLNLHEDISSQNTRRNDPQIQKLDSWKRKVLHGRHPDDLEQSHINTAASNKWLKIGNLFPETEGFIIAIQDQVVNTKNYRKFIIKDPSVSNDKCRKCHVQPETIQHITGGCTTLTQTDYTHRHNQVVNIIHQKLALKHKLIQNTNTPYYKYKPQTVLENDKYKLYFDRAILTDRTIHYNRPDITLKDKLNEITYLIDIAVPNTHNLQKTISEKINKYTELKDEVARIWNQKKVYVIPIVLSTTGVIPNHLLHSLKLLELKETLYITLQKVAILNTCRIVRKFLQIDEHDISPYT

SEQ ID NO: 21075 - protein, 1210 aa, Celaenorrhinus opalinus
MRMRLRSGNKLPQAGTRAYRDGESRPEQISSGSPTYSGGDIVSQNSAQLRTVADNNYQYTYTNSHTPTLSVDYNTLNSPNSIVEPYSPSTTSYIPSPVSSVDQNSRGAPTPNLSVAQEVNTFLPASTKAGKQRVRMTWSKEVNIFIMRTYYHITKLETDMTTYRKRLHELFLQKYPGINVSEQRISDQRRAIIRNRRLSLETLEQIKQEVVIELQQDVDNIDNNTLTHDHSRNSPTLQSRYQTHIIHHTQIKSPTQSQIHTQASDSYTQTNTEILTLENDIEVAVDHHIALDTHIQDIHNNFKTALTKYSGMDPTSRPKLPKLKYNPKLSQLINIFNSTIIKQYISDNTQLVDIHTIVYCTAVVISETLHYKIENYSKFSGFKSNNKPPWLVRLEKSIEMLRVDCGRLTQYIKNNRSCKVVKHVNEIFNRHTTHTRYENQNRKPEQFLDTLKQKLALKVHRLRRYKKALQRKNDNVLFSTNEKLFYRNLYTPKSTSQNIETPSKTQLETFWASIWENKIQHNVKASWITDEEKRCSKLDEMEFQEITELQIRYITATLHNWKSPGIDKIHNFWYKKLTSLHKPIAENVTKIILGKQIIPEFLSVGITYMLPKNKYSVEPSQYRPITCLPTIYKIITKALAVNINSHIEKTNIIAEEQKGCRRGHMGCKEQLVIDSTIHKHAATKNRNLHCTYIDYQKAFDSIPHSWLLKILEIYKINPKIINFLHHIMSHWKTSLQLNSHKNTIVTRQISIRKGIFQGDSLSPMWFCLALNPLSRLLNSSLAGYRFKNKEEPAFSHLIYMDDIKLYSTTMKDMKKLIDITASFSKDINMDFGLDKCKTLHIIKGNVKPGNYTIDNTNIISAMEPADLYKYLGYNQLKGLDHITIKRNLSTEYKRRINTICCTQLSSKHLIKALNTYAIPVLTYSFGVIKWSKTDIDQIERTTRTTLTKHNYLHPKSAVERHTIKRHLGGRGLIDIRHLWQKQIHSLKSFFHTKSDTSMLHKTISNYDHNYTPLNLSNHSYSLNSIIDPQTQNIENWKKKTLHGRHPHDLEQTHIDVIASNKWLQIGNLFPETEGFIIAIQDQIINTKNYRKFIIKDSSITDDKCRKCHTQSETIQHITGACTTLTQTDYTHRHNQISNIIHQKLALKHNLLQNNSIPYYKYSPQPILENSSYKLYYDRAILTDKTIHYNRPDITLTDKVNKITYLIDIAV

SEQ ID NO: 21076 - protein, 1264 aa, Emesis heteroclita
MRNYWRGKRGSGNPLNMETRSNRKRIGPLPGGDRRGAPGADAGCFSMRTVSGEELNRRAPTDKDTTAEIDDDGGTLSLRTDTPTEPYSPSTISYTPSTPTSPSIPSSSPTSTINTVPPIPNLSVARGVSPFLPASTKAGKTRVRMKWNKEVNTFIMRTYLYITRLETDMTTYRQQLHEHFSRKYPDISVSEQRLSDQRRAIVRNKYLSPDEISQLKEEVRTELQTVSEKNTDLNTSLPLQNTEYMLQDQLQRQTQSQLYNQRQTQTSHTSTQTESLILTLENDIEILNVGPITETYIIEIKEKFNTKLTQYSGMDPTARPKLPKLRYSPKLFRLVNLFNEHLLTPFITTDTQLIDVHTLIYCTAVVISEELNFKITDHIRETAKKINVKPPWQQRLEKDIEKIRADIGRLTQYINNNRSNKVVKRVETIFKNNHIHTKHENSNLKPEEFLDTLKQKLALKVHRLKRYKKAQQRRTDNALFATNEKVFYRSIKTPETDTTTNINLEIPTKEQLETFWSDIWEKQIQHNDKATWISEEETKWNKIDEMEFTNITKSDITHITNRLHNWKAPGIDKVHNFWYKKLTTLHEIIAKNLTDIILGQQTIPTFIATGITYMLPKTKHTSLPSQYRPITCLPTIYKILTSAITFKINTHVEKHHIIAEEQKGCRRSHMGCKEQLIIDSVIHKHAAAKNRNLHCTYIDYQKAFDSIPHTWLIQILQIYKINPDIINFLRNIMPHWKTTLHLNNRNNTLTTRQIHIRKGIYQGDSLSPLWFCLALNPLSSILHGCHVGYDIKCNNEKTIISHLIYMDDIKLYGKTERDMDTLLATTTKFSQDINMKFGIDKCKTVHIVKGKIKQGNYAVSDTDIIKALEPTDLYKYLGYRQLKGIEHTITKQTLNTEYRRRMNALCKTQLSSKHLIKALNTFAIPILTYSFGVIKWSKTEIAQLERTTRTTLTKHNNHHPKSAIERLTIKRENGGRGLIDINHLWLKQVNKLKTFFHTKSRISTLHKAITLTDHNYTPLNLQDEINAQNISNGNLQKEKIDNWKKKILHGRHPHDLEQTHIDTIASNKWLKIGNLFPETEGFIIAIQDQIINTKNYRKYIIKDPTVTNDKCRRCHIQSETIQHITGACTTLTQTDYIHRHNQIVNIIHQKLAIKYTLIQDTNTPFYKYMPQSVLENNTHKIYYDRAILTDKTIHYNRPDVILQDKTKKITYIIDIAVPNTHNLQKTISEKISKYSDLKDEVTRIWRQDKVYIIPIVLSTTGVIP

SEQ ID NO: 21077 - protein, 1305 aa, Laspeyria flexula
MLLRSKRIGPLPGGDRRGTPGADAGCHSMRTVSGVELNRLAPSGSSEQSTANQHNQNQNVNSDNNSLNSSLSIVEPFSPSTNSYNPTPVSSADENSRGTPTPTLSVAQEVNAFLPASTKAGKARVRMSWSQDVNIFIMRTYYYITKLETDMTTYRKNLHQIFSTQYPHVKVTQQRVSDQRRTIVRNKLLPGELLNQLKEEIRLQLLQEDTDNYRETRLLEPTQEQTETYSQPSQLNPSHTTPYLQQLTQPSQNLFTQISHISTQTDNLTLILENEVDTFVDRNPVIELHEQQLLDKLKTALTQYSGMDPGCRPRLPKLKYSFKLRQLVHIFNTNILPQFDNKDILLTDLHTLVYCTALVITEELNYKITEYTGARTKHNDKPPWQIRLEKDIEKLRADCGRLTQYINNNRSNKVIKRVEAIFKDKITHTRHESNNKKPEEFLDTLKQKLALKVHRLRRYKKALQHKNDNILFNTNERTFYRNLLGTQNNTTSVENTELPTKADLEQFWSNIWEEQVQHKDQAEWITIEESKWNTIEEMEFEEITESDIKITTHRLHNWKSPGIDKVHNYWFKKLTSLHKSLARNFTDIILGKQNIPEFIATGLTYMLPKNKYSSQPSQYRPITCLPTIYKILTSTIAKKITKHVENNNIIAEEQKGCRQGHMGCKEQLIIDSTVHKHASTKNRNLHCTYIDYKKAFDSIPHTWLIKILEIYRINPTIITFMRNIMSHWKTTLHLSNQNNQITTRQISIRKGIYQGDSLSPLWFCLALNPLSNMLQQCRVGYTLKDTTQVTTISHLIYMDDIKLYASTDKGMKKLIETTTKFSKDINMEFGLDKCKTVHIIKGKVKPGDYEVDDSNNITAMEPNDLYKYLGYKQLKGLDHTNIKKILNTEYQNRINAICKTQLLGKHLIKALNTYAIPILTYSFGVIKWTKTDIEQIERTTRTTLTKHNHLHPKSAVERLTIKRNSGGRGLIDINHLWQKQIHRLKTFFHTKSATSNIHKAITQNDHNYTPLNLSEQTSENPSNHDPQIQKIDNWKKKVLHGRHAHDLEQPHVDTVASNKWLQIGNLFPETEGFMIAIQDQIINTRNHRKYIIKDPSITNDKCRRCHIQPETIQHITGACTTLTQTDYTHRHNQVANILHQTLALKHNLIQNTNTPYYNYTPQIVLENNSHKLYYDRAILTDKTIHYNRPDIVLQDKVKKYTYLIDIAVPNSHNLQKTITEKISKYAELKEEVGRIWRQDKVYVVPIVLSTTGIIPKHLHHSLKLLELPDTIYTKLQKAAILNTCRIVRKFLQIDENDISQQILTT

SEQ ID NO: 21078 - protein, 1179 aa, Laspeyria flexula
MSWSQDVNIFIMRTYYYITKLETDMTTYRKNLHQIFSTQYPHVKVTQQRVSDQRRAIVRNKLLPEELLNQLKEEIRLQLLQEDADNYRETRLLEPTQEQTETYSQPSQLNPSHTTSYLQQLTQPSQNLFTQISHISTQTDNLTLILENEVDTFVDRNPLIELHEQQLLDKLKTALTQYSGMDPGCRPRLPKLKYSFKLRQLVHIFNTNILPQFDNNDILLTDLHTLVYCTALVITEKLNYKITEYTGARTKHNDKPPWQIRLEKDIEKLRADCGRLTQYINNNRSNKVIKRVEAIFKDKITHTRHESNNKKPEEFLDTLKQKLALKVHRLRRYKKALQRKNDNILFNTNERTFYRNLLGTQNNTTSVENTELPTKADLEQFWSNIWEEQVQHKDQAEWITIEESKWNTIEEMEFEEITESDIKITTHRLHNWKSPGIDKVHNYWFKKLTSLHKSLARNFTDIILGKQNIPEFIATGLTYMLPKNKYSSQPSQYRPITCLPTIYKILTSTIAKKITKHVENNNIIAEEQKGCRQGHMGCKEQLIIDSTVHKHASTKNRNLHCTYIDYKKAFDSIPHTWLIKILEIYRINPTIVTFVRNIMSHWKTTLHLSNQNNQITTRQISIRKGIYQGDSLSPLWFCLALNPLSNMLQQCRVGYTLKDTTQVTTISHLIYMDDIKLYASTDKGMKKLIETTTKFSKDINMEFGLDKCKTVHIIKGKVKPGDYEVDDSNNITAMEPNDLYKYLGYKQLKGLDHTNIKKILNTEYQNRINAICKTQLLGKHLLKALNTYAIPILTYSFGVIKWTKTDIEQIERTTRTTLTKHNHLHSKSAVERLTIKRNSGGRGLKDINHLWQKQIHRLKTFFHTKSATSNIHKAITQNDHNYTPLNLSEQTSENPSNHDPQIQKIDNWKKKVLHGRHAHYLEQPHVDTVASNKWLQIGNLFPETEGFMIAIQDQIINTRNHRKYIIKDPSITNDKCRRCHIQPETIQHITGACTTLTQTDYTHRHNQVANILHQTLALIHNLIQNTNTPYYNYTPQIVLENNSHKLYYDRAILTDKTIHYNRPDIVLQDKVKKYTYLIDIAVPNSHNLQKTITEKISKYAELKEEVGRIWRQDKVYVVPIVLSTTGIIPKHLHHSLKLLELPDIIYTKLQKAAILNTCRIVRKFLQIDENEISQQILTT

SEQ ID NO: 21079 - protein, 1305 aa, Laspeyria flexula
MLLRSKRIGPLPGGDRRGTPGADAGCHSMRTVSGVELNRLAPSGSSEQSTANQHNQNQNVNSDNNSLNSSFSIVEPFSPSTNSYNPTPVSSADENSRGTPTPTLSVAQEVNAFLPASTKAGKARVRMSWSQDVNIFIMRTYYYITKLETDMTTYRKNLHQIFSTKYPHVKVTQQRVSDQRRTIVRNKLLPEELLNQLKEEIRLQLLQEDTDNYRETRLLEPTQEQTEIYTQPSQLNPSHTTSYLLQLTQPSQNLFTQISHISTQTDNLTLILENEVDTFVDRNPVIELHEQQLLDKLKTALTQYSGMDPGCRPRLPKLKYSFKLRQLVHIFNTNILPQFDNNDILLTDLHTLVYCTALVITEELNYKITESTGTRTKHNDKPPWQIRLEKDIEKLRADCGRLTQYINNNRSNKVIKRVEAIFNDKITHTRHESNNKKPEEFLDTLKQKLALKVHRLRRYKKALQRKNDNILFNTNERTFYRNLLGTQNNTTSVENTELPTKADLEQFWANIWEEQVQHKDQAEWITIEESKWNTIEEMEFEEITESDIKITTHRLHNWKSPGIDKVHNYWFKKLTSLHKSLARNFTDIILGKQNIPKFIATGLTYMLPKNKYSSQPSQYRPITCLPTIYKILTSTIAKKITKHVENNNIIAEEQKGCRQGHMGCKEQLIIDSTVHKHASTKNRNLHCTYIDYKKAFDSIPHTWLIKILEIYRINPTIVTFMRNIMPHWKTTLHLSNQNNQITTRQISIQKGIYQGDSLSPLWFCLALNPLSNMLQQCRVGYTLKDTTQVTTISHLIYMDDIKLYASTDKGMKKLIETTTKFSKDINMEFGLDKCKTVHIIKGKVKPGDYEVDDSNNITAMEPNDLYKYLGYKQLKGLDHTNIKKILNTEYQNRINAICKTHLLGKHLIKALNTYAIPILTYSFGVIKWTKTDIEQIERTTRTTLTKHNHLHPKSAIERLTIKRNSGGRGLIDINHLWQKQIHRLKTFFHTKSATSNIHKAITQNDHNYTPLNLSEQTSENPSNHDPQIQKIDNWKKKVLHGRHAHDLEQPHVDTVASNKWLQIGNLFPETEGFMIAIQDQIINTRNHRKYIIKDPSITNDKCRRCHIQPETIQHITGACTTLTQTDYTHRHNQVANILHQTLALKHNLIQNTNTPYYNYTPQIVLENNSHKLYYDRAILTDKTIHYNRPDIVLQDKVKKYTYLIDIAVPNSHNLQKTITEKISKYAELKEEVGRIWRQDKVYVVPIVLSTTGIIPKHLHHSLKLLELPETIYTKLQKAAILNTCRIVRKFLQIDENEISQQILTT

SEQ ID NO: 21080 - protein, 1264 aa, Apodemia mejicanus
METRSMYRKRKGPLPGGDRRGTPGADAGCYSIRTVSGEMLSRRALTGESQPENVTAEQTSSLSTPPVPSIPSTSLNTCTQIPAMDAVRETQVLLPASTKAGKTRVRMKWNYDVNLFIMRTYYYITKLETDMTIYRKKLHEQFMLKYPDINVSEQRLSDQRRAIERNKLLSQDTLNQLKEEIKRKLRDEDTSNCNDLHSEITPTLSLPSLLPSMTYPYTTSLSRSPLNLTPNVTKETENDIELIELNSYVKGIQIEEIKAKFETALALYAEIEPAERPRLPKLKYSRKLFELTHLFNNSVLCEHISTNLKLADIHTIIYCTAKVISEELNYKFNENTENTYQKKNMMPAWQHRLEKDIEKLRADIGIVTQYIKNNRSKKVLHKVQKIFHNNCIHTAHENTNKRPEEYLDTLKQKLALKAHRLKRYKKSQQRKNDNNLFVNNEKLFYRKLHKTPNNTNKHSNIEVPTKEQLEDYWSGIWEEKVQHNNSAKWIFEEEKRWANIEEMNFTEITEDEITHITSKLHNWKSPGVDKIHNFWYKKLTSLHKYLAKNLSDIIKGIQKIPDFIATGITYMLPKNNYSAQPSQYRPITCLPTIYKILTSALMEKINSHVTQNNILAEEQKGCRRGHMGCREQLIIDSTLLKHATTKNRNIHCTYIDYKKAFDSTPHTWLIQVMKIYKISTVIINFLQNIMTYWKTTLLLNISDISIKTREIAIHKGIYQGDALSPLWFCLALNPLSYLLQSDRVGYRLKINDTDTIISHLIYMDDIKLYAKNKKEMQALINSTTQFSKDINMQFGFDKCKSVNIIRGKIEPGDYIVDNNDAITAMEPADLYKYLGFHQLKGLDHTTIKQELVAEFKSRINSICKTQLSSRNLTKAINTYAIPILTYSFGVIKWTKTDIEKVERTIRTTMTKHNQLHPKSAIERLTIKRQDGGRGLIDIHHLWIKQIHSLKTFFRNKAQTSEIHKTIVNYDKNFTPLNLLHTEDENPNDSNPQIRKIETWKKKVLHGRHPHDLNQAHIDNKASNMFLQKGSLFPETEGFIIAIQDQVINTKNYRKYIIKDPNVTDDKCRKCKTQPETIQHITGACSCLTQTDYTHRHNQLTNIIHQKLAIKHQLIQNTHVPYYNYIPQTVLENVLYKLYYDRAVLTDKTIHCNRPDIILQDKSNKTTYLIDIAVPNSHNIQKTITEKMSKYSELQEEILRIWKQEKVYIVPIVVSTTGVIPYHIHNSLKTIDLEDNTYIMLQKAAILNTCRIVRKFLQQNETDLE

SEQ ID NO: 21081 - protein, 1265 aa, Apodemia duryi
METRSKRKLRGPLPGGDRRGTPGADAGCYSIRTVSGEMLSRRALTGESQPENATAEQTNKSSLSTPPVPSIPPTSLNTCTQIPAMDAVRETQVFLPASTKAGKTRVRMKWNYDVNLFIMRTYYYITKLETDMTIYRKKLHEQFMLKYPDINVSEQRLSDQRRAIERNMLLSQDTLNQLKEEIKRKLRDEDTSNCNDLPSEITPTISLPSLLPSMTYPYTTSLSRSPLNLTPNVTKETENDIELIELNSYVKGIQIEEIKAKFETALALYAEIEPAERPRLPKLKYSRKLFELTHLFNNSVLCEHISTNLKLADIHTIIYCTAKVISEELNYKLNENTENTYQKKNMMPAWQHRLEKDIKKLRADIGIVTQYIKNNRSKKVLHKVQKIFHNNCIHTAHENTNKRPEEYLDTLKQKLALKAHRLKRYKKSQQRKNDNNLFVNNEKLFYRKLHKTPNNTNKHSNIEVPTKEQLEDYWSGIWEEKVQHNNSAKWIFEEEKRWANIEEMNFTEITEDEITHITSKLHNWKSPGVDKIHNFWYKKLTSLHKYLAKNLSDIIKGIQKIPDFIATGITYMLPKNNYSAQPSQYRPITCLPTIYKILTSALMEKINSHVTQNNILAEEQKGCRRGHMGCREQLIIDSTLLKHATTKNRNIHCTYIDYKKAFDSTPHTWLIQVMKIYKISTVIINFLQNIMTYWKTTLLLNISDISIKTREIAIHKGIYQGDALSPLWFCLALNPLSYLLQSDRVGYRLKINNTNTIISHLIYMDDIKLYAKNKKEMQALINSTTQFSKDINMQFGFDKCKSVNIIRGKIEPGDYIVDDNDAITAMEPADLYKYLGFHQLKGLDHTTIKQELVAEFKSRINSICKTQLSSRNLTKAINTYAIPILTYSFGVIKWTKTDIEKVERTIRTTMTKHNQLHPKSAIERLTIKRQDGGRGLIDIHHLWIKQIHSLKTFFRNKAQTSEIHKTIVNYDKNFTPLNLLHTKDENPNDSNPQIRKIETWKKKVLHGRHPHDLNQAHIDNKASNMFLQKGSLFPETEGFIIAIQDQVINTKNYRKYIIKDPNVTDDKCRKCKTQPETIQHITGACSCLTQTDYTHRHNQLTNIIHQKLAIKHQLIQNTHLPYYNYIPQTVLENVLYKLYYDRAVLTDKTIHCNRPDIILQDKSNKTTYLIDIAVPNSHNIQKAITEKMSKYIELQEEILRIWKQEKVYIVPIVVSTTGVIPYHIHNSLKTIDLEDNTYIMLQKAAILNTCRIVRKFLQQNETDLE

SEQ ID NO: 21082 - protein, 1298 aa, Theope publius
METRNKRKLRGPLPGGDRRGTPGADAGCHSIRTVSGEMLNRRALTGDLVPENATAEQTQLESFSTELCMPSVLPLQTSSTTRRTSVPAMDVAREADAFLPVSTKAGKPRVRMKWSNDVNVFIMRTYYYITKLETDLTIYRKKLHEQFSLKYHDVNVSEQRLSDQRRTIERNKLLSQETLNQIKEEVKIKLQSEEVNSYNEHPTETFTQPLSTETITLPLSLQTPQTLITQSQTLSLTNLSHTHTTQASTQTETMTLVLENDIETLVTTATVTNEYTQVIKDKFRTALALYAGMDAKARPKLPKLKYSPKLFQLTHLFNQSILLEHTSLDLQLTDLHTIVYCTALVISEELNYKITEHIGNAYQKKDTTPAWQRRLEKDIAKLRADIGKLTQYITHNNRSKKVVDRVQQIFQNTTIHTKHENNNKRPEEYLDTLKQKLALKAHRLKRYKKSQQRKNDNNLFTTNEKLFYRNFTKNEHSKEESSNIEIPTQEQLEHFWSGIWEEQKSHNISAYWIPDEEKRWIDLDQMEFTEITEEEITQITSRLHNWKSPGIDKIHNFWYKKLTILHKHLAKNITEIIKGTQTLPDFIATGITYMLPKNKYCLQPSQYRPITCLTTIYKIITSVVMRKINSHITQNNILAEEQKGCRQGHMGCKEQLIIDSTLLKHATSRNRNLHCTYIDYKKAFDSIPHSWLLKILHIYKINPQIINFLQNTMTRWKTTLQLNVPTGNAITTREIAIKNGIYQGDALSPLWFCLALNPLSHLLQSDRVGYRLKSNNTEIIISHLIYMDDIKLYAKSDKEMQSLINTTTQFSNDINMLFGFDKCKTVHIIKGKIQPGDYQINASDTIAAMEPMDLYKYLGFYQLKGLDHTAIKQKLTVEFKSRINAICKTQLSSKNLIKALNTYAIPILTYSFGVIKWTKTDIEQIERKIRTIMTKHNQLHPKSAIERLFIKRQDGGRGLIDIQHLWQKQINSLKTFFHTKAETSKIHKAIVQHDKKYTPLNLEDINITTNLNNSNSHTKKIEDWKKKVLHGRHPHDLFQAHVDYKASNMWLKKGTLFPETEGFTIAIQDQVINTKNYRKYIIKDPTIADDKCRKCKTQPETIQHITGACSTLTQTDYTHRHNQLVNIIHQKLALKHKLIQNTNIPYYKYTPQTILENTSYKLYYDRAILTDRTIHFNRPDITLQDKCNKTTYLIDIAVPNTHNVQKTVAEKITKYTELKEEILRIWKQEKVYIVPIVISTTGVVPNQIHNSLKLIDLEDNTYITLQKAAILNTCRIVRKFLQIDENEIAQHSTSINSG

SEQ ID NO: 21083 - protein, 1304 aa, Gorgopas trochilus
METRSKKKRSGPLPGGDRRGTPGADAGCLSMRTVSGEELSRRTPTGSSENATAETDILTDRTTPIEPYSPSTVSYTPSVPTSPSISISSSKPESPTLTLNVAQVANAFLPASTKAGKPRVRMKWSKEINLFIMRTYYYITKLETDLTTYRKYLHEQFSRQYPEIQVTEQRIADQRRTIVKNKRLNEETLNQLKEEVKIQLEKDEQNNIDIPIDYQTIQPQIHYASQNHYTTQTSTQTTQPLDTTTNTQSLHIATQTESITITLENDINAIEDHNPNTEITAHEIYTRFRTALEQYSGMDPVVRPKLPKLRYSPKLFQLIYIFNHNIINQFMSENIQLTDIHTIIYCTALVISEKLGYKVSDFTHNKIPKNNKKPPWQIRIEKDIEKLRADCARVTQYVNGNRSSKIIKHVEIIFKTKATHTRHEEVNKTPEEFLDTLKQKLALKVNRLRRYKKAQQRKTDNIIFSTNEKIFYRNLHISQIDNNIEKITELPTAEELESFWSGIWEEKIEHNNNAEWIIDEEVRWSTIEEMEFIAITESDITSITNRLHNWKSPGIDKIHNFWYKKLVSLHKSIAKNFTDIILGKLEVPEFIATGITYMIPKLKYSPQPSQYRPITCLPTIYKILTSVITLKINTHIEHHNIIAEEQKGCRRGHMGCKEQLIIDSTIHKHATSKNRNLHCTYIDYKKAFDSIPHSWLVKILQIYKINPNIINFLRNVMTQWKTTLQLFTAQKSITTREIFIKKGIYQGDSLSPLWFCLALNPLSHMLKRCQVGYCLKLNTTDTIISHLIYMDDIKLYAKSERDIKKLLDTTTQFSKDINMEFGLDKCKLLHIKRGKVQPGDYTINNTDTITAMEPTDMYKYLGYKQLKGLDHTAIKNTLTIEYTKRINALCRTQLSGKHLFKSLNTYAVPILTYSFGIVKWTKTDIQRLERTTRTTLTKHNYLHPKSAIERLTIKRQDGGRGLIDINQLWQKQIAGLKSFFLTKSQTSDLHKVITLNDHNYTPLNLKEETNTTHTQNTNIISNPQQEKIEEWKKKTLHGRHRHDLEQPHVNTTASNKWLQIGNLYPETEGFMIAIQDQIVNTKNYRKYIIKDPKITSDKCRKCHTQPETIQHITGACITLTQTDYTHRHNQVANIIHQKLALNHKLIQHTTQTPYYQYTPQTVLENKTHKLYYDRAILTDKTIHYNRPDLTLQDKVNKVTYLIDIAVPNTHNLQKTITEKISKYTELQDEVARIWKQSKVFIVPIVVSTTGVIPTHLRRSLKQLNLKENTYITLQKAAILNTCRIVRKFLKIEENEMLPHPITSN

SEQ ID NO: 21084 - protein, 1025 aa, Omphaloscelis lunosa
MRTYLYITKLETDMTTYRQQLHERFSRQYPEISVSEQRISDQRRTIVRNKLLSQGELDQLKEEVHTQLQKDTNTIILTQNTNENSIQDQPQSLTQSQPNFESQPYNQSQTSHISTQTESITLTLENDIETVAAVNQNPITDMYIQEIHDKFRTTLTQYSGMDPAARPKLPKLKYSPNLFRLVNLFNEDILKQFLSDDTQLIDINTLVYCTAVVISEELNFKITEHARKTIQRDTVKTPWQLRLEKDIEKLRADCGRLTHYINGSRSHKVVKRVEAIFKNNFTHTRHEINNRKPEQFLDTLKQKLALKVHRLRRYLKAQQRKKDNAIFATNEKLFYRNIQKPHTDSTTENDTDIPSKENLETFWSNIWEEQVHHNDKATWITEEAKKWTAIDEMEFKEITESEITYLTARLHNWKSPGIDKIQNFWYKKLTILHKSNAKNLTDIVLGEQNIPEFIATGITYMLPKTKNTSEPSQYRPITCLPTIYKILTSAITNKINSHIGHHNIIAEEQKGCRRGHMGCKEQLVIDSTIHKHATTKNRNLHCTYIDYQKAFDSIPHSWLIQILEIYKINPKRIEFLRIVMTRWKTTLQINNRLGTLLTRQIHIKKGIYQGDSLSPLWFCLALNPLSHLLNRCRAGYNFKNNTGETIISHLIYMDDIKLYAKTVKEMKTLIEVTTTFSQDINMQFGLDKCRTLHIIKGKVKPGNYAVNDTDTIAAMEPTDLYKYLGYKQLKGLDHTTIKQTLNTEYRRRINAICKTQLSGKHLIKALNTFAIPILTYSFGVIKWSKTDIEHLERNTRTTLTKHNNLHPKSAIERLTIKRQNGGRGLIDIHHLWQKQITSLKTFFYTKSRTSNIHKAIAQNDFNYTPLNLNEHRDTTQITSDDPHEQKIENWKKKVLHGRHPHDLEQSHVNKLASNKFLKIGNLFPETEGFIIAIQDQIINTKNYRKFIIKDPSVTNDKCRKCHIQPETIQHITGACTTLTQTDYTHRHNQVANVIHQKLAVKYTLIQDTNTPYYNYIPQTILENDT

SEQ ID NO: 21085 - protein, 1306 aa, Omphaloscelis lunosa
METRSKRKRIGPLPGGDRRGTPGADAGCLSMRTVSGEELNRRAPTDKDATAEAIDDGDRLTNRTDTPVEPYSPSTVSYVPSKTPSPSISSSSIPSSLPIPSFNTVSPSPVLNVAREVSAFLPASTKAGKARVRMRWSKEVNLFIMRTYLYITKLETDMTTYRQQLHERFSRQYPEISVSEQRISDQRRTIVRNKLLSQGELDQLKEEIHTQLQQDTNTIILTQNTNENSIQDQPQSLTQSQPNFESQPYNQSQTSHISTQTESITLTLENDIETVAAVNQNPITDMYIQEIHDKFRTTLTQYSGMDPAARPKLPKLKYSPNLFRLVNLFNEDILKQFLSDDTQLIDINTLVYCTAVVISEELNFKITEHARNTIQRDTVKPPWQLRLEKDIEKLRADCGRLTHYINGSRSHKVVKRVEAIFKNNLTHTRHEINNRKPEQFLDTLKQKLALKVHRLRRYLKAQQRKKDNAIFATNEKLFYRNIQKPHTDSTTESDTDIPSKENLETFWSNIWEEQVHHNDKATWITEEATKWTAIDEMEFKEITESEITYLTARLHNWKSPGIDKIQNFWYKKLTILHKSIAKNLTDIVLGEQNIPEFIATGITYMLPKTKNTSEPSQYRPITCLPTIYKILTSAITNKINSHIEHHNIIAEEQKGCRRGHMGCKEQLVIDSTIHKHATTKNRNLHCTYIDYQKAFDSIPHSWLIQILEIYKINPKIIEFLRIVMTRWKTTLQINNRLGTLLTRQIHIKKGIYQGDSLSPLWFCLALNPLSHLLNRCRAGYNFKNNTGETIISHLIYMDDIKLYAKTVKEKKTLIEVTTTFSQDINMQFGLDKCRTLHIIKGKVKPGNYAVNDTDTIAAMEPTDLYKYLGYKQLKGLDHTKIKQTLNTEYRRRINAICKTQLSGKHLIKALNTFAIPILTYSFGVIKWSKTDIEHLERITRTTLTKHNNLHPKSAIERLTIKRQNGGRGLIDIHHLWQKQITSLKTFFYTKSRTSNIHKAIAQNDFNYTPLNLNEHRDTTQITSDDPHEQKIENWKKKVLHGRHPHDLEQSHVNKLASNKFLKIGNLFPETEGFIIAIQDQIINTKNYGKFIIKDPSVTNDKCRKCHIQPETIQHITGACTTLTQTDYTHRHNQVANVIHQKLAVKYTLIQDTNTPYYNYIPQTILENDTHKLYFDRAILTDKTIHYNRPDITLQDKINKVTYLIDIAVPNTHNIQKTISEKISKYAELKDEVTRIWRQQKVYVVPIVLSTTGVIPNHLLHSLKLLNLKETLYITLQKAAILNTCRIVRKFMQIDEYEIGPHNTSST

SEQ ID NO: 21086 - protein, 1306 aa, Omphaloscelis lunosa
METRSKRKRIGPLPGGDRRGTPGADAGCLSMRTVSGEELNRRAPTDKDATAEAIDDGDRLTNRTDTPVEPYSPSTVSYVPSKTPSPSISSSSIPSSPPIPSFNTVSPSPVLNVAREVSTFLPASTKAGKARVRMRWSKEVNLFIMRTYLYITKLETDMTTYRQQLHERFSRQYPEISVSEQRISDQRRTIVRNKLLSQGELDQLKEEVHTQLQQDTNTIILTQNTNENSIQDQPQSLTQSQPNFESQPYNQSQTSHISTQTESITLTLENDIETVAAVNQNPITDMYIQEIHDKFRTTLTQYSGMDPAARPKLPKLKYSPNLFRLVNLFNEDILKQFLSDDTQLIDINTLVYCTAVVISEELNFKITEHARNTIQRDTVKPPWQLRLEKDIEKLRADCGRLTHYINGSRSHKVVKRVEAIFKNNFTHTRHEINNRKPEQFLDTLKQKLALKVHRLRRYLKAQQRKKDNAIFATNEKLFYRNIQKPHTDSTTENDTDIPSKENLETFWSNIWEEQVHHNDKATWITEEATKWTAIDEMEFKEITESEITYLTARLHNWKSPGIDKIQNFWYKKLTILHKSIAKNLTDIVLGEQNIPEFIATGITYMLPKTKNTSEPSQYRPITCLPTIYKILTSAITNKINSHIEHHNIIAEEQKGCRRGHMGCKEQLVIDSTIHKHATTKNRNLHCTYIDYQKAFDSIPHSWLIQILEIYKINPKIIEFLRIVMTRWKTTLQINNRLGTLLTRQIHIKKGIYQGDSLSPLWFCLALNPLSHLLNRCRAGYNFKNNTGETIISHLIYMDDIKLYAKTVKEMKTLIEVTTTFSQDINMQFGLDKCRTLHIIKGKVKPGNYAVNDTDTIAAMEPTDLYKYLGYKQLKGLDHTTIKQTLNTEYRRRINAICKTQLSGKHLIKALNTFAIPILTYSFGVIKWSKTDIEHLERITRTTLTKHNNLHPKSAIERLTIKRQNGGRGLIDIHHLWQKQITSLKTFFYTKSRTSNIHKAIAQNDFNYTPLNLNEHRDTTQITSDDPHEQKIENWKKKVLHGRHPHDLEQSHVNKLASNKFLKIGNLFPETEGFIIAIQDQIINTKNYRKFIIKDPSVTNDKCRKCHIQPETIQHITGACTTLTQTDYTHRHNQVANVIHQKLAVKYTLIQDTNTPYYNYIPQTILENDTHKLYFDRAILTDKTIHYNRPDITLQDKINKVTYLIDIAVPNTHNIQKTISEKISKYAELKDEVTRIWRQQKVYVVPIVLSTTGVIPNHLLHSLKLLNLKETLYITLQKAAILNTCRIVRKFMQIDEYEIGPHNTSST

SEQ ID NO: 21087 - protein, 1309 aa, Sesamia nonagrioides
METRSKRKRIGPLPGGDRRGALGADAKCLSMRTVSGEELSRRTPTDKDATAEVIDGGDRQTNRTDTPVDPYSPSTASYAPSNSSSPSIPSSPIPPSPPIINFYTLSPTPALNVAREVSTFLPASTKAGKPRVRMRWSKEVNLFIMRTYFYTTKLETDMTTYRQQLHEHFSRQYPEISVSEQRISDQRRAIVRNALLSQTELDHLKEEVRTQLQHESENYANTNTIMPTQNTNVEPQALTPLHTINQCLADNQTSHLSTQIESITLTLENDIEIATATNEITDMFIQDIHDKFKTTLTLYSGMDPAARPKLPKLKYSRNLFRLVNIFNEYILKQFLSNDTQLIDIHTLIYCTAAVISEELNFKITEHARNTIQRDTGKPPWQQRLEKDIEKLRADCGRLTHYINGIRSHKVVKKVEAIFKNNLTHTRHENNNRKPEEFLDTLKQKLALKVHRLRRYLKAQKRKKDNAIFSTNEKLFYRNLQKPHTSTENDTETPSKEHLETFWSNIWEEQVCHNDKATWITEEATKWRAIGEMEFKEITETEITHITSRLHNWKSPGIDKIQNFWYKKLTVLHKSIAKNLTDIVLGDQNVPEFIATGITYMLPKTKYTSEPSQYRPITCLPTIYKILTSAITHKINSHVEHHSIIAEEQKGCRRGHMGCKEQLVIDSTIHKHATTKNRNLHCTYIDYQKAFDSIPHSWLIQILQIYKINPKIIDFLRIIMTRWKTTLHINNRLSSLITRQIHIRKGIYQGDSLSPLWFCLALNPLSNLLNRCRVGYQFKNNSEETTISHLIYMDDIKLYAQTEKQMKTLIDITKTFSQDINMQFGLDKCRTLHIIKGKVKPGNYTVSNTDIIAAMEPSDLYKYLGYKQLKRLEHTAIKQTLNTEYRSRINAICKTQLSGKHLIKALNTFAIPILTYSFGIIKWSKTDIEQLERTTRTTLTKHNNLHPKSAIERLVIKRQNGGRGLIDIHQLWQKQINRLQTFFYTKSRTSNIHKAITLNDFNYTPLNLNEQNTQDTNTIYPQTQKIENWKKKALHGRHPHDLEQSHINKLASNKWLKIGNLFPETEGFIIAIQDQVINTKNYRKFIIKDPSVTNDKCRRCHVQAETIQHITGEGYACSRYVLYGFCLNMASADTQTDYTHRHNQIANIIHQKLALKHRLIQNTNTPYYKYTPHSVLENDTYKLYYDRAILTDRTIHYNRPDITLQDKVRKITYLIDIAVPNTHNLQKTITEKISKYTELKEEITRIWRQEKVYVVPIVLSTTGVIPNHLLCSLKLIDLEEPTYIDMQKAAILNTCRIVRKFMQLEENTTP

SEQ ID NO: 21088 - protein, 1293 aa, Sesamia nonagrioides
METRSKRKRIGPLPGGDRRGALGADAKCLSMRTVSGEELSRRTPTDKDATAEVIDGGDRQTNRTDTPVDPYSPSTASYAPSNSSSPSIPSSPIPPSPPIINFYTLSPTPALNVAREVSTFIPASTKAGKPRVRMRWSKEVNLFIMRTYFYTTKLETDMTTYRQQLHEHFSRQYPEISVSEQRISDQRRAIVRNALLSQTELDHLKEEVRTQLQHESENYANTNTIMPTQNTNVEPQALTPLHTINQCLADNQTSHLSTQIESITLTLENDIEIATATNEITDMYIQDIHDKFKTTLTLYSGMDPAARPKLPKLKYSRNLFRLVNIFNEYILKQFLSNDTQLIDIHTLIYCTAAVISEELNFKITEHARNTIQRDTGKPPWQQRLEKDIEKLRADCGRLTHYINGIRSHKVVKKVEAIFKNNLTHTRHENNNRKPEEFLDTLKQKLALKVHRLRRYLKAQKRKKDNAIFSTNEKLFYRNLQKTHTSTENDTDTPSKEHLETFWSNIWEEQVCHNDKATWITEEATKWRAIGEMEFKEITETEITHITSRLHNWKSPGIDKIQNFWYKKLTVLHKSIAKNFTDIVLGDQNIPEFIATGITYMLPKTKYTSEPSQYRPITCLPTIYKILTSAITHKINSHVEHHSIIAEEQKGCRRGHMGCKEQLVIDSTIHKHATTKNRNLHCTYIDYQKAFDSIPHSWLIQILQIYKINPKIIDFLRIIMTRWKTTLHINNRLSSLITRQIHIRKGIYQGDSLSPLWFCLALNPLSNLLNRCRVGYQFKNNSEETTISHLIYMDDIKLYAQTEKQMKTLIDITKTFSQDINMQFGLDKCRTLHIINGKVKPGNYTVSNTDIIAAMEPSDLYKYLGYKQLKRLEHTAIKQTLNTEYRSRINAICKTQLSGKHLIKALNTFAIPILTYSFGIIKWSKTDIEQLERITRTTLTKHNNLHPKSAIERLVIKRQNGGRGLIDIHQLWQKQINRLQTFFYTKSRTSNIHKAITLNDFNYTPLNLNEQNTQDTNTIYPQTQKIENWKKKALHGRHPHDLEQSHINKLASNKWLKIGNLFPETEGFIIAIQDQVINTKNYRKFIIKDPSVTNDKCRRCHVQAETIQHITGACIALTQTDYTHRHNQIANIIHQKLALKHRLIQNTNTPYYKYTPHSVLENDTYKLYYDRAILTDRTIHYNRPDITLQDKVRKITYLIDIAVPNTHNLQKTITEKISKYTELKEEITRIWRQEKVYVVPIVLSTTGVIPNHLLCSLKLIDLEESTYIDMQKPAILNTCRIVRKFMQLEENTTP

SEQ ID NO: 21089 - protein, 1160 aa, Sesamia nonagrioides
MRWSKEVNLFIMRTYFYTTKLETDMTTYRQQLHEHFSRQYPEISVSEQRISDQRRAIVRNALLSQTELDHLKEEVRTQLQHESENYANTNTIMPTQNTNVEPQALTPLHTINQCLADNQTSHLSTQIESITLTLENDIEIATATNEITDMYIQDIHDKFKTTLTLYSGMDQAARPKLPKLKYSRNLFRLVNIFNEYILKQFLSNDTQLIDIHPLIYCTAAVISEELNFKITEHARNTIQRDTGKPPWQQRLEKDIEKLRADCGRLTHYINGIRSHKVVKKVEAIFKNNLTHTRHENNNRKPEEFLDTLKQKLALKVHRLRRYLKAQKRKKDNAIFSTNEKFFYRNLQKPHTSTENDTDTPSKEHLETFWSNIWEEQVCHNDKATWITEEATKWRAIGEMEFKEITETEITHITSRLHNWKSPGIDKIQNFWYKKLTVLHKSIAKNLTDIVLGDQNIPEFIATGITYMLPKTKYTSEPSQYRPITCLPTIYKILTSAITHKINSHVEQHSIIAEEQKGCRRGHMGCKEQLVIDSTIHKHATTKNRNLHCTYIDYQKAFDSIPHSWLIQILQIYNINPKIIDFLRIIMTRWKTTLHINNRLSSLITRQIHIRKGIYQGDYLSPLWFCLALNPLSNLLNRCRVGYQFKNNSEETTISHLIYMDDIKLYAQTEKQMKTLIDITKTFSQDINMQFGLDKCRTLHIIKGKVKPGNYTVSNTDIIAAMEPSDLYKYLGYKQLKRLEHTAIKQTLNTEYRSRINAICKTQLSGKHLIKALNTFAIPILTYSFGIIKWSKTDIEQLERTTRITLTKHNNLHPKSAIERLVIKRQNGGRGLIDIHQLWQKQINRLQTFFYTKSRTSNIHKAITLNDFNYTPLNLNEQNTQDTNTIYPQTQKIENWKKKALHGRHPHDLEQSHINKLASNKWLKIGNLFPETEGFIIAIQDQVINTKNYRKFIIKDPSVTNDKCRRCHVQAETIQHITGACIALTQTDYTHRHNQIANIIHQKLALKHRLIQNTNTPYYKYTPHSVLENDTYKLYYDRAILTDRTIHYNRPDITLQDKVRKITYLIDIAVPNTHNLQKTITEKISKYTELKEEITRIWRQEKVYVVPIVLSTTGVIPNHLLCSLKLIDLEESTYIDMQKAAILNTCRIVRKFMQLEENTTP

SEQ ID NO: 21090 - protein, 1160 aa, Sesamia nonagrioides
MRWSKEVNLFIMRTYFYTTKLETDMTTYRQQLHEHFSRQYPEISVSEQRISDQRRAIVRNALLSQTELDHLKEEVRTQLQHESENYANTNTIMPTQNTNVEPQALTPLHTINQCLADNQTSHLSTQIESITLTLENDIEIATATNEITDMYIQDIHDKFKTTLTLYSGMDPAARPKLPKLKYSRNLFRLVNIFNEYILKQFLSNDTQLIDIHTLIYCTAAVISEELNFKITEHARNTIQRDTGKPPWQQRLEKDIEKLRADCGRLTHYINGIRSHKVVKKVEAIFKNNLTHTRHENNNRKPEEFLDTLKQKLALKVHRLRRYLKAQKRKKDNAIFSTNEKLFYRNLQKPHTSTENDTETPSKEHLETFWSNIWEEQVCHNDKATWITEEATKWRAIGEMEFEDITETEITHITSRLHNWTSPGIDKIQNFWYKKLTVLHKSIAKNLTDIVLGDQNIPEFIATGITYMLPKTKYTSEPSQYRPITCLPTIYKILTSAITHKINSHVEHHSIIAEEQKGCRRGHMGCKEQLVIDSTIHKHATTKNRNLHCTYIDYQKAFDSIPHSWLIQILQIYKINPKIIDFLRIIMTRWKTTLHINNRLSSLITRQIHIRKGIYQGDSLSPLWFCLALNPLSNLLNRCRVGYQFKNNSEETTISHLIYMDDIKLYAQTEKQMKTLIDITKTFSQDINMQFGLDKCRTLHIIKGKVKPGNYTVSNTDIIAAMEPSDLYKYLGYKQLKRLEHTAIKQTLNTEYRSRINAICKTQLSGKHLIKALNTFAIPILTYSFGIIKWSKTDIEQLERTTRTTLTKHNNLHPKSAIERLVIKRQNGGRGLIDIHQLWQKQINRLQTFFYTKSRTSNIHKAITLNDFNYTPLNLNEQNTQDTNTIYPQTQKIENWKKKALHGRHPHDLEQSHINKLASNKWLKIGNLFPETEGFIIAIQDQVINTKNYRKFIIKDPSITNDKCRRCHVQAETIQHITGACIALTQTDYTHRHNQIANIIHQKLALKHRLIQNTNTPYYKYTPHSVLENDTYKLYYDRAILTDRTIHYNRPDITLQDKVRKITYLIDIAVPNTHNLQKTITEKISKYTELKEEITRIWRQEKVYVVPIVLSTTGVIPNHLLCSLKLIDLEESTYIDMQKAAILNTCRIVRKFMQLEENTTP

SEQ ID NO: 21091 - protein, 1293 aa, Sesamia nonagrioides
METRSKRKRIGPLPGGDRRGALGADAKCLSMRTVSGEELSRRTPTDKDATAEVIDGGDRQTNRTDTPVDPYSPSTASYAPSNSSSPSIPSSPIPSSPPIINFYTLSPTPALNVAREVSTFLPASTKAGKPRVRMRWSKEVNLFIMRTYFYTTKLETDMTTYRQQLHEHFSRQYPEISVSEQRISDQRRAIVRNALLSQTELDHLKEEVRTQLQHESENYANTNTIMPTQNTNVEPQAHPPLHTINQCLADNQTSHLSTQIESITLTLENDIEIATATNEITDMYIQDIHDKFKTTLTLYSGMDPAARPKLPKLKYSRNLFRLVNIFNEYILKQFLSNDTQLMDIHTLIYCTAAVISEELNFKITEYARNTIQRDTGKPPWQQRLEKDIEKLRADCGRLTHYINGIRSHKVVKKVEAIFKNNLTHTRHENNNRKPEEFLDTLKQKLALKVHRLRRYLKAQKRKKDNAIFSTNEKLFYRNLQKPHTSTENDTDTPSKEHLETFWSNIWEEQVCHNDKATWITEEATKWRAIGEMEFKEITETEITHITSRLHNWKSPGIDKIQNFWYKKLTVLHKSIAKNLTDIVLGDQNIPEFIATGITYMLPKTKYTSEPSQYRPITCLPTIYKILTSAITHRINSHVEHHSIIAEEQKGCRRGHMGCKEQLVIDSTIHKHATTKNRNLHCTYIDYQKAFDSIPHSWLIQILQIYKINPKIIDFLRIIMTRWKTTLHINNRLSSLITRQIHIRKGIYQGDSLSPLWFCLALNPLSNLLNRCRVGYQFKNNSEETTISHLIYMDDIKLYAQTEKQMKTLIDITKTFSQDINMQFGLDKCRTLHIIKGKVKPGNYTVSNTDIIAAMEPSDLYKYLGYKQLKRLEHTAIKQTLNTEYRSRINAICKTQLSGKHLIKALNTFAIPILTYSFGIIKWSKTDIEQLERTTRTTLTKHNNLHPKSAIERLVIKRQNGGRGLIDIHQLWQKQINRLQTFFYTKSRTSNIHKAITLNDFNYTPLNLNEQNTQDTNTIYPQTQKIENWKKKALHGRHPHDLEQSHINKLASNKWLKIGNLFPETEGFIIAIQDQVINTKNYRKFIIKDPSVTNDKCRRCHVQAETIQHITGACIALTQTDYTHRHNQIANIIHQKLALKHRLIQNTNTPYYKYTPHSVLENDTYKLYYDCAILTDRTIHYNRPDITLQDKVRKITYLIDIAVPNTHNLQKTITEKISKYTELKEEITGIWRQEKVYVVPIVLSTTGVIPNHLLCSLKLIDLEESTYIDMQKAAILNTCRIVRKFMQLEENTTP

SEQ ID NO: 21092 - protein, 1291 aa, Sesamia nonagrioides
METRSKRKRIGPLPGGDRRGALGADAKCLSMRTVSGEELSRRTPTDKDATAEVIDGGDRQTNRTDTPVDPYSPSTASYAPSNSSSPSIPSSPIPPSPPIINFYTLSPTPALNVAREVSTFLPASTKAGKPRVRMRWSKEVNLFIMRTYFYTTKLETDMTTYRQQLHEHFSRQYPEISVSEQRISDQRRAIVRNALLSQTELDHLKEEVRTQLQHESVDYANTNTIMPTQNTNVEALTPLHTINQCLADNQTSHLSTQIESITLTLENDIEIATATNEITDMYIQDIHDKFKTTLTLYSGMDPAARPKLPKLKYSRNLFRLVNIFNEYILKQFLSNDTQLIDIHTLIYCTAAVISEELNFKITEHARNTIQRDTGKPPWQQRLEKDIEKLRADCGRLTHYINGIRSHKVVKKVEAIFKNNLTHTRHENNNRKPEEFLDTLKQKLALKVHRLRRYLKAQKRKKDNAIFSTNEKLFYRNLQKPHTSTENDTDTPSKEHLETFWSNIWEEQVCHNDKATWITEEATKWRAIGEMEFEDITETEITHITSRLHNWKSPGIDKIQNFWYKKLTVLHKSIAKNLTDIVLGDQNIPEFIATGITYMLPKTKYTSEPSQYRPITCLPTIYKILTSAITHKINSHVEHHSIIAEEQKGCRRGHMGCKEQLVIDSTIHKHATTKNRNLHCTYIDYQKAFDSIPHSWLIQILQIYKINPKIIDFLRIIMTRWKTTLHINNRLSSLITRQIHIRKGIYQGDSLSPLWFCLALNPLSSLLNRCRVGYQFKNNSEETTISHLIYMDDIKLYAQTEKQMKTLIDITKTFSQDINMQFGLDKCRTLHIIKGKVKPGNYTVSNTDIIAAMEPSDLYKYLGYKQLKRLEHTAIKQTLNTEYRSRINAICKTQLSGKHLIKALNTFAIPILTYSFGIIKWSKTDIEQLERTTRTTLTKHNNLHPKSAIERLVIKRQNGGRGLIDIHQLWQKQINRLQTFFYTKSRTSNIHKAITLNDFNYTPLNLNEQNTQDTNTIYPQTQKIENWKKKALHGRHPHDLEQSHINKLASNKWLKIGNLFPETEGFIIAIQDQVINTKNYRKFIIKDPSITNDKCRRCHVQAETIQHITGACIALTQTDYTHRHNQIANIIHQKLALKHRLIQNTNTPYYKYTPHSVLENDTYKLYYDRAILTDRTIHYNRPDITLQDKVRKITYLIDIAVPNTHNLQKTITEKISKYTELKEEITRIWRQEKVYVVPIVLSTTGVIPNHLLCSLKLIDLEESTYIDMQKAAILNTCRIVRKFMQLEENTTP

SEQ ID NO: 21093 - protein, 1293 aa, Sesamia nonagrioides
METRSKRKRIGPLPGGDRRGALGADAKCLSMRTVSGEELSRRTPTDKDATAEVIDGGDRQTNRTDTPVDPYSPSTASYAPSDSSSPSIPSSPIPPSPPIINFYTLSPTPALNVAREVSTFLPASTKAGKPRVRMRWSKEVNLFIMRTYFYTTKLETDMTTYRQQLHEHFSRQYPEISVSEQRISDQRRAIVRNALLSQTELDHLKEEVRTQLQHESENYANTNTIMPAQNTNVEPQALTPLHTINQCLADNQTSHLSTQIESITLTLENDIEIATTTNEITDMYIQDIHDKFKTTLTLYSGMDPAARPKLPKLKYSRNLFRLVNIFNEYILKQFLSNDTQLIDIHTLIYCTAAVISEELNFKITEHARNTIQRDTGKPPWQQRLEKDIEKLRADCGRLTHYINGTRSHKVVKKVEAIFKNNLTHTRHENNNRKPEEFLDTLKQKLALKVHRLRRYLKAQKRKKDNAIFSTNEKLFYRNLQKPHTSTENDTDTPSKDHLETFWSNIWEELVCHNDKATWITEEATKWRAIGEMEFKEITETEITHITSRLHNWKSPGIDKIQNFWYKKLTVLHKSIAKNLTDIVLGDQNIPEFIATGITYMLPKTKYTSEPSQYRPITCLPTIYKILTSAITHKINSHVEHHSIIAEEQKGCRRGHMGCKEQLVIDSTIHKHATTKNRNLHCTYIDYQKAFDSIPHSWLIQILQIYKINHKIIDFLRIIMTRWKTTLHINNRLSSLITRQIHIRKGIYQGDSLSPLWFCLALNPLSNLLNRCRVGYQFKNNSEETTISHLIYMDDIKLYAQTEKQMKTLIDITKTFSQDINMQFGLDKCRTLHIIKGKVKPGNYTVSNTDIIAAMESSDLYKYLGYKQLKRLEHIAIKQTLNTEYRSRINAICKTQLSGKHLIKALNTFAIPILTYSFGIIKWSKTDIEQLERITRTTLTKHNNLHPKSAIERLVIKRQNGGRGLIDIHQLWQKQINRLQTFFYTKSRTSNIHKAITLNDFNYTPLNLNEQNTQDTNTIHPQTQKIENWKKKALHGRHPHDLEQSHINKLASNKWLKIGNLFPETEGFIIAIQDQVINTKNYRKFIIKDPSVRNDKCRRCHVQAETIQHITGACIALTQTDYTHRHNQIANIIHQKLALKHRLIQNTNTPYYKYTPHFVLENDTYKLYYDRAILTDRTIHYNRPDITLQDKVRKITYLIDIAVPNTHNLQKTITEKISKYTELKEEITRIWRQEKVYVVPIVLSTTGVIPNHLLCSLKLIDLEESTYIDMQKAAILNTCRIVRKFMQLEENTTP

SEQ ID NO: 21094 - protein, 1293 aa, Sesamia nonagrioides
METRSKRKRIGPLPGGDRRGALGADAKCLSMRTVSGEELSRRTPIDKDATAEVIDGGDRQTNRTDTPVDPYSPSTASYAPSNSSSPSIPSSPIPPSPPIINFYTLSPTPALNVAREVSTFLPASTKAGKPRVRMRWSKEVNLFIMRTYFYTTKLETDMTTYRQQLHEHFSRQYPEISVSEQRISDQRRAIVRNALLSQTELDHLKEEVRTQLQHESENYANTNTNMPTQNTNVEPQAHPPLHTINQCLADNQTSHLSTQIESITLTLENDIEIATATNEITDMYIQDIHDKFKTTLTLYSGMDPAARPKLPKLKYSRNRFRLVNIFNEYILKQFLSNDTQLIDIHTLIYCTAAVISEELNFKITEHARNTIQRDTGKPPWQQRLEKDIEKLRADCGRLTHYINGIRSHKVVKKVEAIFKNNLTHTRHENNNRKPEEFLDTLKQKLALKVHRLRRYLKAQKRKKDNAIFSTNEKLFYRNLQKPHTSTENDTDTPSKEHLETFWSNIWEEQVCHNDKATWITEEATKWRAIGEMEFKEITETEITHITSRLHNWKSPGIDKIQNFWYKKLTVLHKSIAKNLTDIVLGDQNIPEFIATGITYMLPKTKYTSEPSQYRPITCLPTIYKILTSAITHRINSHVEHHSIIAEEQKGCRRGHMGCKEQLVIDSTIHKHATTKNRNLHCTYIDYQKAFDSIPHSWLIQILQIYKINPKIIDFLRIIMTRWKTTLHINNRLSSLITRQIHIRKGIYQGDSLSPLWFCLALNPLSNLLNRCRVGYQFKNNSEETTISHLIYMDDIKLYAQTEKQMKTLIDITKTFSQDINMQFGLDKCRTLHIIKGKVKPGNYTVSNTDIIAAMEPSDLYKYLGYKQLKRLEHTAIKQTLNTEYRSRINAICKTQLSGKHLIKALNTFAIPILTYSFGIIKWSKTDIEQLERTTRTTLTKHNNLHPKSAIERLVIKRQNGGRGLIDIHQLWQKQINRLQTFFYTKSRTSNIHKAITLNDFNYTPLNLNEQNTQDTNTIYPQTQKIENWKKKALHGRHPHDLEQSHINKLASNKWLKIGNLFPETEGFIIAIQDQVINTKNYRKFIIKDPSVTNDKCRRCHVQAETIQHITGACIALTQTDYTHRHNQIANIIHQKLALKHRLIQNTNTPYYKYTPHSVLENDTYKLYYDRAILTDRTIHYNRPDITLQDKVRKITYLIDIAVPNTHNLQKTITEKISKYTELKEEITRIWRQEKVYVVPIVLSTTGVIPNHLLCSLKLIDLEESTYIDMQKAAILNTCRIVRKFMQLEENTTP

SEQ ID NO: 21095 - protein, 1293 aa, Sesamia nonagrioides
METRSKRKRIGPLPGGDRRGALGADAKCLSIRTVSGEELSRRTPTDKDATAEVIDGGDRQTNRTDTPVDPYSPSTASYAPSNSSSPSIPSSPIPPSPPIINFYTLSPTPALNVAREVSTFLPASTKAGKPRVRMRWSKEVNLFIMRTYFYTTKLETDMTTYRQQLHEHFSRQYPEISVSEQRISDQRRAIVRNALLSQTELDHLKEEVRTQLQHESENYANTNTIMPTQNTNVEPQALTPLHTINQCLADNQTSHLSTQIESITLTLENDIEIATATNEITDMYIQDIHDKFKTTLTLYSGMDPAARPKLPKLKYSRNLFRLVNIFNEYILKQFLSNDTQLIDIHTLIYCTAAVISEELNFKITEHARNTIQRDTGKPPWQQRLEKDIEKLRADCGRLTHYINGIRSHKVVKKVEAIFKNNLTHTRHENNNRKPEEFLDTLKQKLALKVHRLRRYLKAQKRKKDNAIFSTNEKLFYRNLQKTHTSTENDTDTPSKEHLETFWSNIWEEQVCHNDKATWITEEATKWRAIGEMEFKEITETEITHITSRLHNWKSPGIDKIQNFWYKKLTVLHKSIAKNLTDIVLGDQNIPEFIATGITYMLPKTKYTSEPSQYRPITCLPTIYKILTSAITHKINSHVEHHSIIAEEQKGCRRGHMGCKEQLVIDSTIHKHATTKNRNLHCTYIDYQKAFDSIPHSWLIQILQIYKINPKIIDFLRIIMTRWKTTLHINNRLSSLITRQIHIRKGIYQGDSLSPLWFCLALNPLSNLLNRCRVGYQFKNNSEETTISHLIYMDDIKLYAQTEKQMKTLIDITKTFSQDINMQFGLDKCRTLHIIKGKVKPGNYTVSNTDIIAAMEPSDLYKYLGYKQLKRLEHTAIKQTLNTEYRSRINAICKTQLSGKHLIKALNTFAIPILTYSFGIIKWSKTDIEQLERITRTTLTKHNNLHPKSAIERLVIKRQNGGRGLIDIHQLWQKQINRLQTFFYTKSRTSNIHKAITLNDFNYTPLNLNEQNTQDTNTIYPQTQKIENWKKKALHGRHPHDLEQSHINKLASNKWLKIGNLFPETEGFIIAIQDQVINTKNYRKFIIKDPSVTNDKCRRCHVQAETIQHITGACIALTQTDYTHRHNQIANIIHQKLALKHRLIQNTNTPYYKYTPHSVLENDTYKLYYDRAILTDRTIHYNRPDITLQDKVRKITYLIDIAVPNTHNLQKTITEKISKYTELKEEITRIWRQEKVYVVPIVLSTTGVIPNHLLCSLKLIDLEESTYIDMQKAAILNTCRIVRKFMQLEENTTP

SEQ ID NO: 21096 - protein, 1293 aa, Sesamia nonagrioides
METRSKRKRIGPLPGGDRRGALGADAKCLSMRTVSGEELSRRTPTDKDATAEVIDGGDRQTNRTDTPVDPYSPSTASYAPSNSSSPSIPSSPIPPSPPIINFYTLSPTPALNVAREVSTFLPASTKAGKPRVRMRWSKEVNLFIMRTYFYTTKLETDMTTYRQQLHEHFSRQYPEISVSEQRISDQRRAIVRNALLSQTELDHLKEEIRTQLQHESENYANTNTNMPTQNTNVEPQAHPPLHTINQCLADNQTSHLSTQIESITLTLENDIEIATATNEVIDMYIQDIHDKFKTTLTLYSGMDPAARPKLPKLKYSRNLFRLVNIFNEYILKQFLSNDTQLIDIHTLIYCTAAVISEELNFKITEHARNTIQRDTGKPPWQQRLEKDIEKLRADCGRLTHYINGIRSHKVVKKVEAIFKNNLTHTRHENNNRKPEEFLDTLKQKLALKVHRLRRYLKAQKRKKDNAIFSTNEKLFYRNLQKPHTSTENDTDTPSKEHLETFWSNIWEEQVCHNDKATWITEEATKWRAIGEMEFKEITETEITHITSRLHNWKSPGIDKIQNFWYKKLTVLHKSIAKNLTDIVLGDQNIPEFIATGITYMLPKTKYTSEPSQYRPITCLPTIYKILTSAITHRINSHVEHHSIIAEEQKGCRRGHMGCKEQLVIDSTIHKHATTKNRNLHCTYIDYQKAFDSIPHSWLIQILQIYKINPKIIDFLRIIMTRWKTTLHINNRLSSLITRQIHIRKGIYQGDSLSLLWFCLALNPLSNLLNRCRVGYQFKNNSEETTISHLIYMDDIKLYAQTEKQMKTLIDITKTFSQDINMQFGLDKCRTLHIIKGKVKPGNYTVSNTDIIVAMEPSDLYKYLGYKQLKRLEHTAIKQTLNTEYRSRINAICKTQLSGKHLIKALNTFGIPILTYSFGIIKWSKTDIEQLERTTRTTLTKHNNLHPKSAIERLVIKRQNGGRGLIDIHQLWQKQINRLQTFFYTKSCTSNIHKAITLNDFNYTPLNLNEHNTQDTNTIYPQTQKIENWKKKALHGRHPHDLEQSHINKLASNKWLKIGNLFPETEGFIIAIQDQVINTKNYRKFIIKDPSVTNDKCRRCHVQAETIQHITGACIALTQTDYTHRHNQIANIIHQKLALKHRLIQNTNTPYYKYTPHSVLENDTYKLYYDSAILTDRTIHYNRPDITLQDKVRKITYLIDIAVPNTHNLQKTITEKISKYTKLKEEITRIWRQEKVYVVPIVLSTTGVIPNHLLCSLKLIDLEESTYIDMQKAAILNTCRIVRKFMQLEENTTP

SEQ ID NO: 21097 - protein, 1293 aa, Sesamia nonagrioides
METRSKRKRIGPLPGGDRRGALGADAKCLSMRTVSGEELSRRTPTDKDATAEVIDGGDRQTNRTDTPVDPYSPSTASYAPSNSSSPSIPSSPIPPSPPIINFYTLSPTPALNVAREVSTFLPASTKAGKPRVRMRWSKEVNLFIMRTYFYTTKLETDMTTYRQQLHEHFSRQYPEISVSEQRISDQRRAIVRNALLSQTELDHLKEEVRTQLQHESEDYANTNTIMPTQNTNVEPQALTPLHTINQCLADNQTSHLSTQIESITLTLENDIEIATATNEITDMYIQDIHDKFKTTLTLYSGMDPAARPKLPKLKYSRNLFRLVNIFNEYILKQFLSNDTQLIDIHTLIYCTAAVISEELNFKITEHARNTIQRDTGKPPWQQRLEKDIEKLRADCGRLTHYINGIRSHKVVKKVEAIFKNNLTHTRHENNNRKPEEFLDTLKQKLALKVHRLRRYLKAQKRKKDNAIFSTNEKLFYRNLQKPHTSTENDTDTPSKEHLETFWSNIWEEQVCHNDKATWITEEATKWRAIGEMEFEDITETEITHITSRLHNWKSPGIDKIQNFWYKKLTVLHKSIAKNLTDIVLGDQNIPKFIATGITYMLPKTKYTSEPSQYRPITCLPTIYKILTSAITHKINSHVEHHSIIAEEQKGCRRGHMGCKEQLVIDSTIHKHATTKNRNLHCTYIDYQKAFDSIPHSWLIQILQIYKINPKIIDFLRIIMTRWKTTLHINNRLRSLITRQIHIRMGIYQGDSLSPLWFCLALNPLSNLLNRCRVGYQFKNNSEETTISHLIYMDDIKLYAQTEKQMKTLIDITKTFSQDINMQFGLDKCRTLHIIKGKVKPGNYTVSNTDIIAAMEPSDLYKYLGYKQLKGLEHTAIKQTLNTEYRRRINAICKTQLSGKHLIKALNTFAIPILTYSFGIIKWSKTDIEQLERTTRTTLTKHNNLHPKSAIERLVIKRQNGGRGLIDIHQLWQKQINRLQTFFYTKSRTSNIHKAITLNDFNYTPLNLNEQNTQDTNTIYPQTQKIENWKKKALHGRHPHDLEQSHINKLASNKWLKVGNLFPETEGFIIAIQDQVINTKNYRKFIIKDPSITNDKCRRCHVQAETIQHITGACIALTQTDYTHRHNQIANIIHQKLAFKHRLIQNTNTPYYKYTPHSVLENDTYKLYYDRAILTDRTIHYNRPDITLQDKVRKITYLIDIAVPNTHNLQKTITEKISKYTELKEEITRIWRQEKVYVVPIVLSTTGVIPNHLLCSLKLIDLEESTYIDMQKAAILNTCRIVRKFMQLEENTIP

SEQ ID NO: 21098 - protein, 1293 aa, Sesamia nonagrioides
METRSKRKRIGPLPGGDRRGALGADAKCLSIRTVSGEELSRRTPTDKDATAEVIDGGDRQTNRTDTPVDPYSPSTASYAPSNSSSPSIPSSPILPSPPIINFYTLSPTPALNVAREVSTFLPASTKAGKPRVRMRWSKEVNLFIMRTYFYTTKLETDMTTYRQQLHEHFSRQYPEISVSEQRISDQRRAIVRNALLSQTELDHLKEEVRTQLQDESENYANTNTIMPTQNTNVEPQALTPLHTINQYLADNQTSHLSTQIESITLTLENDIEIAIATNEITDMYIQDIHDKFKTTLTLYSGMDPAARPKLPKLKYSRNLFRLVNIFNEYILKQFLSNDTQLIDIHTLIYCTAAVISEELNFKITEHARNTIQRDTGKPSWQQRLEKDIEKLRADCGRLTHYINGIRSHKVVKKVEAIFKNSLTHTRHENNNRKPEEFLDTLKQKLALKVHRLRRYLKAQKRKKDNAIFSTNEKLFYRNLQKPHTSTENDADTPSKEHLETFWSNIWEEQVCHNDKATWITEEATKWRAIGEMEFKEITETEITHITSRLHNWKSPGIDKIQNFWYKKLTVLHKSIAKNLTDIVLGDQNIPEFIATGITYMLPKTKYTSEPSQYRPITCLPTIYKILTSAITHKINSHVEHHSIIAEEQKGCRRGHMGCKEQLVIDSTIHKHATTKNRNLHCTYIDYQKAFDSIPHSWLIQILQIYKINPKIIDFLRIIMTRWKTTLHINNRLSSLITRQIHIRKGIYQGDSLSPLWFCLALNPLSNLLNRCRVGYQFKNNSEETTISHLIYMDDIKLYAQTEKQMKTLIDTTKTFSQDINMQFGLDKCRTLHIIKGKVKPGNYTVSNTDIIAAMEPSDLYKYLGYKQLKRLEHTAIKQTLNAEYRSRINAICKTQLSGKHLIKALNTFAIPILTYSFGIIKWSKTDIEQLERTTRTTLTKHNNLHPKSAIERLVIKRQNGGRGLIDIHQLWQKQINRLQTFFYTKSRTSNIHKAITLYDFNYTPLNLNEQNTQDTNTIYPQTQKIENWKKKALHGRHPHDLEQSHINKLASNKWLKIGNLFPETEGFIIAIQDQVINTKNYRKFIIKDPSVTNDKCRRCHVQAETIQHITGACIALTQTDYTHRHNQIANIIHQKLALKHKLIQNTNTPYYKYTPHSVLENDTYKLYYDRAILTDRTIHYNRPDITLQDKVRKITYLIDIAVPNTHNLQKTITEKISKYTELKEEITRIWRQEKVYVVPIVLSTTGVIPNHLLCSLKLIDLEESTYIDMQKAAILNTCRIVRKFMQLEENTTP

SEQ ID NO: 21099 - protein, 1293 aa, Sesamia nonagrioides
METRSKRKRIGPLPGGDRRGALGADAKCLSMRTVSGEELSRRTPTDKDATAEVIDGGDRQTNRTDTPVEPYSPSTASYAPSNSSSPSIPSSPIPPSPPIINFYTLSPTPALNVAREVSTFLPASTKAGKPRVRMRWSKEVNLFIMRTYFYTTKLETDMTTYRQQLHEHFSRQYPEISVSEQRISDQRRAIVRNALLSQTELDHLKEEVRTQLQHESENYANTNTIMPTQNTNVEPQALTPLHTINQCLADNQTSHLSTQIESITLTLENDIEIATATNEITDMYIQDIHDKFKTTLTLYSGMDPAARPKLPKLKYSRNLFRLVNIFNEYILKQLLSNDTQLIDIHTLIYCTAAVISEELNFKITEHARNTIQRDTGKPPWQQRLEKDIEKLRADCGRLTHYINGIRSHKVVKKVEAIFKNNITHTRHENNNRKPEEFLDTLKQKLALKVHRLRRYLKAQKRKKDNAIFSTNEKLFYRNLQKPHTSTENDTDTPSKEHLETFWSNIWEEQVCHNDKATWITEEATKWREIGEMEFKEITETEITHITSRLHNWKSPGIDKIQNFWYKKLTVLHKSIAKNLTDIVLGDQNIPEFIATGITYMLPKTKYTSEPSQYRPITCLPTIYKILTSAITHKINSHVEHHSIIAEEQKGCRRGHMGCKEQLVIDSTIHKHATTKNRNLHCTYIDYQKAFDSIPHSWLIQILQIYKINPKIIDFLRIIMTRWKTTLHINNRLSSLITRQIHIRKGIYQGDSLSPLWFCLALNPLSNLLNRCRVGYQFKNNSEETTISHLIYMDDIKLYAQTEKQMKTLIDITKTFSQDINMQFGLDKCRTLHIIKGKVKPGNYTVSNTDIIAAMEPSDLYKYLGYKQLKRLEHTAIKQTLNTEYRSRINAICKTQLSGKHLIKALNTFAIPILTYSFGIIKWSKTDIEQLERTTRTTLTKHNNLHPKSAIERLVIKRQNGGRGLIDIHQLWQKQINRLQTFFYTKSRTSNIHKAITLNDFNYTPLNLNEQNTQDTNTIYPQTQKIENWKKKALHGRHPHDLEQSHINKLASNKWLKIGNLFPETEGFIIAIQDQVINTKNYRKFIIKDPSVTNDKCRRCHVQAETIQHITGACIALTQTDYTHRHNQITNIIHQKLALKHRLIQNTNTPYYKYTPHSVLENDTYKLYYDRAILTDRTIHYNRPDITLQDKVRKISYLIDIAVPNTHNLQKTITEKISKYTELKEEITRIWRQEKVYVVPIVLSTTGVIPNHLLCSLKLIDLEESTYIDMQKAAILNTCRIVRKFMQLEENTTP

SEQ ID NO: 21100 - protein, 1293 aa, Sesamia nonagrioides
METRSKRKRIGPLPGGDRRGALGADAKCLSMRTVSGEELSRRTPTDKDATAEVIDGGDRQTNRTDTPVDPYSPSTASYVPSNSSSPSIPSSPIPPSPPIINFYILSPTPALNVAREVSTFLPASTKAGKPRVRMRWSKEVNLFIMRTYFYTTKLETDMTTYRQQLHEHFSRQYPEISVSEQRISDQRRAIVRNALLSQTELDHLKEEVRTQLQHESENYANTNTIMPTQNTNVEPQALTPLHTINQRLADNQTSHLSTQIESITLTLENDIEIATATNEITDMYIQDIHDKFKTTLTLYSGMDPAARPKLPKLKYSRNLFRLVNIFNECILKQFLSNDTQLIDIHTLIYCTAAVISEELNFKITEHARNTIQRDTGKPPWQQRLEKDIEKLRADCGRLTHYINGNRSHKVVKKVEAIFKNNLTHTRHENNNRKPEEFLDTLKQKLALKVHRLRRYLKAQKRKKDNAIFSTNEKLFYRNLQKPHTSTENDTDTPSKEHLETFWSNIWEEQVCHNDKATWITEEATKWRAIGEMEFKEITETEITHITSRLHNWKSPGIDKIQNFWYKKLTVLHKSIAKNLTDIVLGDQNIPEFIATGITYMLPKTKYTSEPSQYRPITCLPTIYKILTSAITHKINSHVEHHSIIAEEQKGCRRGHMGCKEQLVIDSTIHKHATTKNRNLHCTYIDYQKAFDSIPHSWLIQILQIYKINPKIIDFLRIIMTRWKTTLHINNRLSSLITRQIHIRKGIYQGDSLSPLWFCLALNPLSNLLNRCRVGYQFKNNSEETTISHLIYMDDIKLYAQTEKQMKTLIDITKTFSQDINMQFGLDKCRTLHIIKGKVKPGNYTVSNNDIIAAMEPSDLYKYLGYKQLKRLEHTAIKQTLNTEYRSRINAICKTQLSGKHLIKALNTFAIPILTYSFGIIKWSKTDIEQLERTTRTTLTKHNNLHPKSAIERLVIKRQNGGRGLIDIHQLWQKQINRLQTFFYTKSRTSNIHKAITLNDFNYTPLNLNEQNTQDTNTIYPQTQKIENWKKKALHGRHPHDLEQSHINKLASNKWLKIGNLFPETEGFIIAIQDQVINTKNYRKFIIKDPSVTNDKCRRCHVQAETIQHITGACIALTQTDYTHRHNQIANIIHQKLALKHRLIQNTNTPYYKYTPHSVLENDTYKLYYDRAILTDRTIHYNRPDITLQDKVRKISYLIDIAVPNTHNLQKTITEKISKYTELKEEITRIWRQEKVYVVPIVLSTTGVIPNHLLCSLKLIDLEETTYIDMQKAAILNTCRIVRKFMQLEENTTP

SEQ ID NO: 21101 - protein, 1293 aa, Sesamia nonagrioides
METRSKRKRIGPLPGGDRRGALGADAKCLSMRTVSGEELSRRTPTDKDATAEVIDGGDRQTNRTDTPVDPYSPSTASYAPSNSSSPSIPSSPIPPSPPIINFYTLSPTPALNVAREVSTFLPASTKAGKPRVRMRWSKEVNLFIMRTYFYTTKLETDMTTYRQQLHEHFSRQYPEISVSEQRISDQRRAIVRNALLSQTELDHLKEEVRTQLQHESENYANTNTIMPTQNTNVEPQALTPLHTINQCLADKQTSHLSTQIESITLTLENDIEIATATNEVTDMYIQDIHDKFKTTLTLYSGMDPAARPKLPKLKYSRNLFRLVNIFNEYILKQFLSNDTQLIDIHTLIYCTAAVISEELNFKITEHARNTIQRDTGKPPWQQRLEKDIEKLRADCGRLTHYINGIRSHKVVKKVEAIFKNNLTHTRHENNNRKPEEFLDTLKQKLALKVHRLRRYLKAQKRKKDNAIFSTNEKLFYRNLQKPHTSTENDTDTPSKEHLETFWSNIWEEQVCHNDKATWITEEATKWRAICEMEFKEITETEITHITSRLHNWKSPGIDKIQNFWYKKLTVLHKSIAKNLTDIVLGDQNIPEFIATGITYMLPKTKYTSEPSQYRPITCLPTIYKILTSAITHKINSHVEHHSIIAEEQKGCRRGHMGCKEQLVIDSTIHKHATTKNRNLHCTYIDYQKAFDSIPHSWLIQILQIYKINPKIIDFLRIIMTRWKTTLHINNRLSSLITRQIHIRKGIYQGDSLSPLWFCLALNPLSNLLNRCRVGYQFKNNSEETTISHLIYMDDIKLYAQTEKQMNTLIDITKTFSQDINMQFGLDKCRTLHIIKGKVKPGNYTVSNTDIIAAMEPSDLYKYLGYKQLKRLEHTAIKQTLNTEYRSRINAICKTQLSGKHLIKALNTFAIPILTYSFGIIKWSKTDIEQLERTTRTTLTKHNNLHPKSAIERLVIKRQNGGRGLIDIHELWQKQINRLQTFFYTKSRTSNIHKAITLNDFNYTPLNLNEQNTQDTNTIYPQTQKIENWKKKALHGRHPHDLEQSHINKLASNKWLKIGNLFPETEGFIIAIQDQVTNTKNYRKFIIKDPSVTNDKCRRCHVQAETIQHITGACIALTQTDYTHRHNQIANIIHQKLALKHRLIQNTNTPYYKYTPHSVLENDTYKLYYDRAILTDRTIHYNRPDITLQDKVRKITYLIDIAVPNTHNLQKTITEKISKYTELKEEITRIWRQEKVYVVPIVLSTTGVIPNHLLCSLKLIDLEESTYIDMQKAAILNTCRIVRKFMQLEENTTP

SEQ ID NO: 21102 - protein, 1293 aa, Sesamia nonagrioides
METRSKRKRIGPLPGGDRRGALGADAKCLSMRTVSGEELSRRTPTDKDATAEVIDGGDRQTNRTDTPVDPYSPSTASYAPSDSSSPSIPSSPIPPSPPIINFYTLSPTPALNVAREVSIFLPASTKAGKPRVRMRWSKEVNLFIMRTYFYTTKLETDMTTYRQQLHEHFSRQYPEISVSEQRISDQRRAIVRNALLSQTELDHLKEEVRTQLQHESENYANTNTIMPTQNTNVEPQALTPLHTINQCLADNQTSHLSTQIESITLTLENDIEIATATNEITDMYIQDIHEKFITTLTLYSGMDPAARPKLPKLKYSRNLFRLVNIFNEYILKQFLSNDTQLIDIHTLIYCTAAVISEQLNFKITEHARNTIQRDTGKPPWQQRLEKDIEKLRADCGRLTHYINGIRSHKVVKKVEAIFKNNLTHTRHENNNRKPEEFLDTLKQKLALKVHRLRRYLKAQKRKKDNAIFFTNEKLFYRNLQKTHTSTENDTDTPSKEHLETFWSNIWEEQVCHNDKATWITEEATKWRAIGEMEFKEITETEITHITSRLHNWKSPGIDKIQNFWYKKLTVLHKSIAKNLTDIVLGDQNIPEFIATGITYMLPKTKYTSEPSQYRPITCLPTIYKILTSAITHKINSHVEHHSIIAEEQKGCRRGHMGCKEQLVIDSTIHKHATTKNRNLHCTYIDYQKAFDSIPHSWLIQILQIYKINPKIIDFLRIIMTRWKTTLHINNRLSSLITRQIHIRKGIYQGDSLSPLWFCLALNPLSNLLNRCRVGYQFKNISEETTISHLIYMDDIKLYAQTEKQMKTLIDITKTFSQDINMQFGLDKCRTLHIIKGKVKPGNYTVSNTDIIAAMEPSDLYKYLGYKQLKRLEHTAIKQTLNTEYRSRINAICKTQLSGKHLIKALNTFAIPILTYSFGIIKWSKTDIEQLERITRTTLTKHNNLHPKSAIERLVIKRQNGGRGLIDIHQLWQKQINRLQTFFYTKSRTSNIHKAITLNDFNYTPLSLNEQNTQDTNTIYPQTQKIENWKKKALHGRHPHDLEQSHINKLASNKWLKIGNLFPETEGFIIAIQDQVINTKNYRKFIIKDPSVTNDKCRRCHVQAETIQHITGACIALTQTDYTHRHNQIANIIHQKLALKHRLIQNTNTPYYKYTPHSVLENDTYKLYYDRAILTDRTIHYNRPDITLQDKVRKITYLIDIAVPNTHNLQKTITEKISKYTELKEEITRIWRQEKVYVVPIVLSTTGVIPNHLLCSLKLIDLEESTYIDMQKAAILNTCRIVRKFMQLEENTTP

SEQ ID NO: 21103 - protein, 1293 aa, Sesamia nonagrioides
METRSKRKRIGPLPGGDRRGALGADAKCLSMRTVSGEELSRRTPTDKDATAEVIDGGDRQTNRTDTPVDPYSPSTASYAPSNSSSPSIPSSPIPPSSPIINFYTLSPTPALNVAREVSTFLPASTKAGKPRVRMRWSKEVNLFIMRTYFYTTKLETDMTTYRQQLHEHFSRQYPEISVSEQRISDQRRAIVRNALLSQTELDHLKEEVRTQLQHESENYANTNTIMPTQNTNVEPQALTPLHTINQCLADNQTSHLSTQIESITLTLENDIEIATATNEVTDMYIQDIHDKFKTTLTLYSGMDPAARPKLPKLKYSRNLFRLVNIFNEYILKQFLSNDTQLIDIHTLIYCTAAVISEELNFKITEHARNTIQRDTGKPPWQQRLEKDIEKLRADCGRLTHYINGIRSHKVVKKVEAIFKNNLTHTRHENNNRKPEEFLDTLKQKLALKVHRLRRYLKAQKRKKDNAIFSTNEKLFYRNLQKPHTSTENDTDTPSKEHLETFWSNIWEEQVCHNDKATWITEEATKWRAIGEMEFKEITETEITHITSRLHNWKSPGIDKIQNFWYKKLTVLHKSIAKNLTDIVLGDQNIPEFIATGITYMLPKSKYTSEPSQYRPITSTPTIYKILTSAITHKINSHVEHHSIIAEEQKGCRRGHMGCKEQLVIDSTIHKHATTKNRNLHCTYIDYQKAFDSIPHSWLIQILQIYKINPKIIDFLRIIMTRWKTTLHINNRLSSLITRQIHIRKGIYQGDSLSPLWFCLALNPLSNLLNRWRVGYQFKNNSEETTISHLIYMDDIKLYAQTEKQMKTLIDITKTFSQDINMQFGLDKCRTLHIIKGKVKPGNYTVSNTDIIAAMEPSDLYKYLGYKQLKRLEHTAIKQTLNTEYRSRINAICKTQLSGKHLIKALNTFAIPILTYSFGIIKWSKTDIEQLERTTRTTLTKHNNLHPKSAIERLVIKRQNGGRGLIDIHELWQKQINRLQTFFYTKSRTSNIHKAITLNDFNYTPLNLNEQNTQDTNTIYPQTQKIENWKKKALHGRHPHDLEQSHINKLASNKWLKIGNLFPETEGFIIAIQDQVINTKNYRKFIIKDPSVTNDKCRRCHVQAETIQHITGACIALTQTDYTHRHNQIANIIHQKLALKHRLIQNTNTPYYKYTPHSVLENDTYKLYYDRAILTDRTIHYNRPDITLQDKVRKITYLIDIAVPNTHNLQKTITEKISKYTELKEEITRIWRQEKVYVVPIVLSTTGVIPNHLLCSLKLIDLEESTYIDMQKAAILNTCRIVRKFMQLEENTTP

SEQ ID NO: 21104 - protein, 1293 aa, Sesamia nonagrioides
METRSKRKRIGPLPGGDRRGALGADAKCLSIRTVSGEELSRRTPTDKDATAEVIDGGDRQTNRTDTPVDPYSPSTASYAPSNSSSPSIPSSPIPPSPPIINFYTLSPTPALNVAREVSTFLPASTKAGKPRVRMRWSKEVNLFIMRTYFYTTKLETDMTTYRQQLHEHFSRQYPEISVSEQRISDQRRAIVRNALLSQTELDHLKEEVRTQLQHESENYANTNTIMPTQNTNIEPQALTPLHTINQCLADNQTSHLSTQIESITLTLENDIEIATATNEVTDMYIQDIHDKFKTTLTLYSGMDPAARPKLPKLKYSRNLFRLVNIFNEYILKQFLSNDTQLIDIHTIIYCTAAVISEELNFKITEHARNTIQRDTGKPPWQQRLEKDIEKLRADCGRLTHYINGIRSHKVVKKVEAIFKNNLTHTRHENNNRKPEEFLDTLKQKLALKVHRLRRYLKAQKRKKDNAIFSTNEKLFYRNLQKPHTSTENDTDTPSKEHLETFWSNIWEEQVCHNDKATWITEEATKWRAIGEMEFKEITETEITHITSRLHNWKSPGIDKIQNFWYKKLTVLHKSIAKNLTDIVLGDQNIPEFIATGITYMLPKTKYTSEPSQYRPITCLPTIYKIITSAITHKINSHVEHHSIIAEEQKGCRRGHMGCKEQLVIDSTIHKHATTKNRNLHCTYIDYQKAFDSIPHSWLIQILQIYKINPKIIDFLRIIMTRWKTTLHINNRLSSLITRQIHIRKGIYQGDSLSPLWFCLALNPLSNLLNRCRVGYQFKNNSEETTISHLIYMDDIKLYAQTEKQMKTLIDITKTFSQDINMQFGLDKCRTLHIIKGKVKPGNYTVSNTDIIAAMEPSDLYKYLGYKQLKRLEHTAIKQTLNTEYRSRINAICKTQLSGKHLIKALNTFAIPILTYSFGIIKWSKTDIEQLERTTRTTLTKHNNLHPKSAIERLVIKRQNGGRGLIDIHELWQKQINRLQTFFYTKSRTSNIHKAITLNDFNYTPLNLNEQNTQDTNTIYPQTQKIENWKKKALHGRHPHDLEQSHINKLASNKWLKIGNLFPETEGFIIAIQDQVINTKNYRKFIIKDPSVTNDKCRRCHVQAETIQHITGACIALTQTDYTHRHNQIANIIHQKLALKHRLIQNTNTPYYKYTPHSVLENDTYKLYYDRAILTDRTIHYNRPDITLQDKVRKITYLIDIAVPNTHNLQKTITEKISKYTELKEEITRIWRQEKVYVVPIVLSTTGVIPNHLLCSLKLIDLEESTYIDMQKAAILNTCRIVRKFMQLEENTTP

SEQ ID NO: 21105 - protein, 762 aa, Sesamia nonagrioides
MEFKEITETEITHITSRLHNWKSPGIDKIQNFWYKKLTVLHKSIAKNLTDIVLGDQNIPEFIATGITYMLPKTKYTSEPSQYRPITCLPTIYKILTSAITHKINSHVEHHSIIAEEQKGCRRGHMGCKEQLVIDSTIHKHATTKNRNLHCTYIDYQKAFDSIPHSWLIQILQIYKINPKIIDFLRIIMTRWKTTLHINNRLSSLITRQIHIRKGIYQGDSLSPLWFCLALNPLSNLLNRCRVGYQFKNNSEETTISHLIYMDDIKLYAQTEKQMKTLIDITKTFSQDINMQFGLDKCRTLHIIKGKVKPGNYTVSNTDIIAAMEPSDLYKYLGYKQLKRLEHTAIKQTLNTEYRSRINTICKTQLSGKHLIKALNTFAIPILTYSFGIIKWSKTDIEQLERTTRTTLTKHNNLHPKSAIERLVIKRQNGGRGLIDIHQLWQKQINRLQTFFYTKSRTSNIHKAITLNDFNYTPLNLNEQNTQDTNTIYPQTQKIENWKKKALHGRHPHDLEQSHINKLASNKWLKIGNLFPETEGFIIAIQDQVINTKNYRKFIIKDPSVTNDKCRRCHVQAETIQHITGACIALTQTDYTHRHNQIANIIHQKLAHKHRLIQNTNTPYYKYTPHSVLENDTYKLYYDRAILTDRTIHYNRPDITLQDKVRKITYLIDIAVPNTHNLQKTITEKISKYTELKEEITRIWRQEKVYVVPIVLSTTGVIPNHLLCSLKLIDLEESTYIDMQKAAILNTCRIVRKFMQLEENTTP

SEQ ID NO: 21106 - protein, 1068 aa, Sesamia nonagrioides
MPTQNTNVEPQAHPPLHTINQCLADNQTSHLSTQIESITLTLENDIEIATATNEITDMYIQDIHDKFKTTLTLYSGMDPAARPKLPKLKYSRNLFRLVNIFNEYILKQFLSNDTQLIDIHTLIYCTAAVISEELNFKITEHARNTIQRDTGKPPWQQRLEKDIEKLRADCGRLTHYINGIRSHKVVKKVEAIFKNNLTHTRHENNNRKPEEFLDTLKQKLALKVHRLRRYLKAQKRKKDNAIFSTNEKLFYRNLQKPHTSTENDTDTPSKEHLETFWSNIWEEQVCHNDKATWITEEATKWRAIGEMEFKEITETEITHITSRLHNWKSPGIDKIQNFWYKKLTVLHKSIAKNLTDIVLGDQNIPEFIATGITHMLPKTKYTSEPSQYRPITCLPTIYKILTSAITHRINSHVEHHSIIAEEQKGCRRGHMGCKEQLVIDSTIHKHATTKNRNLHCTYIDYQKAFDSIPHSWLIQILQIYKINPKIIDFLRIIMTRWKTTLHINNRLSSLITRQIHIRKGIYQGDSLSPLWFCLALNPLSNLLNRCRVGYQFKNNSEETTISHLIYMDDIKLYAQTEKQMKTLIDITKTFSQDINMQFGLDKCRTLHIIKGKVKPGNYTVSNTDIIAAMEPSDLYKYLGYKQLKRLEHTAIKQTLNTEYRSRINAICKTQLSGKHLIKALNTFAIPILTYSFGIIKWSKTDIEQLERTTRTTLTKHNNLHPKSAIERLVIKRQNGGRGLIDIHQLWQKQINRLQTFFYTKSRTSNIHKAITLNDFNYTPLNLNEQNTQDTNTIYPQTQKIENWKKKALHGRHPHDLEQSHINKLASNKWLKIGNLFPETEGFIIAIQDQVINTKNYRKFIIKDPSVTNDKCRRCHVQAETIQHITGACIALTQTDYTHRHNQIANIIHQKLALKHRLIQNTNTPYYKYTPHSILENDTYKLYYDRAILTDRTIHYNRPDITLQDKVRKITYLIDIAVPNTHNLQKTITEKISKYTELKEEIIRIWRQEKVYVVPIVLSTTGVIPNNLLCSLKLIDLEESTYIDMQKAAILNTCRIVRKFMQLEENTTP

SEQ ID NO: 21107 - protein, 1118 aa, Sesamia nonagrioides
MTIIIIIIISDQRRAIVRNALLSQTELDHLKEEVRTQLQHESENYANTNTIMPTQNTNVEQQALTPLHTNQCLADNQTSHLSTQSESITLTLENDIEIATATNEITDMYIQDIHDKFKTTLTLYSGMDPAARPKLPKLKYSRNLFRLVNIFNEYILKQFLSNDTQLIDIHTLIYCTAAVISEQLNFKITEHARNTIQRDTGKPPWQQRLEKDIEKLRADCGRLTHYINGIRSHKVVKKVEAIFKNNLTHTRHENNNRKPEEFLDTLKQKLALKVHRLRRYLKAQKRKKDNAIFSTNEKLFYRNLQKPHTSTENDTDTPSKEHLETFWSNIWEEQVCHNDKATWITEEATKWRAIGEMEFKEITETEITHITSRLHNWKSPGIDKIQNFWYKKLTVLHKSIAKNLTDIVLGDQNIPEFIATGITYMLPKTKYTSEPSQYRPITCLPTIYKILTSAITHKINSHVEHHSIIAEEQKGCRRGHMGCKEQLVIDSTIHKHATTKNRNLHCTYIDYQKAFDSIPHSWLIQILQIYKINPKIIDFLRIIMTRWKTTLHINNRLSSLITRQIHIRKGIYQGDSLSPLWFCLALNPLSNLLNRCRVGYQFKNNSEENTISHLIYMDDIKLYAQTEKQMKTLIDITKTFSQDINMQFGLDKCRTLHIIKGKVKPGNYTVSNTDIIAAMEPSDLYKYLGYKQLKRLEHTAIKQTLNTEYRSRINAICKTQLSGKHLIKALNTFAIPILTYSFGIIKWSKTDIEQLERTTRTTLTKHNNLHPKSAIERLVIKRQNGGRGLIDIHQLWQKQINRLQTFFYTKSRTSNIHKAITLNDFNYTPLNLNEQNTQDTNTIYPQTQKIENWKKKALHGRHPHDLEQSHINKLASNKWLKIGNLFPETEGFIIAIQDQVINTKNYSKFIIKDPSVTNDKCRRCHVQAETIQHITGACIALTQTDYTHRHNQIANIIHQKLALKHRLIQNTNTPYYKYTPHSVLENDSYKLYYDRAILTDRTIHYNRPDITLQDKVRKITYLIDIAVPNTHNLQKTITEKISKYTELKEEIIRIWRQEKVYVVPIVLSTTGVIPNHLLCSLKLIDLEESTYIDMQKAAILNTCRIVRKFMQLEENTTP

SEQ ID NO: 21108 - protein, 1293 aa, Sesamia nonagrioides
METRSKRKRIGPLPGGDRRGALGADAKCLSMRTVSGEELSRRTPTDKDATAEVIDGGDRQTNRTDTPVDPYSPSTASYAPSNSSSPSIPSSPIPPSPPIINFYTLSPTPALNVAREVSTFLPASTKAGKPRVRMRWSKEVNLFIMRTYFYTTKLETDMTTYRQQLHEHFSRQYPEISVSEQRISDQRRAIVRNALLSQTELDHLKEEVRTQLQHESENYANTNTNMPTQNTNVEPQAHPPLHTINQCLADNQTSHLSTQIESITLTLENDIEIATATNEITDMYIQDIHDKFKTTLTLYSGMDPAARPKLPKLKYSRNLFRLVNIFNEYILKQFLSNDTQLIDIHTLIYCTAAVISEELNFKITEHARNTIQRDTGKPPWQQRLEKDIEKLRADCGRLTHYINGIRSHKVVKKVEAIFKNNLTHTRRENNNRKPEEFLDTLKQKLALKVHRLRRYLKAQKRKKDNAIFSTNEKLFYRNLQKPHTSTENDTDTPSKEHLETFWSNIWEEQVCHNDKATWITEEATKWRAIGEMEFKEITETEITHITSRLHNWKSPGIDKIQNFWYKKLTVLHKSIAKNLTDIVLGDQNIPEFIATGITYMLPKTKYTSEPSQYRPITCLPTIYKILTSAITHRINSHVEHHSIISEEQKGCRRGHMGCKEQLVIDSTIHKHATTKNRNLHCTYIDYQKAFDSIPHSWLIQILQIYKINPKIIDFLRIIMTRWKTTLHINNRLSSLITRQIHIRKGIYQGDSLSPLWFCLALNPLSNLLNRCRVGYQFKNNSEETTISHLIYMDDIKLYAQTEKQMKTLIDITKTFSQDINMQFGLDKCRTLHIIKGKVKPGNYTVSNTDIIAAMEPSDLYKYLGYKQLKRLEHTAIKQTLNTEYRSRINAICKTQLSGKHLIKALNTFAIPILTYSFGIIKWSKTDIEQLERTTRTTLTKHNNLHPKSAIERLVIKRQNGGRGLIDIHQLWQKQINRLQTFFYTKSRTSNIHKAITLNDFNYTPLNLNEQNTQDTNTIYPQTQKIENWKKKALHGRHPHDLEQSHINKLASNKWLKIGNLFPETEGFIIAIQDQVINTKNYRKFIIKDPSVTNDKCRRCHVQAETIQHITGACIALTQTDYTHRHNQIANIIHQKLALKHRLIQNTNTPYYKYTPHSVLENDTYKLYYDRAILTDRTIHYNRPDITLQDKVRKITYLIDIAVPNTHNLQKTITEKISKYTELKEEITRIWRQEKVYVVPIVLSTTGVIPNHLLCSLKLIDLEESTYIDMQKAAILNTCRIVRKFMQLEENTTP

SEQ ID NO: 21109 - protein, 1316 aa, Parnassius imperator
METRLKRKRLGPLPGGDRRGTPGAGAGCLSMRTVSGEELNRRALTDKDATAETSDGGDRLTDRTDSPLEPISPSTISYTPSRPSSPPIPSSPSISLSPPITSSHTDSSLPTLNVARGVNTFLPASTKAGKPRVRMKWSKEVNIFIMRTYFHITKLETDMTTYRQQLHERFTRQYPEISVTEQRISDQRRTIVRNKLLSQEVMDQLKEEVRAQLEDLNQNPIPETHTPSETTLQIPPQSPSQMQHNKQSQSYNQSQANSQSIHRSHTSTQTESITIMLENDIETLENVDQNQLSETHIQEIHDKLKTALTQYSGMDPAARPKLPKLKYTPKLSHLVHLFNRIILNQYISEDTQLVDVHTLIYCTALVISEELNYKITEYTDNTRPRIINKPSWQQRLERDIEKLRADCGRLTQYINNNRSNKVVKRVEAIFKNMARHTRHENNNRKPEEFLDTLKQKLALKVHRLRRYKKAQERKNDNAMFATNEKNFYRNLQKPQIDVTTDTNTELPTSEQLETFWSSIWEEQVQHNDKAGWIADEESKWSALEEMEFVEISESDINSITAKLHNWKSPGIDKVHNYWYKKLDSLHKIIAKNLTDIILGQQNIPEFIATGITYMLPKSQHSPQPSQYRPITCLPTIYKILTSAITAKINKYIERQNIIAEEQKGCRRGHMGCKEQLIIDSIVHKHAATKNRNLHCTYIDYKKAFDSIPHSWLIQVLRIYKINSKIIDFLHHIMSRWKTTLQLNYHDNIVRTRQIFIRKGIYQGDSLSPLWFCLALNPLSHLLHQCQAGYRLKHNTAEDITISHLIYMDDIKLYSKTEKEMKKLIDTTTEFSKDINMQFGLDKCKTLHIIRGKIKPGDYTINTTDTITAMEPTDLYKYLGYRQLKGLDHTAIKHTLNTEYKRRVNAVCKTHLAGKHLIKALNTYAIPILTYSFGVIKWSKTDIQQIERTTRTILTKHNNLHPKSAIERLTIKRQNGGRGLIDIQHLWQKQISSLKTFFHNKSRTSDIHKAVALNDFNYTPLNLNEHTDTQHNNTNNPQKQKLEDWKKKVLHGRHPHDLEQPHVDTVASNKWLKIGNLFPETEGFIIAIQDQIINTKNYRKYVIKDPTVTNDKCRKCFTQPETIQHITGACTTLTHTDYTHRHNQVANIIHQKLALKHKLIQDTNTPYYKYTPQTILENPTHKLYYDRAILTDRAIHYNRPDITLQDKVSKITYLIDIAIPNTHNLQKTIGEKISKYAELKEEVTRIWRQNKVYIVPIVVSTTGVIPNHLHHSLKLIDLKDSTYIILQKAAILNTCRIVRKFMQLEENEIATHNTPPT

SEQ ID NO: 21110 - protein, 1325 aa, Ochropleura plecta
METRSKRKRIGPLPGGDRRGAPGADAGCHSMRTVSGEELNRRAPTDKDTTAEIIDDGDRLTDRTDTPVEPYSPSTVSYTPSRPSSPSIPSSPTFLSPPIINSNTVLPIPTLNVARGVSTFLPASTKARKARVRMKWSKEVNLYIMRTYLYITKLETDMTTYRQQLHELFTRQYPEINVSEQRISDQRRTIVRNKLLSLSEVDQLREEVRLQLELENNRDTNNIATTQNITENIQEVQSQTYAQLEPYTQSQPCYQSQSNSQTTHISTQTENITIMLENDIQILPDTHQMQPSDTRIHEIHDKFKTALTLYSGMDPAARPKLPKLRYSPKLCQLVKIFNQNILNHYISEETQLIDVHTLIYCTALVISEELNYKITEYTGNTRRKNINKPAWQQRLEQDIEILRADCGRLTQYINNNRSNKVVKRVEIIFKNMATHTRHETDNSKPEEFLDTLKQKLAVKVHRLRRYKKAQERKNDNSLFAMNEKNFYRKLQTKPESDTTRENSIVELPTAEQLESFWSGIWEEQIQHNDRAEWVTDENTRWISLQEMEFVELTESDITNITARLHNWKSPGIDKIHNYWYKKLETLHKVLAKNLTEIILGKQHIPEFLATGITYMLPKSQYCPQPSQYRPITCLPTIYKILTSAITTKINKHVEHNNIIAEEQKGCRRGHMGCKEQLIIDSVIHKHAATKNRNLHCTYIDYKKAFDSIPHSWLIQILQIYKINPIIIDFLQNIMSRWKTTLQLNCHDNTITTRQIAIKKGIYQGDSLSPLWFCLALNPLSHLLQRCQAGYCLKHTTEETIISHLIYMDDIKLYAKTEKEMKKLVEITTEFSKDINMQFGLDKCKTVHIIRGKIKPGDYAINTTDTITAMEHTDVYKYLGYKQLKGMDHTTIKQTLNTEYKRRVVAVCKSQLSGKYLIKALNTYAIPILTYSFGVIKWSKTDIQQIERTTRTTLTKHNNLHPKSAIERLTIKRQHGGRGLIDVYNLWQKQITRLKTFFHSKSNTSNIHKAIVMNDINYTPLHLNEQIDTHQTNNEDPQEKKMEEWKKKVLHGRHPHDLGQSHIDTKASNKWLMIGNLFPETEGFLIAIQDQIINTKNYRKFIIKDPTLTNDKCRKCHSQPETIQHITGACATLTQTDYTHRHNQVANVIHQNLALKHKLIQDTTPYYKYTPEKVLENTTHKLYYDRAIMTDRTIHYNRPDVILQDKTKKITYLIDIAVPNTHNLQKTIGEKISKYAELKEEVTRIWRQEKVYVVPIVVSTTGVIPNHLHHSLKLIDLKDSIYITLQKAAILNTCRIVRKFMQIEENEISSHDSHTHTRYINLAYAR

SEQ ID NO: 21111 - protein, 1318 aa, Ochropleura plecta
METRSKRKRIGPLPGGDRRGAPGADAGCHSMRTVSGEELNRRAPTDKDTTAEIIDDGDRLTDRTDTPVEPYSPSTVSYTPSRPSSPSIPSSPTFLSSPIINSNTVPPIPTLNVARGVSTFLPASTKAGKARVRMKWSKEVNLYIMRTYLYITKLETDMTTYRQQLHELFTRQYPEINVSEQRISDQRRTIVRNKLLSLNEIDQLREEVRLQLELENIRDTNNIATTQNITENIQEVQSQTYGQLEPYTQSQPCYQSQANSQTTHTSTQTENITIMLENDIQILPDTHQMQPSDTRIHEIHDKFKTALTLYSGMDPAARPKLPKLRYSPKLCQLVKIFNQNILNQYISEETQLIDVHTLIYCTALVISEELNYKITEYTGNTRPKNINKPAWQQRLEQDIEILRADCGRLTQYINNNRSNKVVKRVEIIFKNMATHTRHEKDNSKPEEFLDTLKQKLAVKVHRLRRYKKAQERKNDNSLFAMNEKNFYRKLQTKPESDTTRENSIVELPTAEQLESFWSGIWEEQVQHNDTSDWITDENTRWISLQEMEFVELTESDITSITARLHNWKSPGIDKIHNYWYKKLESLHKVLAKNLTDIILGKQHIPEFLATGITYMLPKTQYCPEPSQYRPITCLPTIYKILTSAITTKINKHVEHNNIIAEEQKGCRRGHMGCKEQLVIDSVIHKHAATKNRNLHCTYIDYKKAFDSIPHSWLIQILQIYKINPKIIDFLKNIMPRWKTTLQLNYHNNTVTTRQIAIKKGIYQGDSLSPLWFCLALNPLSHLLHCCQAGYCLKHTTEETAISHLIYMDDIKLYAKTEKEMKKLVEITTEFSKDINMQFGLDKCKTVHIIRGKIKPGDYAINTTDTITAMEHTDMYKYLGYRQLKGLDHTSIKETLNTEYKKRVVAVCKSQLSGKYLIKALNTYAIPILTYSFGVIKWSKTDIQQIERTTRTTLTKHNNLHPKSAIERLTIKRQHGGRGLIDVYNLWQKQITRLKTFFYSKSNTSNLHKAIVMNDTNYTPLHLNEQIDTHQTNNEDPQKKKMEDWKKKVLHGRHPHDLEQSHIDTKASNKWLMIGNLFPETEGFLIAIQDQIINTKNYKKFIIKDPTLTNDKCRKCHSQPETIQHITGACATLTQTDYTHRHNQVANVIHQNLALKHKLIQDTNPYYKYTPEKVLENTTHKLYYDRAIMTDRTIHYNRPDVILQDKINKITYLIDIAVPNTHNLQKTIGEKISKYAELKEEVTRIWRQEKVYVVPIVVSTTGVIPNHLHHSLKLIDLKDSIYITLQKAAILNTCRIVRKFMQIEENEISSHDSHTHTLH

SEQ ID NO: 21112 - protein, 1318 aa, Ochropleura plecta
METRSKRKRIGPLPGGDRRGAPGADAGCHSMRTVSGEELNRRAPTDKDTTAEIIDDGDRLTDRTDTPVEPYSPSTVSYTPSRPSSPSIPSSPTFLSPPIINSNTVLPIPTLNVARGVSTFLPASTKAGKARVRMKWSKEVNLYIMRTYLYITKLETDMTTYRQQLHELFTRQYPEINVSEQRISDQRRTIVRNKLLSLSEVDQLREEVRLQLELENNRDTNNIATTQNITENIQEVQSQTYAQLEPYTQSQPCYQSQSNSQTTHISTQTENITIMLENDIQILPDTHQMQPSDTRIHEIHDKFKTALTLYSGMDPAARPKLPKLRYSPKLCQLVKIFNQNILNHYISEETQLIDVHTLIYCTALVISEELNYKITEYTGNTRRKNINKPAWQQRLEQDIEILRADCGRLTQYINNNRSNKVVKRVEIIFKNMATHTRHETDNSKPEEFLDTLKQKLAVKVHRLRRYKKAQERKNDNSLFAMNEKNFYRKLQTKPESDTTRENSIVELPTAEQLESFWSGIWEEQIQHNDRAEWVTDENTRWISLQEMEFVELTESDITNITASLHNWKSPGIDKIHNYWYKKLETLHKVLAKNLTEIILGKQHIPEFLATGITYMLPKSQYCPQPSQYRPITCLPTIYKILTSAITTKINKHVEHNNIIAEEQKGCRRGHMGCKEQLIIDSVIHKHAATKNRNLHCTYIDYKKAFDSIPHSWLIQILQIYKINPIIIDFLQNIMSRWKTTLQLNCHDNTITTRQIAIKKGIYQGDSLSPLWFCLALNPLSHLLQRCQAGYCLKHTTEETIISHLIYMDDIKLYAKTEKEMKKLVEITTEFSKDINMQFGLHKCKTVHIIRGKIKPGDYAINTTDTITAMEHTDVYKYLGYKQLKGMDHTTIKQTLNTEYKRRVVAVCKSQLSGKYLIKALNTYAIPILTYSFGVIKWSKTDIQQIERTTRTTLTKHNNLHPKSAIERLTIKRQHGGRGLIDVYNLWQKQITRLKTFFHSKSNTSNIHKAIVMNDINYTPLHLNEQIDTHQTNNEDPQEKKMEEWKKKVLHGRHPHDLGQSHIDTKASNKWLMIGNLFPETEGFLIAIQDQIINTKNYRKFIIKDPTLTNDKCRKCHSQPETIQHITGACATLTQTDYTHRHNQVANVIHQNLALKHKLIQDTPPYYKYTPEKVLENTTHKLYYDRAIMTDRTIHYNRPDVILQDKTNKITYLIDIAVPNTHNLQKTIGEKISKYAELKEEVTRIWRQEKVYVVPIVVSTTGVIPNHLHHSLKLIDLKDSIYITLQKAAILNTCRIVRKFMQIEENEISSHDSHTHTLH

SEQ ID NO: 21113 - protein, 884 aa, Xestia c-nigrum
MAVHTRHENHNKKPEEFLDTLKQKLALKVHRLRRYKKAQERRNDNCLFATNEKNFYRKLQKSQTNTDTPTIENNIELPTTEQLETFWAGIWEEQVHHKETSEWIKGEETKWSSLVEMEFIELSESDIASVTARLHNWKSPGIDKVHNYWYKKLESLHQILAKNLTEIILGKQNIPEFIATGITYMLPKAQYSPQPSQYRPITCLPTIYKILTSAITSKINKHIEHHNIIAEEQKGCRREHMGCKEQLVIDSVIHKHAATKNRNLHCTYIDYKKAFDSIPHSWLIQILQIYKINPKIIHFLQNIMSHWKSTLQLNYRQTAITTRQISIKKGIYQGDSLSPLWFCLALNPLSDLLRRCQAGYYFKHATEETVISHLIYMDDIKLYARSEKEMEKLIETTTEFSKDINMQFGLDKCKTVHIKRGKIKPGDYPINNTDTIAALEPTDLYKYLGYKQLKGIDHTAIKHTLNTEFKRRVIAVCKTQLSGKHLIKALNTYAIPILTYSFGVIKWSKTDIQQIERTTRTTLTKHNNLHPKSAIERLTIKRQNGGRGLIDIHHLWQKQITRLRTFFHSKSHTSTIHKAIVKNDINYTPLNLHEPTDTQHTSNDDPHKQKLEDWKKKVLHGRHPHDLEQPHVDTKASNKWLKIGSLFPETEGFIIAIQDQIINTKNYRKFIIKDPTITNDKCRKCHSQPETIQHITGACTTLTQTDYTHRHNQVANIIHQNLALKYKLIQDTNTPYYKYVPERFLENTTHKLFYDRAILTDRTIILQDKTNKVTYLIDIAVPNTHNLQKTIGEKICKYAELKEEVTRIWRQEKVYVVPIVLSTTGVIPNHLHHSLKLLDLKDSIYISLQKAAILNTCRIVRKFMQIEDNASHNTQISSHTHTLH

SEQ ID NO: 21114 - protein, 890 aa, Xestia xanthographa
MAIHTRHERDNRKPEEFLDTLKQKLAVKVHRLRRYKKAQERKNDNSLFAMNEKNFYRKLQTKPQTDTTSEKSIELPTAEQLESFWAGIWEEQVQHNDKSDWVTDEKTKWISLEEMDFVELTESDITSITARLHNWKSPGIDKIHNYWYKKLESLHKVLAKNFTDIILGKQYVPEFLATGITYMLPKTQYSPQPSQYRPITCLPTIYKILTSAITTKINKHVEHHNIIAEEQKGCRRGHMGCKEQLVIDSVIHKHAATKNKNLHCTYIDYKKAFDSIPHSWLIQILQIYKINPKIIDFLQNIMSRWKTTLQLNYHDNTVTTKQIAIKKGIYQGDSLSPLWFCLALNPLSHLLQRCQAGYCLKHTTGETIISHLIYMDDIKLYSKTETDMKKLIEITTEFSKDINMQFGLDKCKTLHIIRGKIKNGDYAINTNDSITAMEPTDLYKYLGYRQLKGLDHTTIKQTLNTEYKRRVVAVCKTQLSGKHLIKALNTYAIPILTYSFGVIKWSQTDIQQIERTTRTTLTKHNNLHPKSAIERLTIKRQHGGRGLIDVHDLWQKQITRLKTFFHTKSNTSNIHKAIVMNDINYIPLHLNKQIDSQPTNNEDPQKKKIEDWKKKVLHGRHPHDLEQSHIDTTASNKWLKIGSLFPETEGFIIAIQDQIINTKNYRKYIIKDPTITNDKCRKCHSQPETIQHITGACTTLTQTDYTHRHNQVANVIHQHLALKHKLIQDTSPYYKYTPERVLENTTHKLYYDRGIMTDRTIHYNRPDIILQDKVNKVTYLIDIAVPNIHNLQKTIGEKISKYAELKEEVTRIWRQEKVYVVPIVVSTTGVIPNHLHHSLKLIDLKDSIYITLQKAAILNTCRIVRKFMQIEENEISPHDSHTHTRYVDLV

SEQ ID NO: 21115 - protein, 1321 aa, Xestia c-nigrum
METRSKRKRIGPLPGGDRRGAPGADAGCHSMRSVSGEELNRRAPTDKATTAEIIDDGDRLTDRTDTPVEPYSPSTASYTPSRRSSSSIPSSPTLLSPPIISSNTVPLTPTLNAARGVSTFLPASTKAGKARVRMKLSKEVNTFIMRTYLHITKLETDMTTYRQQLHEHFTRKYPDISVSEQRISDQRRAIVRNKLLSLVEINRLKVEVRLQLETENNEDTNTNNFTITQNTLENTQKEQPQPYNQSAPYTQSLPCYQSQTHSQTTHTSTQTESTTIMLENDVHILADTHQTQPTDTHIREIHDKFKTALAQYSGMDPAARPKLPKLRYTPKLCQLVNIFNHNILNQYVSEETQLTDVHTLIYCTALVIAEELNYKVTEYAGNRRPKTIDKPAWQQRLEQDIEKLRADCGRLTQYINNNRSNKVVKRVEVIFKNMAVHTRHETDNRKPEEFLDTLKQKLAVKVHRLRRYKKAQERKNDNTLFAMNEKNFYRKLQTKPQTDTTIENTRSIELPTAEQLESFWAGIWEEQVQHNDKSDWVADEKQKWISLDEMEFVELTESDIASITARLHNWKSPGIDKIHNYWYKKLESLHKALAKNFTDIILGKQCIPEFLATGITYMLPKTQYSPQPSQYRPITCLPTIYKILTSAITTKINKHVEHHNIIAEEQKGCRRGHMGCKEQLVIDSVIHKHAASKNINLHCTYIDYKKAFDSIPHSWLIQILRIYKINPKIIDFLQNIMSQWKTTLQLNYHDNTITTRQIAMKKGIYQGDSLSPLWFCLALNPLSHLLQRCQTGYSLKHTTEATTISHLIYMDDIKLYSKTETDMKKLIEITTKFSNDINMQFGLDKCKTLHIIKGKIKPGDYTINTNDIITAMETTDLYKYLGYRQLKGLDHTKIKQTLNTEYKRRMVAVCKTQLSGKHLIKALNTYAIPILTYSFGVIKWSKTDIQQIERTTRTTLTKHNNLHPKSAIERLTIKRQHGGRGLIDVHHLWQKQISKLKSFFHTKSNTSHIHKAIVMNDINYTPLHLNEQIDTQPTINEDPQKKKIEDWKKKVLHGRHPHDLEQSHINTTASNKWLKIGSLFPETEGFIIAIQDQIINTKNYRKYIIKDPTITNDKCRKCHSQPETIQHITGACTTLTQTDYTHRHNQVANIIHQRLALKHKLTQDTNPYYKYTPHKVLENNTHKLYYDRGIMTDRTIHYNRPDIILQDKVNKVTYLIDIAVPNTHNLLKTIGEKISKYAELKEEVARIWTQEKVYIVPIVISTTGVIPNHLHHSLKLIDLKDSIYITLQKAAILNTCRIVRKFMQIEENEISPHDSHTHTLR

SEQ ID NO: 21116 - protein, 1319 aa, Xestia c-nigrum
METRSKRKRIGPLPGGDRRGAPGADAGCHSMRTVSGEELNRRAPTDKATTAEIIDDGDRLTDRTDTPVEPYSPSTASYTPSRRSSSSIPSSPTLLSPPIISSNTVPLTPTLNAARGVSTFLSASTKAGKARVRMKWSKEVNTFIMRTYLHITKLETDMTTYRQQLHEHFTRKYPDISVSEQRISDQRRAIVRNKLLSLAEINRLKVEVRLQLETENNEDTNTNNFTITQNTLENTQQEQPQPYNQSEPYTQSLPCYQSQTHSQTTHTSTQTESTTIMLENDVHILADTHQTQPTHVREIHDKFKTALAQYSGMDPAARPKLPKLRYTPKLCQLVNIFNHNILNQYVSEETQLTDVHTLIYCTALVIAEELNYKVTEYAGNRRPKTINKPAWQQRLEQDIEKLRADCGRLTQYINNNRSNKVVKRVEVIFKNMAVHTRHETDNRKPEEFLDTLKQKLAVKVHRLRRYKKAQERKNDNTLFAMNEKNFYRKLQTKPQTDTTIENTHSIELPTAEQLESFWAGIWEEQVQHNDKSDWVADEKQKWISLEEMDFVELTESDITSITARLHNWKSPGIDKIHNYWYKKLESLHKALAKNFTDIILGKQYVPEFLATGITYMLPKTQYSPQPSQYRPITCLPTIYKILTSAITTKINKHVEHHNIIAEEQKGCRRGHMGCKEQLVIDSVIHKHAASKNINLHCTYIDYKKAFDSIPHSWLIQILRIYKINPKIIDFLQNIMSQWKTTLQLNYHDNTITTRQIAIKKGIYQGDSLSPLWFCLALNPLSHLLQRCQAGYSLKHTTEATTISHLIYMDDIKLYSKTETDMKKLIEITTKFSNDINMQFGLDKCKTLHIIKGKIKPGDYAINTNDIITAMETTDLYKYLGYRQLKGLDHTKIKQTLNTEYKRRMVAVCKTQLSGKHLIKALNTYAIPILTYSFGVIKWSKTDIQQIERTTRTTLTKHNNLHPKSAIERLTIKRQHGGRGLIDVHHLWQKQISKLKSFFHTKSNTSHIHKAIVMNDINYTPLHLNEQIDTQPTINEDPQKKKIEDWKKKVLHGRHPHDLEQSHINTTASNKWLKIGSLFPETEGFIIAIQDQIINTKNYRKYIIKDPTITNDKCRKCHSQPETIQHITGACTTLTQTDYTHRHNQVANIIHQRLALKHKLTQDTNPYYKYTPHKVLENNTHKLYYDRGIMTDRTIHYNRPDIILQDKVNKVTYLIDIAVPNTHNLLKTIGEKISKYAELKEEVARIWRQEKVYIVPIVISTTGVIPNHLHHSLKLIDLKDSIYITLQKAAILNTCRIVRKFMQIEENEISPHDSHTHTLR

SEQ ID NO: 21117 - protein, 1317 aa, Noctua janthe
METRSKRKRIGPLPGGDRRGAPGADAGCLSMRTVSGEELNRRAPTDKDTTAEIIDDGDRLTDRTDTPVEPFSPSTVSYTPSRRSSPSIPSSPTLSSSPIISLNTVSPTPTLNAARGVSTFLPASTKAGKARVRMKWSKEVNSFIMQTYLYITKLETDMTTYRQQLHELFIRRYPEITVSEQRISDQRRTIVRNKLLSLEEIDRLKVEVRLQLESENNEDTNNSSITQNTFENIQQEQPQPVDQLEPYTQSLPCYHSQAYSQTTHTSTQTESITIMLENDVQILADTYQIQPTDTRTREIHDKFKTALTQYSGLDPAARPKLPKLRYTPKLCQLVNVFNQNILNQYVSEETQLTDVHTLIYCTALVISEELNYKITDYTGNKRPKTINKPAWQQRLEQDIDKLRADCGRLTQYINNNRSNKVVKRVEVIFKNTTTHTRHERDNRKPEEFLDTLKQKLAVKVHRLRRYKKAQERKNDNSLFAMNEKNFYRKLQTKPQTDTTSENIIELPTAEQLELFWSGIWKEQVQHNDKSDWVTDEKIKWISLEEMDFVELTESDITSITARLHNWKSPGIDKIHNYWYKKLESLHKVLAKNFTDIILGKQYIPEFFATGITYMLPKTQYSPQPSQYRPITCLPTIYKILTSAITTKINKHVEQHNIIAEEQKGCRRGHMGCKEQLVIDSVIHKHAATKNRNLHCTYIDYKKAFDSIPHSWLIQILQIYKINPKIIDFLQNIMSRWKTTLQLNFHDNTVTTRQIAIKKGIYQGDSLSPLWFCLALNPLSHLLQRCQAGYSLKHTTEETTISHLIYMDDIKLYSKTEKDMKKLIEITTEFSKDINMQFGLDKCKTVHIIRGKIKPGDYAINTNDTITAMEPTDLYKYLGYRQLKGLDHTTIKQTLNTEYKRRVVALCKTQLSGKHLIKALNTYAIPILTYSFGVIKWSKTDIQQIERTTRTTLTKHNNLHPKSAIERLTIKRQHGGRGLIDVHHLWQKQISRLKTFFHSKSNTSNIHKAIVMNDINYTPLHLNELIDTQHTNNEDPQKKKIEDWKKKVLHGRHPHDLEQSHIDTTASNKWLMIGSLFPETEGFMIAIQDQIINTKNYRKYIIKDPTITNDKCRKCHSQPETIQHITGACTTLTQTDYTHRHNQVANVIHQNLALKHKLIQDTTPYYKYTPERVLENTTHKLYYDRAIMTDRTIHYNRPDIILQDKTNKVTYLIDIAVPNTHNLQKTIGEKISKYAELKEEVTRIWIQEKVYVVPVVVSTTGVIPNHLHHSLKLIDLKDSIYITLQKAAILNTCRIVRKFMQIEENEISPHDSHTHTLR

SEQ ID NO: 21118 - protein, 1319 aa, Xestia c-nigrum
METRSKRKRIGPLPGGDRRGAPGADAGCHSMRTVSGEELNRRAPTDKATTAEIIDDGDRLTDRTDTPVEPYSPSTASYTPSRRSSSSIPSSPTLLSPPIISSNTVPLTPTLNAARGVSTFLPASTKAGKARVRMKWSKEVNTFIMRTYLHITKLETDMTTYRQQLHEHFTRKYPDISVSEQRISDQRRAIVRNKLLSLAEINRLKVEVRLQLETENNEDTNTNNFTITQNTLENTQQEQPQPYNQSEPYTQSLPCYQSQTHSQTTHTSTQTESTTIMLENDVDILADTHQTQPTHVREIHDKFKTALAQYSGMDPAARPKLPKLRYTPKLCQLVNIFNHNILNQYVSEETQLTDVHTLIYCTALVIAEELNYKVTEYAGNRRPKTINKPAWQQRLEQDIEKLRADCGRLTQYINNNRSTKVVKRVEVIFKNMAVHTRHETDNRKPEEFLDTLKQKLAVKVHRLRRYKKAQERKNDNTLFAMNEKNFYRKLQTKPQTDTTIENTHSIELPTAEQLESFWAGIWEEQVQHNDKSDWVADEKQKWISLEEMDFVELTESDITSITARLHNWKSPGIDKIHNYWYKKLESLHKALAKNFTDIILGKQYVPEFLATGITYMLPKTQYSPQPSQYRPITCLPTIYKILTSAITTKINKHVEHHNIIAEEQKGCRRGHMGCKEQLVIDSVIHKHAASKNINLHCTYIDYKKAFDSIPHSWLIQILRIYKINPKIIDFLQNIMSQWKTTLQLNYHDNTITTRQIAIKKGIYQGDSLSPLWFCLALNPLSHLLQRCQAGYSLKHTTEATTISHLIYMDDIKLYSKTETDMKKLIEITTKFSNDINMQFGLDKCKTLHIIKGKIKPGDYAINTNDIITAMETTDLYKYLGYRQLKGLDHTKIKQTLNTEYKRRMVAVCKTQLSGKHLIKALNTYAIPILTYSFGVIKWSKTDIQQIERTTRTTLTKHNNLHPKSAIERLTIKRQHGGRGLIDVHHLWQKQISKLKSFFHTKSNTSHIHKAIVMNDINYTPLHLNEQIDTQPTINEDPQKKKIEDWKKKVLHGRHPHDLEQSHINTTASNKWLKIGSLFPETEGFIIAIQDQIINTKNYRKYIIKDPTITNDKCRKCHSQPETIQHITGACTTLTQTDYTHRHNQVANIIHQRLALKHKLTQDTNPYYKYTPHKVLENNTHKLYYDRGIMTDRTIHYNRPDIILQDKVNKVTYLIDIAVPNTHNLLKTIGEKISKYAELKEEVARIWRQEKVYIVPIVISTTGVIPNHLHHSLKLIDLKDSIYITLQKAAILNTCRIVRKFMQIEENEISPHDSHTHTLR

SEQ ID NO: 21119 - protein, 1321 aa, Noctua janthe
METRSKRKRIGPLPGGHRRGAPGADAGCLSMRTVSGEELNRRAPTDKDTTAEIIDDGDRLTDRTDTPVEPFSPSTVSYTPSRRSSPSIPSSPTLSSSPIISLNTVSPTPTLNAARGVSTFLPASTKAGKARVRMKWSKEVNTFIMRTYLYITKLETDMTTYRQQLHELFIRRYPDITVSEQRISDQRRTIVRNKLLSLEEIDRLKVEVRLQLESENNEDTNNSSITQNTFENIQQEQPQPVDQSEPYTQSLPCYHSQAYSQTTHTSTQTESITIMLENDVQILADTCQIQPTDTRTREIHDKFKTALTQYSGLDPAARPKLPKLRYTPKLCQLVNVFNQNILNQYVSEETRLTDVHTLIYCTALVISEELNYKITGYTGNRRPKTINKPAWQQRLEQDIDKLRADCGRLTQYINNNRSNKVVKRVEVIFKNTTTHTRHERDNRKPEEFLDTLKQKLAVKVHRLRRYKKAQERKNDNSLFAMNEKNFYRKLHTKPQTDTTSENIIELPTAEQLESFWSGIWEEQVQHNDKSNWVTDEKTKWISLEEMDFVELTESDITSITARLHNWKSPGIDKIQNYWYKKLESLHKVLAKNFTDIILGKQFIPEFLATGITYMLPKTQYSPQPSQYRPITCLPTIYKILTSAITTKINKHVEQHNIIAEEQKGCRRGHMGCKEQLVIDSVIHKHAATKNRNLHCTYIDYKKAFDSIPHSWLIQILQIYKINPKIIDFLQNIMSRWKTTLQLNFHDNTITTRQIAIKKGIYQGDSLSPLWFCLALNPLSHLLQRCQAGYCLKHTTEETTISHLIYMDDIKLYSKTEKDMKKLIEITTEFSKDINMQFGLDKCKTVHIIRGKIKPGDYAINTNDTITAMEPTDLYKYLGYRQLKGLDHTTIKQTLNTEYKRRVVALCKTQLSGKHLIKALNTYAIPILTYSFGVIKWSKTDIQQIERTTRTTLTKHNNLHPKSAIERLTIKRQHGGRGLIDVHHLWQKQISRLKTFFHSKSNTSNIHKAIVMNDINYTPLHLNELIDTQHTNNEDPQKKKIEDWKKKVLHGRHPHDLEQSHIDTTASNKWLMIGSLFPETEGFMIAIQDQIINTKNYRKYIIKDPTITNDKCRKCHSQPETIQHITGACTTLTQTDYTHRHNQVANVIHQNLALKHKLIQDTTPYYKYTPERVLENTTHKLYYDRAIMTDRTIHYNRPDVILQDKTNKVTYLIDIAVPNTHNLQKTIGEKISKYAELKEEVTRIWRQEKVYVVPVVVSTTGVIPNHLHHSLKLIDLKDSIYITLQKAAILNTCRIVRKFMQIEENEISPHDSHTHTRYVDLV

SEQ ID NO: 21120 - protein, 888 aa, Xestia c-nigrum
MAVHTRHETDNRKPEEFLDTLKQKLAVKVHRLRRYKKTQERKNDNTLFAMNEKNFYRKLQTKPQTDTTIENTHSIELPTAEQLESFWAGIWEEQVQHNDKSDWVADEKQKWISLEEMDFVELTESDITSITARLHNWKSPGIDKIHNYWYKKLESLHKALAKNFTDIILGKQYVPEFLATGITYMLPKTQYSPQPSQYRPITCLPTIYKILTSAITTKINKHVEHHNIIAEEQKGCRRGHMGCKEQLVIDSVIHKHAASKNINLHCTYIDYKKAFDSIPHSWLIQILRIYKINPKIIDFLQNIMSQWKTTLQLNYHDNTITTRQIAIKKGIYQGDSLSPLWFCLALNPLSHLLQRCQAGYSLKHTTEATTISHLIYMDDIKLYSKTETDMKKLIEITTKFSNDINMQFGLDKCKTLHIIKGKIKPGDYAINTNDIITAMETTDLYKYLGYRQLKGLDHTKIKQTLNTEYKRRMVAVCKTQLSGKHLIKALNTYAIPILTYSFGVIKWSKTDIQQIERTTRTTLTKHNNLHPKSAIERLTIKRQHGGRGLIDVHHLWQKQISKLKSFFHTKSNTSHIHKAIVMNDINYTPLHLNEQIDTQPTINEDPQKKKIEDWKKKVLHGRHPHDLEQSHINTTASNKWLKIGSLFPETEGFIIAIQDQIINTKNYRKYIIKDPTITNDKCRKCHSQPETIQHITGACTTLTQTDYTHRHNQVANIIHQRLALKHKLTQDTNPYYKYTPHKVLENNTHKLYYDRGIMTDRTIHYNRPDIILQDKVNKVTYLIDIAVPNTHNLLKTIGEKISKYAELKEEVARIWRQEKVYIVPIVISTTGVIPNHLHHSLKLIDLKDSIYITLQKAAILNTCRIVRKFMQIEENEISPHDSHTHTLR

SEQ ID NO: 21121 - protein, 1318 aa, Ochropleura plecta
METRSKRKRIGPLPGGDRRGAPGADAGCHSMRTVSGEELNRRAPTDKDTTAEIIDDGDRLTDRTDTPVEPYSPSTVSYTPSRPSSPSIPSSPTFLSPPIINSNTVLPIPTLNVARGVSTFLPASTKAGKARVRMKWSKEVNLYIMRTYLYITKLETDMTTYRQQLHELFTRQYPEINVSEQRISDQRRTIVRNKLLSLSEIDQLREEVRLQLELENNRDTNNIATTQNITENNQEVQSQTYAQLEPYTQSQPCYQSQSISQTTHISTQTENITVMLENDIQILPDTHRMQPSDTRIDEIHDKFKTALTLYSGMDPAARPKLPKLRYSPKLCQLIKIFNQNILNQYISEETQLIDVHTLIYCTALVISEELNYKITEYTGNTRRKNINKPAWQQRLEQDIEILRADCGRLTQYINNNRSNKVVKRVEIIFKNMATHTRHETDNSKPEEFLDTLKQKLAVKVHRLRRYRKAQERKNDNSLFAMNEKNFYRKLQTKPESDTTHENSIVELPTAEQLESFWSGIWEEQIQHNDRAEWVTDENTRWISLQEMEFVELTESDITNITARLHNWKSPGIDKIHNYWYKKLETIHKVLAKNLTDIILGKQHIPEFLATGITYMLPKTQYCPQPSQYRPITCLPTIYKILTSAITTKINKHVEHNNIIAEEQKGCRRGHMGCKEQLIIDSVIHKHAATKNRNLHCTYIDYKKAFDSIPHSWLIQILQIYKINPKIIDFLQNIMSRWKTTLQLNYHDNTITTRQIAIKKGIYQGDSLSPLWFCLALNPLSHLLQRCQAGYCLKHTTEETTISHLIYMDDIKLYAKTEKEMKKLVEITTEFSKDINMQFGLDKCKTVHIIRGKIKPGDYAINTTDTITAMEHTDVYKYLGYRQLKGIDHTTIKQTLNTEYKRRVVAVCKSQLSGKYLIKALNTYAIPILTYSFGVIKWSKTDIQQIERTTRTTLTKHNNLHPKSAIERLTIKRQHGGRGLIDVHNLWQKQITRLKTFFYSKSNTSNIHKAIIMNDINYTPLHLNEQIDTHQTNNEDPQEKKMEEWKKKVLHGRHPHDLGQSHIDTKASNKWLMIGNLFPETEGFLIAIQDQIINTKNYRKFIIKDPTLTNDKCRKCHSQPETIQHITGACATLTQTDYTHRHNQVANVIHQNLALKHKLIQDTTPYYKYTPEKVLENTTHKLYYDRAIMTDRTIHYNRPDVILQDKTNKITYLIDIAVPNTHNLQKTIGEKISKYAELKEEVTRIWRQEKVYVVPIVVSTTGVIPNHLHHSLKLIDLKDSIYITLQKAAILNTCRIVRKFMQIEENEISSHDSHTHTLH

SEQ ID NO: 21122 - protein, 1314 aa, Noctua janthe
METRSKRKRIGPLPGGDRRGAPGADAGCLSMRTVSGEELNRRAPTDKDTTAEIIDDGDRLTDRTDTPVEPFSPSTVSYTPSRRSSPSIPSSPTLSSSPIISLNTVSPTPTLNAARGVSTFLPASTKAGKARVRMKWSKEVNSFIMQTYLYITKLETDMTTYRQQLHELFIRRYPEITVSEQRISDQRRTIVRNKLLSLEEIDRLKVEVRLQLESENNEDTNNSSITQNTFENIQQEQPQPVDQLEPYPQSLPCYHSQAYSQTTHTSTQTESITIMLENDVQILADTYQIQPTDTRTREIHDKFKTALTQYSGLDPAARPKLPKLRYTPKLCQLVNVFNQNILNQYVSEETQLTDVHTLIYCTALVISEELNYKITDYTGNKRPKTINKPAWQQRLEQDIDKLRADCGRLTQYIYNNRSNKVVKRVEVIFKNTTTHIRHERDNRKPEEFLDTLKQKLAVKVHVLRRYKKAQERKNDNSLFAMNEKNFYRKLQTKPQTDTTSENIIELPTAEQLESFWSGIWEEQVQHNDKSDWVTDEKTKWISLEEMDFVELTESDITSITARLHNWKSPGIDKIHNYWYKKLESLHKVLAKNFTDIILGKQYIPEFFATGITYMLPKTQYSPQPSQYRPITCLPTIYKILTSAITTKINKHVEQHNIIAEEQKGCRRGHMGCKEQLVIDSVIHKHAATKNRNLHCTYIDYKKAFDSIPHSWLIQIYKINPKIIDFLQNIMSRWKTTLQLNFHDNTVTTRQIAIKRGIYQGDSLSPLWFCLALNPLSHLLQRCQAGYSLKHTTEETTISHLIYMDDIKLFSKTEKDMKKLIEITTEFSKDINMQFGLDKCKTVHIIRGKIKPGDYAINTNDTITAMEPTDLYKYLGYRQLKGLDHTTIKQTLNTEYKRRVVALCKTQLSGKHLIKALNTYAIPILTYSFGVIKWSKTDIQQIERTTRTTLTKHNNLHPKSAIERLTIKRQHGGRGLIDVHHLWQKQISRLKTFFHSKSNTSNIHKAIVMNDINYTPLHLNELIDTQHTNNEDPQKKKIEDWKKKVLHGRHPHDLEQSHIDTTASNKWLMIGSLFPETEGFMIAIQDQIINTKNYRKYIIKDPTITNDKCRKCHSQPETIQHITGACTTLTQTDYTHRHNQVANVIHQNLALKHKLIQDTTPYYKYTPERVLENTTHKLYYDRAIMTDRTIHYNRPDIILQDKTNKVTYLIDIAVPNTHNLQKTIGEKISKYAELKEEVTRIWRQEKVYVVPVVVSTTGVIPNHLHHSLKLIDLKDSIYITLQKAAFLNTCRIVRKFMQIEENEISPHDSHTHTLR

SEQ ID NO: 21123 - protein, 1306 aa, Noctua pronuba
METRSKKKRIGPLPGGDRRGTPGADAGCLSMRTVSGEELSRRAPTDKDTTAEIIDDGDRLTDRTDTPVEPYSPSTVSYTPSRRSSPSIPSSPTLSSSPIISLNTVSPTPTLNAARGVSTFLPASTKAGKARVRMKWSKEVNTFIMRTYLYITKLETDMTTYRQQLHELFSRRYPDITVSEQRISDQRRTVVRNKLLSLEEIDRLKVEVRLQLESENNEDTNNISITQNTLENTQQEQPQLVDQSEPYTQSLPCYHSQSYSQTSHTSTQTENLTITLENDVQILADTHQIQPTDTSIREIHDKFKTVLTQYSGMDPAARPKLPKLRYTPKLCQLVNVFNQNILKQYVSEETQLIDVHTLIYCTALVISEELNYKITDYTGNRRPKTINKPAWQQRLEQDIEKLRADCGRLTQYINNNRSNKVVKRVEVIFKNMTIHTRHERDNRKPEEFLDTLKQKLAVKVHRLRRYKKALERKNDNSLFAMNEKNFYRKLQTKPQTDTTSENSIELPTAEQLESFWSGVWEEQVQHNDKSDWVADEKTKWISLDEMDFVELTESDITSITGRLHNWKSPGIDKIHNYWYKKLESLHKVLAKNFTDIILGKQYVPEFLATGITYMLPKTQYSPQPSQYRPITCLPTIYKIITSAITTKINKHVEHHNIIAEEQKGCRRGHMGCKEQLIIDSVIHKHAATKNRNLHCTYIDYKKAFDSIPHSWLIQILQIYKINPKIIDFLQNIMSRWKTTLQLNYLDNTVTTRQIAIKKGIYQGDSLSPLWFCLALNPLSHLLQRCQAGYCLKHTTEETTISHLIYMDDIKLYSNTEKDMKKLIEITTEFSKDINMQFGLDKCKTVHIIRGKIKPGDYAINTNDTIAAMEPTDLYKYLGYKQLKGLDHTTIKQTLNTEYKRRVVAVCKTQLSGKHLIKALNTYAIPILTYSFGVIKWSKTDIQQIERTTRTTLTKHNNLHPKSAIERLTIKRQHGGRGLIDVHHLWQKQISRLKTFFHSKCNTSNIHKAIVSNDINYTPLHLNEQIDTQHTNNDDPQKKKIEDWKKKVLHGRHPHDLEQSHIDTSASNKWLRIGSLFPETEGFMIAIQDQIINTKNYRKFIIKDPTITNDKCRKCHSQPETIQHITGACTTLTQTDYTHRHNQVANVIHQNLAHKHKLIQGTSTSPYYKYTPEKVLENTTRKLYYDRGIMTDRTIHYNRPDIILQDKVNKVTYLIDIAVPNTHNLQKTIGEKISKYAELKEEVTRIWRQEKVYVVPIVISTTGVIPNHLHHSLKLIDLKDSIYITLQKAAILNTCRIVRKFMQIEEN

SEQ ID NO: 21124 - protein, 1317 aa, Noctua janthe
METRSKRKRIGPLPGGDRRGAPGADAGCLSMRTVSGEELNRRAPTDKDTTAEIIDDGDRLTDRTDTPVELFSPSTVSYTPSRRSSPSIPSSPTLSSSPIISLNTVSPTPTLNAARGVSTFLPASTKAGKARVRMKWSKEVNTFIMRTYLYITKLETDMTTYRQQLHELFIRRYPEITVSEQRISDQRRTIVRNKLLSLEEIDRLKVEVRLQLESENNEDTNNSSITQNTFENIQQEQPQPVDQSEPYTQSLPCYHSQAYSQTTHTSTQTESITIMLENDVQILADTYQIQPTDTRTREIHDKFKTALTQYSGLDPAARPKLPKLRYTPKLCQLVNVFNQNILNQYVSEETQLTDVHTLIYCTALVISEELNYKITDYTGNRRPKTINKPAWQQRLEQDIDKLRADCGRLTQYINNNRSNKVVKRVEVIFKNTTTHTRHERDNRKPEEFLDTLKQKLAVKVHRLRRYKKAQERKKDNSLFAMNEKNFYRKLQTKPQTDTTSENIIELPTAEQLESFWSGIWEEQVQHNDKSDWVTDEKTKWISLEEMDFVELTESDITSITARLHNWKSPGIDKIHNYWYKKLESLHKVLAKNFTDIILGKQYIPEFFATGITYMLPKTQYSPQPSQYRPITCLPTIYKILTSAITTKINKHVEQQNIIAEEQKGCRRGHMGCKEQLVIDSVIHKHAATKNRNLHCTYIDYKKAFDSIPHSWLIQILQIYKINPKIIDFLQNIMSRWKTTLQLNFHDNTVTTRQIAIKKGIYQGDSLSPLWFCLALNPLSHLLQRCQVGYSLKHTTEETTISHLIYMDDIKLYSKTEKDMKKLIEITTEFSKDINMQFGLDKCKTVHIIRGKIKPGDYAINTNDTITAMEPTDLYKYLGYRQLKGLDHTTIKQTLNTEYKRRVVALCKTQLYGKHLIKALNTYAIPILTCSFGVIKWSKTDIQQIERTTRTTLTKHNNLHPKSAIERLTIKRQHGGRGLIDVHHLWQKQISRLKTFFHSKSNTSNIHKAIVMNDINYTPLHLNELIDTQHTNNEDPQKKKIEDWKKKVLHGRHPHDLEQSHIDTTASNKWLMIGSLFPETEGFMIAIQDQIINTKNYRKYIIKDPTITNDKCRKCHSQPETIQHITGACTTLTQTDYTHRHNQVANVIHQNLALKHKLIQDTTPYYKYTPERVLENTTHKLYYDRAIMTDRTIHYNRPDVILQDKTNKVTYLIDIAVPNTHNLQKTIGEKISKYAELKEEVTRIWRQEKVYVVPVVVSTTGVIPNHLHHSLKLIDLKDSIYITLQKAAILNTCRIVRKFMQIEENEISPHDSHTHTLR

SEQ ID NO: 21125 - protein, 1317 aa, Noctua janthe
METRSKRKRIGPLPGGDRRGAPGADAGCLSMQTVSGEELNRRAPTDKDTTAEIIDDGDRLTDRTDTPVEPFSPSTVSYTPSRRSSPSIPSSPTLSSSPIISLNIVSPTPTLNAARGVSTFLPASTKAGKARVRMKWSKEVNTFIMRTYLYITKLETDMTTYRQQLHELFIRRYPEITVSEQRISDQRRTIVRNKLLSLEEIDRLKVEVRLQLESENNEDTNNSSITQNTFENIQQEQPQPVDQSEPYTQSLPCYHSQAYSQTTHTSTQTESITIMLENDVQILSDTYQIQPTDTRTREIHDKFKTALTQYSGLDPAARPKLPKLRYTPKLCQLVNVFNQNILNQYVSEETQLTDVHTLIYCTALVISEELNYKITDYTGNRRPKTINKPAWQQRLEQDIDKLRADCGRLTQYINNNRSNKVVKRVEVIFKNTTTHTRHERDNRKPEEFLDTLKQKLAVKVHRLRRYKKAQERKNDNCLFATNEKNFYRKLQTKPQTDTTSENIIELPTAEQLESFWSGIWEEQVQHDDKSDWVTDEKTKWISLEEMDFVELTESDITSITARLHNWKSPGIDKIHNYWYKKLESLHKVLAKNFTDIILGKQYIPEFFATGITYMLPKTQYSPQPSQYRPITCLPTIYKILTSAITTKINKHVEQHNIIAEEQKGCRRGHMGCKEQLVIDSVIHKHAATKNRNLHCTYIDYKKAFDSIPHSWLIQILQIYKINPKIIDFLQNIMSRWKTTLQLNFHDNTITTRQIAIKKGIYQGDSLSPLWFCLALNPLSHLLQRCQAGYCLKHTTEETTISHLIYMDDIKLYSKTEKDMKKLIEITTEFSKDINMQFGLDKCKTVHIIRGKIKPGDYAINTNDTITAMEPTDLYKYLGYRQLKGLDHTTIKQTLNTEYKRRVVALCKTQLYGKHLIKALNTYAIPILTYSFGVIKWSKTDIQQIERTTRTTLTKHNNLHPKSAIERLTIKRQHGGRGLIDVHHLWQKQISRLKSFFHSKSNTSNIHKAIVMNDINYTPLHLNELIDTQHTNNEDPQKKKIEDWKKKVLHGRHPHDLEQSHIDTTASNKWLMIGSLFPETEGFMIAIQDQIINTKNYRKYIIKDPTITNDKCRKCHSQPETIQHITGACTTLTQTDYTHRHNQVANVIHQNLALKHKLIQDTTPYYKYTPERVLENTTHKLYYDRAIMTDRTIHYNRPDIILQDKTNKVTFLIDIAVPNTHNLQKTIGEKISKYAELKEEVTRIWRQEKVYVVPVVVSTTGVIPNHLHHSLKLIDLKDSIYITLQKAAILNTCRIVRKFMQIEENEISPHDSHTHTLR

SEQ ID NO: 21126 - protein, 1319 aa, Xestia xanthographa
METRSKRKRIGPLPGGDRRGAPGADARCHSMRSVSGEELNRRAPTDKDTTAEIIDDGDRLTYRTDTPVEPYSPSTVSYTPSRRSSSSIPSSPTLSSPPIISSNTVPPTPTLNAARGVSTFLPASTKAGKARVRMKWSKEVNTFIMRTYLHITKLETDMTTYRQQLHELFTRQYPETSVSEQRISDQRRAIVRNKLLSLVEIDRLKVEVRLQLETENNEDTNTNNCIITQNTLENTQQEQPQPYNQSEPYTQSLPCYQSQTYSQTTHTSTQTESITIILENDVHILADTHLIQPTDTLTREIHDKFKTALAQYSGMDPAVRPKLPKLRYTPKLHQLVNIFNQNILNQYVSEETQLTDVHTLIYCTALVISEELNYKITEYPGNRRPKTINKPAWQQRLEQDIEKLRADCGRLTQYINNNRSSKVVKRVEVIFKNMAIHTRHERDNRKPEEFLDTLKQKLAVKVHRLRRYKKAQERKNDNSLFAMNEKNFYRKLQTKPQTDTTPENSIELPTAEQLESFWAGIWEEQVQHNDKSDWVTDEKTKWISLEEMDFVELTESDITSITARLHNWKSPGIDKIHNYWYKKLESLHKVLAKNFTDIILGKQYVPEFLATGITYMLPKTQYSPQPSQYRPITCLPTIYKILTSAITTKINKHVEHHNIIAEEQKGCRRGHMGCKEQLVIDSVIHKHAATKNKNLHCTYIDYKKAFDSIPHSWLIQILQIYKINPKIIDFLQNIMSRWKTTLQLNYHDNTVTTKQIAIKKGIYQGDSLSPLWFCLALNPLSHLLQRCQAGYCIKHTTGETTISHLIYMDDIKLYSKTETDMKKLIEITTEFSKDINMQFGLDKCKTLHIIKGKIKPGDYAINTNDSITAMELTDLYKYLGYRQLKGLDHTTIKQTLNTEYKRRVVAVCKTQLSGKHLIKALNTYAIPILTYSFGVIKWSQTDIQQIERTTRTTLTKHNNLHPKSAIERLTIKRQHGGRGLIDVHDLWQKQITRLKTFFHTKSNTSNIHKAIVMNDVNYTPLHLNKQIDSQPTNNEDPQKKKIEDWKKKVLHGRHPHDLDQSHIDTTASNKWLKIGSLFPETEGFIIAIQDQIINTKNYRKYIIKDPTITNDKCRKCHSQPETIQHITGACTTLTQTDYTHRHNQVANVIHQHLAPKHKLIQDTSPYYKYTPERVLENTTHKLYYDRGIMTDRTIHYNRPDIILQDKVNKVTYLIDIAVPNTHNLQKTIGEKISKYAELKEEVTRIWRQEKVYVVPIVVSTTGVIPNHLHHSLKLIDLKDSIYITIQKAAILNTCRIVRKFMQIEENEISPHNSHTHTLR

SEQ ID NO: 21127 - protein, 1319 aa, Xestia xanthographa
METRSKRKRIGPLPGGDRRGAPGADARCHSMRSVSGEELNRRAPTDKDTTAEIIDDGDRLTYRTDTPVEPYSPSTVSYTPSRRSSSSIPSSPTLSSPPIISSNTVPPTPTLNAARGVSTLLPASTKAGKARVRMKWSKEVNTFIMRTYLHITKLETDMTTYRQQLHELFTRQYPETSVSEQRISDQRRAIVRNKLLSLVEIDRLKVEVRLQLETENNEDTNTNNCIITQNTLENTQQEQPQPYNQSEPYTQSLPCYQSQTYSQTTHTSTQTESITLILENDVHILTDTHQIQPTDTRTREIHDKFKTALAQYSGMDPAVRPKLPKLRYTPKLHQLVNIFNQNILNQYVSEETQLTDVHTLIYCTALVISEELNYKITEYAGNRRPKTINKPAWQQRLEQDIEKLRADCGRLTQYINNNRSSKVVKRVEVIFKNMAIHTRHERDNRKPEEFLDTLKQKLAVKVHRLRRYKKAQERKNDNSLFAMNEKNFYRKLQTKPQTDTTPENSIELPTAEQLESFWAGIWEEQVQHNDKSDWVTDEKTKWISLEEMDFVELTESDITSITARLHNWKSPGIDKIHNYWYKKLESLHKVLAKNFTDIILGKQYVPEFLATGITYMLPKTQYSPQPSQYRPITCLPTIYKILTSAITTKINKHVEHHNIIAEEQKGCRRGHMGCKEQLVIDSVIHKHAATKNKNLHCTYIDYKKAFDSIPHSWLIQILQIYKINPKIIDFLQNIMSRWKTTLQLNYHDNTVTTKQIAIKKGIYQGDSLSPLWFCLALNPLSHLLQRCQAGYCLKHTTGETTISHLIYMDDIKLYSKTETDMKKLVEITTEFSKDINMQFGLDKCKTLHIIRGKIKPGDYAINTNDSITAMEPTDLYKYLGYRQLKGLDHTTIKQTLNTEYKRRVVAVCKTQLSGKHLIKALNTYAIPILTYSFGVIKWSQTDIQQIERTTRTTLTKHNNLHPKSAIERLTIKRQHGGRGLIDVHDLWQKQITRLKTFFHTKSNTSNIHKAIVMNDINYTPLHLNKQIDSQPTNNEDPQKKKIEDWKKKVLHGRHPHDLEQSHIDTTASNKWLKIGSLFPETEGFIIAIQDQIINTKNYRKYIIKDPTITNDKCRKCHSQPETIQHITGACTTLTQTDYTHRHNQVANVIHQHLALKHKLIQDTSPYYKYTPERVLENTTHKLYYDRGIMTDRTIHYNRPDIILQDKVNKVTYLIDIAVPNTHNLQKTIGEKISKYAELKEEVTRIWRQEKVYVVPIVVSTTGVIPNHLHHSLKLIDLKDSIYITLQKAAILNTCRIVRKFMQIEENEISPHDSHTHTLR

SEQ ID NO: 21128 - protein, 1315 aa, Noctua janthe
METRSKRKRIGPLPGGDRRGAPGADAGCLSMRTVSGEELNRRAPTDKDTTAEIIDDGDRLTDRTDTPVELFSPSTVSYTPSRRSSPSIPSSPTLSSSPIISLNTVSPTPTLNAARGVSTFLPASTKAGKARVRMKWSKEVNTFIMRTYLYITKLETDMTTYRQQLHELFIRRYPEITVSEQRISDQRRTIVRNKLLSLEEIDRFKVEVRLQLESENNEDTNNSSITQNTFENIQQEQPQPVDQSEPYTQSLPCYHSQAYSQTTHTSTQTESIMLENDVQILADTYQIQPTDTRTREIHDKFKTALTQYSGLDPAARPKLPKLRYTPKLCQLVNVFNQNILNQYVSEETQLTEVHTLIYCTALVISEELNYKITDYTGNRRPKTINKPAWQQRLEQDIDKLRADCGRLTQYINNNRSNKVVKRVEVIFKNTTTHTRHERDNRKPEEFLDTLKQKLAVKVHRLRRYKKAQERKKDNSLFAMNEKNFYRKLQTKPQTDTTSENIIELPTAEQLESFWSGIWEEQVQHNDKSDWVTDEKTKWISLEEMDFVELTESDITSITARLHNWKSPGIDKIHNYWYKKLESLHKVLAKNFTDIILGKQYIPEFFATGITYMLPKTQYSPQPSQYRPITCLPTIYKILTSAITTKINKHVEQQNIIAEEQKGCRRGHMGCKEQLVIDSVIHKHAATKNRNLHCTYIDYKKAFDSIPHSWLIQILQIYKINPKIIDFLQNIMSRWKTTLQLNFHDNTVTTRQIAIKKGIYQGDSLSPLWFCLALNPLSHLLQRCQVGYSLKHTTEETTISHLIYMDDIKLYSKTEKDMKKLIEITTEFSKDINMQFGLDKCKTVHIIRGKIKPGDYAINTNDTITAMEPTDLYKYLGYRQLKGLDHTTIKQTLNTEYKRRVVALCKTQLYGKHLIKALNTYAIPILTYSFGVIKWSKTDIQQIERTTRTTLTKHNNLHPKSAIERLTIKRQHGGRGLIDVHHLWQKQISRLKTFFHSKSNTSNIHKAIVMNDINYTPLHLNELIDTQHTNNEDPQKKKIEDWKKKVLHGRHPHDLEQSHIDTTASNKWLMIGSLFPETEGFMIAIQDQIINTKNYRKYIIKDPTITNDKCRKCHSQPETIQHITGACTTLTQTDYTHRHNQVANVIHQNLALKHKLIQDTTPYYKYTPERVLENTTHKLYYDRAIMTDRTIHYNRPDVILQDKTNKVTYLIDIAVPNTHNLQKTIGEKISKYAELKEEVTRIWRQEKVYVVPVVVSTTGVIPNHLHHSLKLIDLKDSIYITLQKAAILNTCRIVRKFMQIEENEISPHDSHTHTLR

SEQ ID NO: 21129 - protein, 1317 aa, Noctua janthe
METRSKRKRIGPLPGGDRRGAPGADAGCLSMRTVSGEELNRRAPTDKDTTAEIIDDGDRLTDRTDTPVEPFSPSTVSYTPSRRSSPSIPSSPTLSSSPIISLNTVSPTPTLNAARGVSTFLPASTKAGKARVRMKWSKEVNSFIMQTYLYITKLETDMTTYRQQLHELFIRRYPEITVSEQRISDQRRTIVRNKLLSLEEIDRLKVEVRLQLESENNEDTNNSSITQNTFENIQQEQPQPVDQLEPYTQSLPCYHSQAYSQTTHTSTQTESITIMLENDVQILADTYQIQPTDTRTREIHDKFKTALTQYSGLDPAARPKLPKLRYTPKLCQLVNVFNQNILNQYVSEETQLTDVHTLIYCTALVISEELNYKITDYTGNKRPKTINKPAWQQRLEQDIDKLRADCGRLTQYINNNRSNKVVKRVEVIFKNTTTHTRHERDNRKPEEFLDTLKQKLAVKVHRLRRYKKAQERKNDNSLFAMNEKNFYRKLQTKPQTDTTSENIIELPTAEQLELFWSGIWEEQVQHNDKSDWVTDEKIKWISLEEMDFVELTESDITSITARLHNWKSPGIDKIHNYWYKKLESLHKVLAKNFTDIILGKQYIPEFFATGITYMLPKTQYSPQPSQYRPITCLPTIYKILTSAITTKINKHVEQHNIIAEEQKGCRRGHMGCKEQLVIDSVIHKHAATKNRNLHCTYIDYKKAFDSIPHSWLIQILQIYKINPKIIDFLQNIMSRWKTTLQLNFHDNTVTTRQIAIKKGIYQGDSLSPLWFCLALNPLSHLLQRCQAGYSLKHTTEETTISHLIYMDDIKLYSKTEKDMKKLIEITTEFSKDINMQFGLDKCKTVHIIRGKIKPGDYAINTNDTITAMEPTDLYKYLGYRQLKGLDHTTIKQTLNTEYKRRVVALCKTQLSGKHLIKALNTYAIPILTYSFGVIKWSKTDIQQIERTTRTTLTKHNNLHPKSAIERLTIKRQHGGRGLIDVHHLWQKQISRLKTFFHSKSNTSNIHKAIVMNDINYTPLHLNELIDTQHTNNEDPQKKKIEDWKKKVLHGRHPHDLEQSHIDTTASNKWLMIGSLFPETEGFMIAIQDQIINTKNYRKYIIKDPTITNDKCRKCHSQPETIQHITGACTTLTQTDYTHRHNQVANVIHQNLALKHKLIQDTTPYYKYTPERVLENTTHKLYYDRAIMTDRTIHYNRPDIILQDKTNKVTYLIDIAVPNTHNLQKTIGEKISKYAELKEEVTRIWIQEKVYVVPVVVSTTGVIPNHLHHSLKLIDLKDSIYITLQKAAILNTCRIVRKFMQIEENEISPHDSHTHTLR

SEQ ID NO: 21130 - protein, 1134 aa, Griposia aprilina
MRWSKEVNLFIMRTYLYITKLETDLTTYRKQLHELFTRQYPEITVTEQRISDQRRIIVRNKLLSQDVIAQLKEEVRTQLQTESQANSQTTHTSTQTESITIMLENEIETLVDININQSTDTRIQEIHDKFKTALTQYSGMDPAARPKLPKLRYTPKLSQLVYLFNHNILQQYINEEIHLIDVHTLIYCTALVISEELNFKITEYTGNPRPRNIKKPAWQQRLEKDIEKLRADCSRLTHYINNNRSKKVVKRVEEIFKNMATHTRHENDNRKPEEFLDTLKQKLALKVHRLRRYKKAQERIKDNSLFATNEKNFYRNLQKPQTATTTQMTENNVELPTAEQLETFWSGIWEEQLQHNEKSDWIADEETKWSSLEEMEFIELTESDITSITARLHSWKSPGIDKIHNYWYKKLESLHKVLAKNLTQIIIRKQNIPEFIATGITYMLPKTQYSPQPSQYRPITCLPTIYKILTSAITTKINKHIENHNIIAEEQKGCRRGHMGCKEQLVIDSIIHKHAATKNRSLHCTYIDYKKAFDSIPHSWLIQILQIYKINTKIIDFLQDIMPHWRTTLQLNYLNNTITTRQISIKKGIYQGDSLSPLWFCLALNPLSNLLHRSQAGYSLKHTTEETVISHLIYMDDIKLYAKSEKEMKKLIDTTTEFSKDINMQFGLDKCKTVHIVRGKIKPGDYPINNTDSITAMESTDLYKYLGYRQLKGIDHTAIKHTLNTEYKRRVIAVCKTQLSGKHLIKPLNTYAIPILTYSFGVIKWSKTDIQQIERTTRTTLTKHNNLHPKSAIERLTIKRQHGGRGLIDIHHLWQKQIARLRTFFHSKSHTSNIHNAVVLNDISYTPLNLHEHVGTQQTSNDDPHKQKLEDWKKKVLHGRHPHDLEQSHIDTIASNKWLKIGNLFPETEGFIIAIQDQIINTKNYRKFIIKDPTITNDKCRKCHNQPETIQHITGACTTLTQTDYTHRHNQVANVIHQKLAVKYKLIQDKNTPYYKYVPQTVLENTTHKLYYDRAILTDRTVHYNRPDITLQDKVNKVTYLIDIAVPNTHNLQKTIGEKISKYAELKEEVSRIWRQEKVFVVPIVVSTTGVIPNHLHHSLKLIDLNDSIYITLQKAAILNTCRIVRKFMQMEEN

SEQ ID NO: 21131 - protein, 1287 aa, Noctua janthe
MRTVSGEELNRRAPTDKDTTAEIIDDGDRLTDRTDTPVEPFSPSTVSYTPSRRSSPSIPSSPTLSSSPIISLNTVSPTPTLNAARGVSTFLPASTKAGKARVRMKWSKEVNTFIMRTYLYITKLETDMTTYRQQLHELFIRRYPEITVSEQRISDQRRTIVRNKLLSLEEIDRLKVEVRLQLESENNEDTNNSSITQNTFENIQQEQPQPVDQSEPYTQSLPCYHSQAYSQTTHTSTQTESITIMLENDVQILADTCQIQPTDTRTREIHDKFKTALTQYSGLDPAARPKLPKLRYTPKLCELVNVFNQNILNQYVNEETQLTDVHTLIYCTALVISEELNYKITGYTGNRRPKTINKPAWQQRLAQDIDKLRADCGRLTQYINNNRSNKVVKRVEVIFKNTTTHTRHERDNRKPEEFLDTLKQKIAVKVHRLRRYKKAQERKNDNSLFAMNEKNFYRKLHTKPQTDTTSENIIELPTAEQLESFWSGIWEEQVQHNDKSDWVTDEKTKWISLEEMDFVELTESDITSITARLHNWKSPGIDKIHNYWYKKLESLHKVLAKNFTDVILGKQFIPEFFATGITYMLPKTQYSSQPSQYRPITCLPTIYKILTSAITTKINKHVEQHNIIAEEQKGCRRGHMGCKEQLVIDSVIHKHAATKNRNLHCTYIDYKKAFDSIPHSWLIQILQIYKINPKIIDFLQNIMSRWKTTLQLNFHDNTITTRQIAIKKGIYQGDSLSPLWFCLALNPLSHLLQRCQAGHCLKHTTEETTISHLIYMDDIKLYSKTEKDMKKLIEITTEFSKDINMQFGLDKCKTVHIIRGKIKPGDYAINTNDTITAMEPTDLYKYLGYRQLKGLDHTTIKQTLNTEYKRRVVALCKTQLSGKHLIKALNTYAIPILTYSFGVIKWSKTDIQQIERTTRTTLTKHNNLHPKSAIERLTIKRQHGGRGLIDVHHLWQKQISRLKTFFHSKSNTSNIHKAIVMNDINYTPLHLNELIDTQQTNNEDPQKKKIEDWKKKVLHGRHPHDLEQSHIDTTASNKWLMIGSLFPETEGFMIAIQDQIINTKNYRKYIIKDPTITNDKCRKFHSQPETIQHITGACTTLTQTDYTHRHNQVANVIHQNLALKHKLIQDTTPYYKYTPERVLENTTHKLYYDRAIMTDRTIHYNRPDIILQDKTNKVTYLIDIAVPNTHNLQKTIGEKISKYAELKEEVTRIWRQEKVYVVPVVVSTTGVIPNHLHHSLKLIDLKDSIYITLQKAAILNTCRIVRKFMQIEENEISPHDSHTHTLR

SEQ ID NO: 21132 - protein, 1257 aa, Ochropleura plecta
METRSKRKRIGPLPGGDRRGAPGADAGCHSMRTVSGEELNRRAPTDKDTTAEIIDDGDRLTDRTDTPVEPYSPSTVSYTPSRPSSPSIPSSPTFLSPPIINSNTVLPIPTLNVARGVSTFLPASTKAGKARVRVKWSKEVNLYIMRTYLYITKLETDMTTYRQQLHELFTRQYPEINVSEQRISDQRRTIVRNKLLSLSEVDQLREEVRLQLELENNRDTNNIATTQNITENIQEVQSQTYAQLEPYTQSQPCYQSQSNSQTTHISTQTENITIMLENDIQILPDTHQMQPSDTRIHEIHDKFKTALTLYSGMDPAARPKLPKLRYSPKLCQLVKIFNQNILNHYISEETQLIDVHTLIYCTALVISEELNYKITEYTGNTRRKNINKPAWQQRLEQDIEILRADCGRLTQYINNNRSNKVVKRVEIIFKNMATHTRHETDNSKPEEFLDTLKQKLAVKVHRLRRYKKAQERKNDNSLFAMNEKNFYRKLQTKPESDTTRENSIVELPTAEQLESFWSGIWEEQIQHNDRAEWVTDENTRWISLQEMEFVELTESDITNITARLHNWKSPGIDKIHNYWYKKLETLHKVLAKNLTEIILGKQHIPEFLATGITYMLPKSQYCPQPSQYRPITCLPTIYKILTSAITTKINKHVEHNNIIAEEQKGCRRGHMGCKEQLIIDSVIHKHAATKNRNLHCTYIDYKKAFDSIPHSWLIQILQIYKINPIIIDFLQNIMSRWKTTLQLNCHDNTITTRQIAIKKGIYQGDSLSPLWFCLALNPLSHLLQRCQAGYCLKHTTEETIISHLIYMDDIKLYAKTEKEMKKLVEITTEFSKDINMQFGLDKCKTVHIIRGKIKPGDYAINTTDTITAMEHTDVYKYLGYKQLKGMDHTTIKQTLNTEYKRRVVAVCKSQLSGKYLIKALNTYAIPILTYSFGVIKWSKTDIQQIERTTRTTLTKHNNLHPKSAIERLTIKRQHGGRGLIDVYNLWQKQITRLKTFFHSKSNTSNIHKAIVMNDINYTPLHLNEQIDTHQTNNEDPQEKKMEEWKKKVLHGRHPHDLGQSHIDTKASNKWLMIGNLFPETEGFLIAIQDQIINTKNYRKFIIKDPTLTNDKCRKCHSQPETIQHITGACATLTQTDYTHRHNQVANVIHQNLALKHKLIQDTTPYYKYTPEKVLENTTHKLYYDRAIMTDRTIHYNRPDVILQDKTNKITYLIDIAVPNTHNLQKTIGENKRRGDQNMETGKSVRSTHSSLHYGCYS

SEQ ID NO: 21133 - protein, 1321 aa, Noctua janthe
METRSKRKRIGPLPGGDRRGAPGADAGCLSMRTVSGEELNRRAPTDKDTTAEIIDDGDRLTDRTDTPVEPFSPSTVSYTPSRRSSPSIPSSPTLSSSPIISLNTVSPTPTLNAARGVSTFLPASTKAGKARVRMKWSKEVNTFIMRTYLYITKLETDMTTYRQQLHELFIRRYPEITVSEQRISDQRRTIVRNKLLSLEEIDRLKVEVRLQLESGNNEDTNNSSITQNTFENIQQEQPQPVDQSEPYTQSLPCYHSQAYSQTTHTSTQTESITIMLENDVQILADTCQIQPTDTRTRKIHDKFKTALTQYSGLDPAARPKLHKLRYTPKLCQLVNVFNQNILNQYVSEETQLTDVHTLIYCTALVISEELNYKITGYTGNRRPKTINKPAWQQRLEQDIDKLRADCGRLTQYINNNKSNKVVKRVEVIFKNTTTHTRHERDNRKPEEFLDTLKQKLAVKVHRLRRYKKAQERKNDNSLFAMNEKNFYRKLHTKPQTNTTSENIIELPTAEQLESFWSGIWEEQVQHNDKSDWVTDEKTKWISLEEMDFVELTESDITSITARLHNWKSPGIDKIHNYWYKKLESLHKVLAKNFTDIILGKQFIPEFFATGITYMLPKTQYSPQPSQYRPITCLPTIYKILTSAITTKINKHVEQHNIIAEEQKGCRRGHMGCKEQLVIDSVIHKHAATKNRNLHCTYIDYKKAFDSIPHSWLIQILQIYKINPKIIDFLQNIMSRWKTTLQLNFHDNTITTRQIAIKKGIYQGDSLSPLWFCLALNPLSHLLQRCQAGYCLKHTTEETTISHLIYMDDIKLYSKTEMDMKKLIEITTEFSKDINMQFGLDKCKTVHIIRGKIKPGDYAINTNDTITAMEPTDLYKYLGYRQLKGLDHTTIKQTLNTEYKRRVVALCKTQLSGKHLIKALNTYAIPILTYSFGVIKWSKTDIQQIERTTRTTLTKHNNLHPKSAIERLTNKRQHGGRGLIDVHHLWQKQISRLKTFFHSKSNTSNIHKAIVMNDINYTPLHLNELIDTQHTNNEDPQKKKIEDWKKKVLHGRHPHDLEQSHIDTTASNKWLMIGSLFPETEGFMIAIQDQIINTKNYRKYIIKDPTITNDKCCKCHSQPETIQHITGACTTLTQTDYTHRHNQVANVIHQNLALKHKLIQDTTPYYKYTPERVLENTTHKLYYDRAIMTDRTIHYNRPDVILQDKTNKVTYLIDIAVPNTHNLQKTIGEKISKYAELKEEVTRIWRQEKVYVVPVVVSTTGVIPNHLHHSLKLIDLKDSIYITLQKAAILNTCRIVRKFMQIEENEISPHDSHTHTRYVDLV

SEQ ID NO: 21134 - protein, 1186 aa, Xestia xanthographa
MKWSKEVNTFIMRTYLHITKLETDMTTYRQQLHELFTRQYPETSVSEQRISDQRRAIVRNKLLSLVEIDRLKVEVRLQLEKENNEDTNTNNCIITQNTLENTQQEQPQPYNQSEPYTQSLPCYQSQTYSQTTHTSTQTESITIILENDVHILTDTHQIQPTDTRTREIHDKFKTALAQYSGMDPAARPKLPKLRYTPKLHQLVNIFNQNILNQYVSEETQLTDVHTLIYCTALVISEELNYKITEYAGNRRPKSINKPAWQQRLEQDIEKLRADCGRLTQYINNNRSSKVVKRVEVIFKNMAIHTRHERDNRKPEEFLDTLKQKLAVKVHRLRRYKKAQERKNDNSLFAMNEKNFYRKLQTKPQTDTTSENSIELPTAEQLESFWAGIWEEQVQHNDKSDWVTDEKTKWISLEEMDFVELTESDITSITARLHNWKSPGIDKIHNYWYKKLESLHKVLAKNFTDIILGKQYVPEFLATGITYMLPKTQYSPQPSQYRPITCLPTIYKILTSAITTKINKHVEHHNIIAEEQKGCRRGHMGCKEQLVIDSVIHKHAATKNKNLHCTYIDYKKAFDSIPHSWLIQILQIYKINPKIIDFLQNIMSRWKTTLQLNYHDNTVTTKQIAIKKGIYQGDSLSPLWFCLALNPLSHLLQRCQAGYCLKHTTGETTISHLIYMDDIKLYSKTETDMKKLIEITTEFSKDINMQFGLDKCKTLHIIRGKIKPGDYAINTNDSITAMEPTDLYKYLGYRQLKGLDHTTIKQTLNTEYKRRVVAVCKTQLSGKHLIKALNTYAIPILTYSFGVIKWSQTDIQQIERTTRTTLTKHNNLHPKSAIERLTIKRQHGGRGLIDVHDLWQKQITRLKTFFHTKSNTSNIHKAIVMNDINYTPLHLNKQIDSQPTNNEDPQKKKIEDWKKKVLHGRHPHDLEQSHIDTTASNKWLKIGSLFPETEGFIIAIQDQIINTKNYRKYIIKDPTITNDKCRKCHSQPETIQHITGACITLTQTDYTHRHNQVANVIHQHLALKHKLIQDTSPYYKYTPERVLENTTHKLYYDRGIMTDRTIHYNRPDIILQDKVNKATYLIDIAVPNTHNLQKTIGEKISKYSELKEEVTRIWRQEKVYVVPIVVSTTGVIPNHLHHSLKLIDLKDSIYITLQKAAILNTCRIVRKFMQIEENEISPHDSHTHTLR

SEQ ID NO: 21135 - protein, 1318 aa, Ochropleura plecta
METRSKRKRIGPLPGGDRRGAPGADAGCHSMRTVSGEELNRRAPTDKDTTAEIIDDGDRLTDRTDTPVEPYSPSTVSYTPSRPSSPSIPSSPTFLSPPIINSNTVLPIPTLNVARGVSTFLPASTKAGKARVRMKWSKEVNLYIMRTYLYITKLETDMTTYRQQLHELFTRQYPEINVSEQRISDQRRTIVRNKLLSLSEVDQLREEVRLQLELENNRDTNNIATTQNITENIQEVQSQTYAQLEPYTQSQPCYQSQSNSQTTHISTQTENITIMLENDIQILPDTHQMQPSDTRIHEIHDKFKTALTLYSGMDPAARPKLPKLRYSPKLCQLVKIFNQNILNHYISEETQLIDVHTLIYCTALVISEELNYKITEYTGNTRRKNINKPAWQQRLEQDIEILRADCGRLTQYINNNRSNKVVKRVEIIFKNMATHTRHETDNSKPEEFLDTLKQKLAVKVHRLRRYKKAQERKNDNSLFAMNEKNFYRKLQTKPESDTTRENSIVELPTAEQLESFWSGIWEEQIQHNDRAEWVTDENTRWISLQEMEFVELTESDITNITARLHNWKSPGIDKIHNYWYKKLETLHKVLAKNLTEIILGKQHIPEFLATGITYMLPKSQYCPQPSQYRPITCLPTIYKILTSAITTKINKHVEHNNIIAEEQKGCRRGHMGCKEQLIIDSVIHKHAATKNRNLHCTYIDYKKAFDSIPHSWLIQILQIYKINPIIIDFLQNIMSRWKTTLQLNCHDNTITTRQIAIKKGIYQGDSLSPLWFCLALNPLSHLLQRCQAGYCLKHTTEETIISHLIYMDDIKLYAKTEKEMKKLVEITTEFSKDINMQFGLDKCKTVHIIRGKIKPGDYAINTTDTITAMEHTDVYKYLGYKQLKGMDHTTIKQTLNTEYKRRVVAVCKSQLSGKYLIKALNTYAIPILTYSFGVIKWSKTDIQQIERTTRTTLTKHNNLHPKSAIERLTIKRQHGGRGLIDVYNLWQKQITRLKTFFHSKSNTSNIHKAIVMNDINYTPLHLNEQIDTHQTNNEDPQEKKMEEWKKKVLHGRHPHDLGQSHIDTKASNKWLMIGNLFPETEGFLIAIQDQIINTKNYRKFIIKDPTLTNDKCRKCHSQPETIQHITGACATLTQTDYTHRHNQVANVIHQNLALKHKLIQDTTPYYKYTPEKVLENTTHKLYYDRAIMTDRTIHYNRPDVILQDKTNKITYLIDIAVPNTHNLQKTIGEKISKYAELKEEVTRIWRQEKVYVVPIVVSTTGVIPNHLHHSLKLIDLKDSIYITLQKAAILNTCRIVRKFMQIEENEISSHDSHTHTLH

SEQ ID NO: 21136 - protein, 1317 aa, Noctua janthe
METRSKRKRIGPLPGGDRRGAPGADAGCLSMRTVSGEELNRRAPTDKDTTAEIIDDGDRLTDRTDTPGEPFSPSTVSYTPSRRSSPSIPSSPTLSSSPIISLNTVSPTPTLNAARGVSTFLPASTKAGKARVRMKWSKEVNTFIMRTYLYITKLETDMTTYRQQLHELFIRRYPGITVSEQRISDQRRTIVRNKLLSLEEIDRLKVEVRLQLESENNEDTNNSSITQNTFENIQQEQPQPVDQSEPYTQSLPCYHSQAYSQTTHTSTQTESITIMLENDVQILADTCQIQPTDTRTREIHDKFKTALTQYSGLDPAARPKLPKLRYTPKLCQLVNVFNQNILNQYVSEETQLTDVHTLIYCTALVISEELNYKITGYTGNRRPKTINKPAWQQRLEQDIDKLRADCGRLTQYINNNRSNKVVKRVEVIFKNTTTHTRHERDNRKPEEFLDTLKQKLAVKVHRLRRYKKAQERKNDNSLFAMNEKNFYRKLHTKPQTDTTSEYIIELPTAEQLESFWSGIWEEQVQHNDKSDWVTDEKTKWISLEEMDFVELTESDITSITARLHNWKSPGIDKIHNYWYKKLESLHKVLAKNFTDIILGKQFIPEFFATGITYMLPKTQYSPQPSQYRPITCLPTIYKILTSAITTKINKHVEQHNIIAEEQKGCRRGHMGCKEQLVIDSVIHKHAATKNRNLHCTYIDYKKAFDSIPHSWLIQILQIYKINPKIIDFLQNIMSRWKTTLQLNFHDNTITTRQIAIKKGIYQGDSLSPLWFCLALNPLSHLLQRCQAGYCLKHTTEETTISHLIYMDDIKLYSKTEKDMKKLIEITTEFSKDINMQFGLDKCKTVHIIRGKIKPGDYAINTNDTITAMEPTDLYKYLGYRQLKGLDHTTIKQTLNTEYKRRVVALCKTQLSGKHLIKALNTYAIPILTYSFGVIKWSKTDIQQIERTTRTTLTKHNNLHPKSAIERLTIKRQHGGRGLIDVHHLWQKQISRLKTFFHSKSNTSNIHKAIVMNDINYTPLHLNELIDTQHTNNEDPQKKKIEDWKKKVLHGRHPHDLEQSHIDTTASNKWLMIGSLFPETEGFMIAIQDQIINTKNYRKYIIKDPTITNDKCRKCHSQPETIQHITGACTTLTQTDYTHRHNQVANVIHQNLALKHKLIQDTTPYYKYTPERVLENTTHKLYYDRAIMTDRTIHYNRPDIILQDKTNKVTYLIDIAVPNTHNLQKTIGEKISKYAELKEEVTRIWRQEKVYVVPVVVSTTGVIPNHLHHSLKLIDLKDSIYITLQKAAILNTCRIVRKFMQIEENEISPHDSHTHTLR

SEQ ID NO: 21137 - protein, 1215 aa, Xestia xanthographa
METRSKRKRIGPLPGGDRRGAPGADARCHSMRSVSGEELNRRAPTDKDTTAEIIDDGDRLTDRTDTPVEPYSPSTVSYTPSRRSSPSIPSSPTILSPPIISLNIVSPTPTLNAAREVSTFLPASTKAGKARVRMKWSKEVNTFIMRTYLHITKLETDMTTYRQQLHELFTCRYPEIAVSEQRISDQRRAIVRNKLLSLEEIDRLKIEVRTQLHLESTNDEDTNSIVLTQNTIENTQQEQPQSYAQSEPYTQSQPYYHLSSQAYSQITHTSTQTENVTIMLENDIEVIANINQNPPTDTRIREIHDKFKTALTQYSGMDPSARPKLPKLRYSPKLAQLVNIFNQNILTQYISEETQLIDLHTLIYCTALVISEELNFKITEYTGNTRQSNVNKPAWQQRLEKDIEKLRADCGRLTQYINNNRSNKVVKRVEIIFKNMAVHTRHENHNRKPEEFLDTLKQKLALKVHRLRRYKKAQERKNDNALFATNEKNFYRKLQKPQTNTDTPTTENNIELPTTEQLETFWAGIWEEQVHHKETSEWIQDEETKWSLLEEMEFIELSESDIASVTARLHNWKSPGIDKIHNYWYKKLESLHKILAKNLTEIILGKQSIPEFIATGITYMLPKTQYSPQPSQYRPITCLPTIYKILTSAITAKINKHVEYHNIIAEEQKGCRRGHMGCKEQLVIDSIIHKHAAAKNRNLHCTYIDYKKAFDSIPHSWLIQILHIYKINPKIIEFLQNIMSKWKTTLQLNYRNSTVTTRQIAIKKGIYQGDSLSPLWFCLALNPLSHLLQRCPAGYCLKQVTEETTISHLIYMDDIKLYAKTEKEMKNLIEITTEFSRDINMQFGLDKCKTVHIIKGKIKPGDYAINTTDTITAMEPTDLYKYLGYKQLKGLDHTTIKQTLNTEYKRRVIAVCQTQLSGKHLIKALNTYAIPILTYSFGVIKWSKTDIQQIERTTRTTLTKHNNLHPKSAIERLTIKRQYGGRGLIDIHNLWQKQITRLKTFFQSKSRTSNIHKAIVMNDNSYTPLSLNEQTDTQNTNNEDPHKQTLEDWKKKVLHGRHPHDLEQPHIDTLASNKWLKIGSLFPETEGFIIAIYDQIINTKNYRKYIIKDPTITNDKCRKCHSQPETIQHITGACTTLTQTDYTHRHNQVVNIIHQNLALKHKLIQDSNTPYYKYVPQPILEKTTHKLFYLHSCYKSSIKVSETVSLWPTLKQPVS

SEQ ID NO: 21138 - protein, 1270 aa, Trichoplusia ni
METRSKRKRIGPLPGGDRRGTPGADAGCLSMRTVSGEELSRRAPTDKDTTADPFDEIDRLTDTTNSPIEPFSPSTVSYTPSLSSSPISNTAIPTPTLNVAREVNTFLPASTKAGKPRVRMRWSKEVNLFIMRTYYYITKLETDMTIYRKLLHELFSQKYPEINVSEQRISDQRRTIVKNKLIPQVELDRIKEEVRAQLEENANANTLSDVHVFDPFSQHLINTQTQNNLATDIGTQTESLTITIENDIHTLAEPDPLPDSWTADILEKFKTTLVLYSGMDPESRPRLPKLKYSPKLVQLVSVFNNNILGNIISEDTQLIDLNTIIYCTALVISEELGYKITDYLGNTRSKNHNKPAWQVRLERDIEKLRADCGRLTQFINNNRSKKVIKRVEAIFKSRITHTRHEDNNRKPEEFLDTLKQKLALKVHRLKRYKKAQQRKNDNIVFSSNEKMFYRNLLKPRVETTSQNNLELPTKESLETFWSRIWEEQVQYNENAEWINEEEAKWAAIEEMSFAEVTETDILNVTSRLHNWKSPGVDKIHNYWYKKLFSIHGNLAKNLTDIILGRQIIPDFLATGVTYMLPKGTHSAEPSQYRPITCLPTVYKILTSALTLKINSHIEQHNILAEEQKGCRRNHMGCKEQLIIDSIIHKHASTKSRNLHCTYIDYQKAFDSIPHSWLIRILQIYRINFKIISFLSSIMTRWKTTLQLNYNRDSIISRQISIRKGIYQGDSLSPLWFCLALNPLSSMLHRSRVGYCLRHDTHEVAISHLIYMDDIKLYSKSETDMKKLIDTTTLFSKDINMQFGLDKCKTLHIVRGKIKPGDYPVNSTDSITAMEPTDLYKYLGYKQLKGLDHAAIKSTLDTEYRRRVNALCRSHLAGKNLIKAINTYAIPILTYSFGIIKWSKTDIEQIERTTRTTLTKHNNLHPKSAIERLTIKRQDGGRGLIDIHHLWQKQISRLKSFFLKKSETSDIHKAIAQNDDSYSPLNLNDQTDDVLNICPDPQIQKMDTWKRKVLHGRHPHDLEQPHVDTVASNKWLKVGSLFPETEGFILAIQDQIINTKNYRKFIIKDPTVVNDKCRKCQSQPETIQHITGACTSLTQTDYTHRHNQVANIIHQQLALKYKLIENCNLPYYKYTPQTVLENNTHKLYYDRAILTDRTIHYNRPDITLMDKENKTTYLIDIAVPNTHNLQKTIAEKISKYAELKEEVARIWKQEKVFVVPIVLSSTGIIPNHLHNSLKIIDLRKSLYITLQKAAILNTCRIVRKFLALDDS

SEQ ID NO: 21139 - protein, 914 aa, Autographa gamma
MIRLERDIEKLRADCGRLTQYINNNRSNKVIKRVEAIFKSRITHTRHENDNRKPEEFLDTLKQKLALKVHRLKRYTKAQQRKNDNIVFSTNEKMFYRNLSKPQSESIAQDNAELPTKESLENFWSGIWEQQVQYNDSAEWIRQEEAKWIAIEEMGFADINETDILNITVRLHNWKSPGVDKIHNYWYKKLVTLHKILAKNLTDVILGRQIIPDFLATGVTYMLPKGKHSAEPSQYRPITCLPTVYKILTSVITSKINKHIEHHNIIAEEQKGCRRNHMGCKEQLIIDSTIHKHAATKNRNLHCTYIDYQKAFDSIPHSWLIKVLQIYKVNFKIIQFLSSIMTRWKTTLQLNYNRTSVTSRQISIRKGIYQGDSLSPLWFCLALNPLSSMLHRSRVGYCLKHSTQEVIISHLIYMDDIKLYSKSERDMKKLIDTTTLFSNDINMQFGLDKCKTLHIVRGKIKPGNYPVNSIECITAMEPTDLYKYLGYKQLKGLDHTSIKSTLDTEYKRRVNTLCKSHLAGKHLIKAINTYAIPILTYSFGVIKWTKTDIEQIERTTRTTLTKHNNLHPKSAIERLTIKRQDGGRGLIDIHHLWQKQISRLKSFFLTKSNTSDIHKAIAQNDDNYTPLNLNDQTETLNISSSDPQKQKMETWKKKVLHGRHPHDLEQPHVDKIASNKWLKVGNLFPETEGFILAIQDQIINTKNYRKYIIKDPSVTNDKCRKCHTQPETIQHITGACTSLTQTDYTHRHNQVVNIIHQQLALKYKLIENNKTPYYKYTPQTVVENGTHKLYYDRAILTDKTIHYNRPDITLQDKENKTTYLIDIAVPNTHNLQKTIAEKISKYAELKEEVARIWRQDKVVVVPIVLSSTGVIPKNLHNSLKVIDLNKSTYITLQKAAILNTCRIVRKFLSLEDNN

SEQ ID NO: 21140 - protein, 1270 aa, Trichoplusia ni
METRSKRKRIGPLPGGDRRGTPGADAGCLSMRTVSGEELSRRAPTDKDTTADPFDEIDRLTDTTNSPIEPFSPSTVSYTPSLSSSPISNTAIPTPTLNVAREVNTFLPASTKAGKPRVRMRWSKEVNLFIMRTYYYITKLETDMTIYRKLLHELFSQKYPEINVSEQRISDQRRTIVRNKLIPQVELDRIKEEVRAQLEENANANTLSDVNVFDPFSQHLINTQTQNNLATDIGTQTESLTITIENDIHTLAEPDPLPDSWTADILEKFKTTLVLYSGMDPESRPRLPKLKYSPKLVQLVSVFNNNILGNIISEDTQLIDLNTIIYCTALVISEELGYKITDYLGNTRSKNHNKPAWQVRLERDIEKLRADCGRLTQFINNNRSKKVIKRVEAIFKSRITHTRHEDNNRKPEEFLDTLKQKLALKVHRLKRYKKAQQRKNDNIVFSSNEKMFYRNLLKPRVETTSQNNLELPTKESLETFWSRIWEEPAQYNENAEWINEEEAKWAAIEEMSFAEVTETDILNVTSRLHNWKSPGVDKIHNYWYKKLFSIHGNLAKNLTDIILGRQIIPDFLATGVTYMLPKGTHSAESSQYRPITCLPTVYKILTSALTLKINSHIEQHNILAEEQKGCRRNHMGCKEQLIIDSIIHKHASTKSRNLHCTYIDYQKAFDSIPHSWLIRILQIYRINFKIISFLSSIMTRWKTTLQLNYNRDSIISRQISIRKGIYQGDSLSPLWFCLALNPLSSMLHRSRVGYCLRHDTHEVAISHLIYMDDIKLYSKSETDMKKLIDTTTLFSKDINMQFGLDKCKTLHIVRGKIKPGDYPVYSTDSITAMEPTDLYKYLGYKQLKGLDHAAIKSTLDTEYRRRVSALCRSHLAGKNLIKAINTYAIPILTYSFGIIKWSKTDIEQIERTTRTTLTKHNNLHPKSAIERLTIKRQDGGRGLIDIHHLWQKQISRLKSFFLKKSETSDIHKAIAQNDDSYSPLNLNDQTDDVLNICPDPQIQKMDTWKRKVLHGRHPHDLEQPHIDTVASNKWLKVGSLFPETEGFILAIQDQIINTKNYRKFIIKDPTVVNDKCRKCQSQPETIQHITGACTSLTQTDYTHRHNQVANIIHQQLALKYKLIENSNLPYYKYTPQTVLENNTHKLYYDRAILTDRTIHYNRPDITLMDKENKTTYLIDIAVPNTHNLQKTIAEKISKYAELKEEVARIWRQEKVFVVPIVLSSTGIIPNHLHNSLKIIDLRKSLYITLQKAAILNTCRIVRKFLALDDS

SEQ ID NO: 21141 - protein, 1278 aa, Trichoplusia ni
METRSKRKRIGPLPGGDRRGTPGADAGCLSMRTVSGEELSRRAPTDKDTTADPFDEIDRLTDRTNSPIEPFSPSTVSYTPSLSSSPISNTAIPTPTLNVAREVNTFLPASTKAGKPRVRMRWSKEVNLFIMRTYYYITKLETDMTIYRKLLHELFSQKYPEINVSEQRISDQRRTIVRNKLIPQVELDRLKEEVRAQLEENTNANTLSDVQNQDVNVFSHDPFSQHLINTQTQNNLATDIGTQTESLTITIENDIHTLAEPDPLPDSWTAKILEKFRTTLVLYSGMDPESRPRLPKLKYNPKLVQLVSVFNNNILGNIISEDTQLIDLNSIIYCTALAISEELGYKITDYLGNTRSKHHNKPAWQVRLERDIEKLRADCGRLTQFINNNRSRKVIKRVEAIFKSRITHTRHEDNNRKPEEFLDTLKQKLALKVHRLKRYKKAQQRKNDNIVFSNNEKMFYRNLLKPQAETISQSNLELPTKESLETFWSRIWEEQVQFNENAEWINEEEAKWLAIEEMSFAEVTETDVLNVTSRLHNWKSPGVDKIHNYWYKKLVSIHGSLAKNLTDIVLGKQIIPDFLATGVTYMLPKGKHSAEPSQYRPITCLPTVYKILTSVITLKINSHIEQHNIIAEEQKGCRRNHMGCKEQLIIDSVIHKHASTKSRNLHCTYIDYQKAFDSIPHSWLIKILQIYRINSKLIEFLSSIMTRWKTTLQLNYNRDTIISRQISIRKGIYQGDSLSPLWFCLALNPLSSMLHRSRVGYCLRHDTYDVVISHLIYMDDIKLYSKSETDMKKLIDTTTLFSKDINMQFGLDKCKTLHIVRGKIKPGDYLVNGADCITAMEPTDLYKYLGYKQLRGLDHTAIKNALDTEYRRRVNALCRSHLAGKNLIKAINTYAIPILTYSFGVIKWSKTDIEQIERTTRTTLTKHNNLHPKSAIERLTIKRQDGGRGLIDIHHLWQKQISRLKSFFLTKSETSDIHKAIAQNDDSYSPLNLNDQTDDVLNICNSDPQTQKMDTWKRKVLHGRHPHDLEQPHVDTIASNKWLKVGSLFPETEGFILAIQDQIINTKNYRKFIIKDPTIVNDKCRKCQSQPETIQHITGACTSLTQTDYTHRHNQVVNIIHQQLALKYKLIENSNLPYYKYTPQTVLENNTHKLYYDRAILTDRTIHYNRPDITLQDKVNKTTYLIDIAVPNTHNLQKTIAEKISKYAELKEEVARIWRQEKVFVVPIVLSSTGVIPNHLHNSLKIIDLRKSLYTTLQKAAILNTCRIVRKFLSLDDS

SEQ ID NO: 21142 - protein, 1207 aa, Heliconius numata
METRLQKKLRGQLPEGDRRGTPGADAGCFSMRTVGGLELNRRAPTDKYTTAEHTSQPNSPIEPYSPSSESYTPSIPSSPSSNHTVEHVPTLSVAQEANAFLPASTKAGKPRVRMRWSSEVNMFIMRTYYRITKLETDFSTYRQRLHELFCQKYPYITVSEQRVSDQRRTIVRNRLVPQDLLNQIKEEVKCEIELEEIEMDNINRNQNQSHLVLSNTTIAVSQVGEQSQNYLNTQTTQTSTQTESLNYLIENEIETLIVPTNYAEEFITNLREKLTTTLNLFSGLDPTVRPSLPKLKYTHKLTELIHIFNLKILGNYISNDIQLIDIHTLIYCTALVIGEELGYKIIQRTDTGQRKNYKNKPSWQIRLEKSIEKLRVDIGRLTQYINSNRSQKVVKTVMKIFRNTTLHTKHENDNQKSEEFLDTLKQKLALKSHRLKRYKKAQKRKNDNILFSTREKTFYRQLSKSNHPSQNINTESIPTEEQLTTYWSDIWEQESKHNENAKWIVEETDKYKTIDTMNFDEITETEILKITAKLHNWKSPGADKVHNFWYKKLTIFHRAIAKKFSDIILNKQNIPSFMATGITYMIPKGKFSSEPSQYRPITCLPTIYKILTSVITSKITVHIEKYNIIAEEQKGCKRGHMGCKEQLIIDSTIHKHATTKNRNLHCTYIDYKKAFDSIPHTWLIQILKIYKISPFIIEFLNIIMSQWKTTLQLNYNSTIVRTRNILIKKGIYQGDSLSPLWFCLALNPLSNLLQNSRLGYSFSSRSSNSLISHLIYMDDIKLYSKTHTDMKQLIDITTEFSNDIKMQFGLDKCKALHIIKGKIQEGNYLINDHDIITSLESDDFYRYLGYNQLKGLDHTNTKQFLTTQFKNRLYAICKTQLSGKNLIKAINTYAVPILTYSFGIVKWTKTDIDNLERSIRTILTKHNYLHPKSAIERLSIKRSHGGRGIINISTLWQNQIKSLQKFFIYKSNSSIIHKIIKDNDHNYTPLNLEEITGCHNNQHSDPQKQLIENWKSKVLHGRHPHDIEQAHIDSVGSNMWLKVGNLFPETEGFIIAIQDQIINTKNYRKYIIKDSKVTNDKCRRCHSQPETIQHITGACSNLTHSDYTHRHNQICNIMHQQLAHKYKFITNFDTPYYKYTPKTILENSTHKIYYDRAVLTDRTIHFNRPDIILQNKIDKITYLIDIAVPNTHNLQKQLPKKLINMKN

SEQ ID NO: 21143 - protein, 1284 aa, Heliconius numata
METRLQKKLRGPLPEGDRRGTPGADAGCFSMRTVGGLELNRRAPTDKYTTAEHTSQPNSPIEPYSPSSESYTPSIPSSPSSSHTVEHVPTLSVAQEANAFLPASTKAGKPRVRMRWSSEVNIFIMRTFYQITKLETDFSTYRQRLHELFCQKYPYITVSEQRVSDQRRTIVRNKLVSQDLLNQIKEEVKCEIELEEIEMDNINRNQNQSHLVLSNTTTAVSQVGEQSQNYFNTQTTQTSTQTESLNYLIENEIETLIVPTNYTEEFITNLREKLTTTLNLFSGLDPTIRPSLPKLKYTHKLTELIHIFNLKILGNYISNDIQLIDIHTLIYCTALVIGEELGYKIIQRTHTGQRKNYKNKPSWQIRLEKSIEKLRVDIGRLTQYINSNRSQKVVKTVMKIFRNTTLHTKHENDNQKSEEFLDTLKQKLALKSNRLKRYKKAQKRKDDNILFATREKTFYRQLSKPNHPSQNRNTESIPTEEQLTTYWSDIWEQESKHNENAKWIVEETDKYKTIDTMNFDEITETEILKITTKLHNWKSPGADKVHNFWYKKLTIFHRAIAKNFTDIILNKQNIPSFIATGITYMIPKGKFSSEPSQYRPITCLPTIYKILTSVITSRITVHIEKYNIIAEEQKGCKRGHMGCKEQLIIDSTIHKHATTKNRNLHCTYIDYKKAFDSIPHTWLIQILKIYKISPFIIEFLNIIMSQWKTTLQLNYNSATVRTRHILIKKGIYQGDSLSPLWFCLALNPLSNLLQNSRLGYSFSSRSRNSLISHLIYMDDIKLYAKTHTDMKQLIDITTEFSNDIKMQCGLDKCKTLHIIKGKIQEGNYLINDHDIITALESNDIYRYLGYNQLKGLDHTNTKQFLTTQFKNRLYAICKAQLSGKNLIKAINTYAVPILTYSFGIVKWTKTDIDNLERLIRTILTKHNYLHPKSAIERLSIKRPHGGRGIININTLWQNQIKSLQKFFIYKSNSSIIHKIIKDNDHNYTPLNLEEITGCQNNQHTDPQKQLIENWKSKVLHGRHPHDMEQAHIDSVGSNMWLKVGNLFPETEGFIIAIQDQIINTKNYRKYIIKDSKVTNDKCRRCHSQPETIQHITGACSNLTHSDYTHRHNQICNIIHQQLAHKYKFLTNLDTPYYKYTPETILENSTHKIYYDRAVLTDRTIHFNRPDIILQNKIDKITYLIDIAVPNTHNLQKTIAEKINKYEELKEEVTRIWKQKTVYIVPIVLSTTGVIPKHLHHSLNMLNLKRTTYITLQRAAILNTCRIVRKFLQIDEQSTNTPQVR

SEQ ID NO: 21144 - protein, 1284 aa, Heliconius numata
METRLQKKLRGPLPEGDRRGTPGADAGCFSMRTVGGLELNRRAPTDKYTTAEHTSQPNSPTEPYSPSSESYTPSIPSSPSSNHTVEHVPTLSVAQEANAFLPASTKAGKPRVRMRWSSEVNMFIMRTYYRITKLETDFSTYRQRLHELFCQKYPYITVSEQRVSDQRRTIVRNRLVPQDLLNQIKEEVKCEIELEEIEMDNINRNQNQSHLVLSNTTIAVSQVGEQSQNYLNTQTTQTSTQTESLNYLIENEIETLIVPTNYAEEFITNLREKLTTTLNLFSGLDPTVRPSLPKLKYTHKLTELIHIFNLKILGNYISNDIQLIDIHTLIYCTALVIGEELGYKIIQRTDTGQRKNYKNKPSWQIRLEKSIEKLRVDIGRLTQYINSNRSQKVVKTVMKIFRNTTLHTKHENDNQKSEEFLDTLKQKLALKSHRLKRYKKAQKRKNDNILFSTREKTFYRQLLKSNHPSQNINTESIPTEEQLTTYWSDIWEQESKHNENAKWIIEETDKYKTIDTMNFDEITETEILKITAKLHNWKSPGADKVHNFWYKKLTIFHRAIAKNFSDIILNKQNIPSFMATGITYMIPKGKFSSEPSQYRPITCLPTIYKILTSVITSRITVHIEKYNIIAEEQKGCKRGHMGCKEQLIIDSTIHKHATTKNRNLHCTYIDYKKAFDSIPHTWLIQILKIYKISPFIIEFLNIIMSQWKTTLQLNYNSTIVRTRNILIKKGIYQGDSLSPLWFCLALNPLSNLLQNSRLGYSFSSRSSNSLISHLIYMDDIKLYSKTHTDMKQLIDITTEFSNDIKMQFGLDKCKALHIIKGKIQEGNYLINDHDIITSLESDDFYRYLGYNQLKGLDHTNTKQFLTTQFKNRLYAICKTQLSGKNLIKAINTYAVPILTYSFGIVKWTKTDIDNLERSIRTILTKHNYLHPKSAIERLSIKRSHGGRGIINISTLWQNQIKSLQKFFIYKSNSSIIHKIIKDNDHNYTPLNLEEITGCHNNQHSDPQKQLIENWKSKVLHGRHPHDIEQAHIDSVGSNMWLKVGNLFPETEGFIIAIQDQIINTKNYRKYIIKDSKVTNDKCRRCHSQPETIQHITGACSNLTHSDYTHRHNQICNIIHQQLAHKYKFITNFDTPYYKYTPKTIVENSTHKIYYDRAVLTDRTIHFNRPDIILQNKIDKITYLIDIAVPNTHNLQKTIAEKINKYEELKEEVTRIWKQKTVYIVPIVLSTTGVIPKHLHHSLNMLNLKRTTYITLQRAAILNTCRIVRKFLQIDEQSTNTPQVQ

SEQ ID NO: 21145 - protein, 1278 aa, Trichoplusia ni
METRSKRKRIGPLPGGDRRGTPGADAGCLSMRTVSGEELSRRAPTDKDTTADPFDEIDRLTDTTNSPIEPFSPSTVSYTPSLSSSPISNAGTPTPTLNVAREVNTFLPASTKAGKPRVRMRWSKEVNLFIMRTYYYITKLETDMTIYRKLLHELFSQKYPEINVSEQRISDQRRTIVRNKLIPQTELDRIKEEVRAQLEENRNENSLSDAQNQDVNVFSHDSFSQHVINIQTPNYLGTDIGTQTESLTLTIENDINTLAEPDPLPDSWTADILEKFKTTLVLYSGMDPESRLRLPKLKYSPKLVQLVSVFNNNILAKFISEDTQLVDLNTIVYCTALVISEELGYKVTDYVGNTRPKHNNKPAWQVRLERDIEKLRADCGRLTQYINNNRSKKVIKRVETIFKSRITHTRHEDNNRKPEEFLDTLKQKLALKVHRLKRYKKAQQRRNDNVVFNSNEKMFYRNLLKPQAETITQNNNVELPTKESLETFWSSIWEEHVQYNENAEWINEEEAKWAAIEEMRFTEVTETDVLNITSRLHNWKSPGVDKIHNYWYKKLFSIHGSLAKNLTDIIVGTQITPDFLATGVTYMLPKGKHSAEPSQYRPITCLPTIYKILTSVLTLKINSHIEQHNILAEEQKGCRRNHMGCKEQLIIDSIIHKHASTKSRNLHCTYIDYQKAFDSIPHSWLIKVLQIYRVNFKIIEFLSNIMTRWKTSLQVNYDRNSIITREILIRKGIYQGDSLSPLWFCLALNPLSSMLQRSQVGYCLKHNTREVVISHLIYMDDIKLYSKSEQDMKKLIDTTSQFSNDINMKFGLDKCKTLHIVRGKIKPGDYPVNSTDSITAMEPTDLYKYLGYKQQKGLDHTAIKSTLDTEYRRRVNALCRSHLAGKNLIKAINTYAIPILTYSFGVIKWSKTDIEQIERTTRTTLTKHNNLHPKSAIERLTIKRQDGGRGLIDIHHLWQKQISRLKSFFLTKSETSDIHKAIAQNDDSYSPLNLHDQTDVINICNSHYQIQKMDTWKRKVLHGRHPHDLEQPHVDPIASNKWLKVGSLFPETEGFILAIQDQIINTKNYRKYIIKDPTVVNDKCRKCQSQPETIQHITGACTSLTQTDYTHRHNQVANIIHQQLALKYKLIENCNLPYYKYTPQTVLENNTHKLYYDRAILTDRTIHYNRPDIILMDKENKTTYLIDIAVPNTHNLQKTIAEKISKYAELKEEVARIWRQEKVFVVPLVLSSTGVIPNHLHNSLKIIDLRKSLYITIQKAAILNTCRIVRKFLSLDDS

SEQ ID NO: 21146 - protein, 1285 aa, Heliconius numata
METRLKRKLRGPLPEGDRRGTPGADAGCFSMRTVSGLELNRRAPTDKYTTAEHTTVTNSPIEPYGPSSESYTPSIPSSPSSTHTVEHIPTLSVAREANAFLPASTKAGKPRVRMRWSSEVNIFIMRTYYQITKLETDFTIYRQRLHEIFSQKFPYINVSQQRVSDQMRTIIRNKLLPQELLNQIKTEVKSQLELDEIEMENIDSNQTQNLLTLPNTPTTQYEVRQQTQNTCLTQATQTYTQTETSTCLLENEIETLILPTDVTEKYVQNLKEKLTTAINLFSGLDPTTRPNLPNLKYSQKLTELIKIFNSIILSNYNSEDTQLIDIHTLIYCTAVVIGEELGYKIIQKIDTEQRKKYKSKPPWQIRLEKSIQKLRADIGRLTQYISNNRSEKVVKRVMKIFRNTTLHTKHENDNKKVEEFLDTLKQKLALKSHRLKRYNKAQKRKDDNILFTTREKSFYRQLLKPDHLCQDSNNESIPTETQLVTYWSNIWEQESKHNEYTEWILEEINKYKTIDEMNFTEITEAEIFKITTKLHNWKSPGVDKVHNFWYKKLTIFHKAIAKNLTEIIFKKQNIPNFMATGVTYMIPKGKFSPDPAQYRPITCLSTIYKILTSVLTSKITSHIEKYNIVSEEQKGCRRGHMGCKEQLIIDSTIHKHASAKNRNLHCTYIDYKKAFDSIPHSWLVKILEIYKINPTVIEFLNSIMSQWKTTLQLNHNNHSIITRQIFIKKGIYQGDSLSPLWFCLALNPLSSMLKNSQVGYNFNSRIQNSVISHLIYMDDLKLYAKTNKDMKKLIDITAEFSNDIQMQFGLDKCKTLHITKGKIQPGDYLINENNIITALESQDIYKYLGYNQLKGLDHTNTKQILTAEYKKRIHAICKTQLSGKHLIKAINTYAIPILTYFFGVVKWSKTDIEHLERLIRTILTKHNYLHPKSAIERLTIKRPCGGRGLININTLWQNQLNTLRKFFINKSNNSIIHKAIKDNDHNYTPLNLEEIVNAEISPKTDPQKEQIDNWKRKVLHGRHPHDLEQAHIDSIGSNMWLKVGSLFPETEGFIIAIQDQIINTKNYRKYIIKDTKITNDKCRRCHSQPETTQHITGACSNLTHSDYTHRHNQICNIIHQQLAHKYKLITNIDTPYYKYAPETILENSTHKLYYDRAVLTDRTIHFNRPDIILQNKADKITYLIDIAVPNTHNLQKTITEKINKYEELKDEITRIWKQKAVYIVPLVLSTTGVIPKHLHHSIKILNLKNTIYITLQRAAILNTCRIVRKFLQIDEDQNTNLPQLQ

SEQ ID NO: 21147 - protein, 1285 aa, Heliconius numata
METRLKRKLRGPLPEGDRRGTPGADAGCFSMRTVSGLELNRRAPTDKYTTAEHTTLTNSPIEPYSPSSESYTPSIPSSPSSTHTVEHVPTLSVAREANAFLPASTKAGKPRVRMRWSSEVNIFIMRTYYQITKLETDFTIYRQRLHEIFSEKFPYINVSQQRVSDQMRTIIRNKLLPQELLNQIKAEVKSQLELDEIEMENIDSNQTQNLLTLPNTPTTQYEVRQQIQNTCLTQATQTYTQTETSTCLLENEIETLILPTDVTEKYVQNLKEKLTTALNLFSGLDPTTRPNLPKLKYSQKLTELIKIFNSIILSNYNSEDTQLIDIHTLIYCTAVVIGEELGYKIIQKIDTEQKKKCKSKPPWQIRLEKSIQKLRADIGRLTQYISNNRSEKVVKRVMKIFRNTALHTKHENDNKKVKEFLDTLKQKLALKSHRLKRYNKAQKRKDDNILFTTREKSFYRQLLKPDHLCQDSNNESIPTETQLVTYWSNIWEQESKHNENAEWILEEINKYKTIDEMNFTEITEAEIFKITTKLHNWKSPGVDKVHNFWYKKLTIFHKAIAKNLTEIIFKKQNIPNFMATGVTYMIPKGKFSPDPAQYRPITCLSTIYKILTSVLTSKITSHIEKYNIVAEEQKGCRRGHMGCKEQLIIDSTIHKHATAKNRNLHCTYIDYKKAFDSIPHSWLVKILEIYKINPTVIEFLNSIMSQWKTTLQLNHNNHSVKTRQIFIKKGIYQGDSLSPLWFCLALNPLSSMLKNSQVGYNFNSRIQNSVISHLIYMDDLKLYAKTNKDMKKLIDITVEFSNDIQMQFGLDKCKTLHITKGKIQPGDYSINENNIITALEAQDIYKYLGYNQLKGLDHTNTKQILTAEYKKRIHAICKTQLSGKHLIKAINTYAIPILTYSFGVVKWSKTDIEHLERLIRTILTKHNYLHPKSAIERLTIKRSCGGRGLININTLWQNQLNTLRKFFINKSNNSIIHKTIKDNDHNYTPLNLEEIVNAEISPKTDPQKEQIDNWKRKVLHGRHPHDLEQAHIDSIGSNMWLKVGSLFPETEGFIIAIQDQIINTKNYRKYIIKDTKITNDKCRRCHSQPETIQHITGACSNLTHSDYTHRHNQICNIIHQQLAHKYKLITNIDTPYYKYAPETILENSTHKLYYDRAVLTDRTIHFNRPDIILQNKANKITYLIDIAVPNTHNLQKTITEKINKYEELKDEITRIWKQKAVYIVPLVLSTTGVIPKHLHHSIKILNLKNTIYITLQRAAILNTCRLVRKFLQIDEDQNTNIPQLQ

SEQ ID NO: 21148 - protein, 1258 aa, Dryas iulia
METRLKKKLRVPLPEGDRRGTPGADAGCFSMRTVSGLELNRRAPTDKNTTAEHTTPPNSPTDPYSPSSASYTPSIPSSPSSSHTIEHVPTLSAAREANAFLPASTKAGKPRVRMRWSSEVNIFIMRTYYQITKLETDFTTYRQSLHEIFCQKYPYINVSEQRISDQRRTIIRNKLISQELINQIREEVKCQIESEELAIGNLDNQTSSSLSQIGPQSQTFFNTQVTHTSTQTESLTCLLENEIETPITTADVTEEYITNLREKLTTTLNLFSGLDPTVRPNLPKLKYTPKLAELIKIFNLKILNNYNCTDIQLIDIHTLIYCTAVVVGEELGYKITHKIEKGQEKKNKNKPSWQIRLEKSVEKLRVDIGRLTQYINNNRSKKVVNTVMKIFRNLKLHTKHENDNEKAEEFLDTLKQKLALKCNRLKRYKKAQKRKDDNILFATREKSFYRQLSNSNHQSQECNKESIPTEEQLTTYWADIWEQELKHNENAEWILEETDKYKAITEMRFTDITETEILKITAKLHNWKSPGVDKVHNYWFKKLTVFHKAIAKSLTEIILKKQNIPNFIATGITYMIPKGKFSADPAQYRPITCLPTVYKILTSIITSRITTHIEQHNIIAEEQKGCRRGHMGCKEQLIIDSTIHKHATAKNRNLHCTYIDYKKAFDSIPHTWLIQILKIYKISPTVIQFLNNIMPQWKTTLQLSYNNNTIKTRNILIKKGIYQGDSLSPMWFCLALNPLSNLLNKSRLGYSFNSHIQNSLISHLIYMDDLKLYAKSHKDMKKLIDITTEFSNDIQMQFGLDKCKTLHIIKGKIQPGNYSISDQDIITALEPSEIYKYLGYNQQKGLDHTNTKQILTTEYKKRIYAICKTQLSGKHLIKAINTYAIPILTYSFGIVKWTKTDIENLERLVRTTLTKHNYHHPKSAVERLTVKRSYGGRGLINVNALWQKQINNLQIFFINKSNSSVIHKTIRDNDHNYTPLNLEEIIDVESNPSTDPHKQQIDNWKKKVLHGRHPHDLEQAHIDSIGSNMWLKVGSLFPETEGFIIAIQDQIINTKNYRKYIIKDIKVTNDKCRKCHNQPETIQHITGACSNLTHSDYTHRHNQICNIIHQQLACKHKLIDTINTPYYKYTPETILENSTHKLYYDRAVLTDRTIHFNRPDIILQNKIDKITYLIDIAVPNTHNIQKTISEKISKYDELKEEITRIWKQKTVYIIPIVLSTTGVIPKHLHHSLQMLNLKKNKIKNFEKTHDGLIVIVKG

SEQ ID NO: 21149 - protein, 887 aa, Dryas iulia
MKIFRNLKLHTKHENYNQKAEEFLDTLKQKLALKCNRLKRYKKAQKRKDDNILFATREKSFYRQLSNSNHQSQECNEESIPTEEQLTTYWADIWEQELKHNENAEWILEETDKYKAITEMRFTDITETEILKITAKLHNWKSPGVDKVHNYWFKKLTVFHKAIAKNLTEIILKKQNIPNFIATGITYMIPKGKFSADPAQYRPITCLPTVYKILTSIITSRITTHIEEHNIIAEEQKGCRRGHMGCKEQLIIDSTIHKHATAKNRNLHCTYIDYKKAFDSIPHTWLIQILKIYKISPTIIQFFNNIMPQWKTTLQLNYNSNTIKTRNILIKKGIYQGDSLSPMWFCLALNPLSNLLNKSRLGYSFNSHIQNSLISHLIYMDDLKLYAKSHKDMKKLIDITTEFSNDIQMQFGLDKCKTLHIIKGKIQPGNYSISDQDIITALEASEIYKYLGYNQQKGLDHTNTKQILTTEYKKRIYAICKTQLSGKHLIKAINTYAIPILTYSFGIVKWTKTDIENLERLVRTTLTKHNYHHPKSAVERLTIKRSYGGRGLINVNALWQKQINNLKSFFINKSNSSVIHKTIRDNDHNYTPLNLEEIVDVESNPSTDPHKQQIDNWKKKVLHGRHPHDLEQAHIDSIGSNMWLKVGSLFPETEGFIIAIQDQIINTKNYRKYIIKDTKVTNDKCRKCHNQPETIQHITGACSNLTHSDYTHRHNQICNIIHQQLACKHKLIDTSNTPYYKYTPDTILENSTHKLYYDRAVLTDRTIHFNRPDIILQNKKDKITYVIDIAVPNTHNIQKTISEKISKYDELKEEITRIWKQKNVYIVPIVLSTTGVIPKHLHHSLQMLNLKNTTYITLQRAAILNTCRIVRKFLQIDEEQTTYTPQI

SEQ ID NO: 21150 - protein, 1197 aa, Leucinodes orbonalis
MDVAREANAFLPASTKAGKPRVRMQWSNEVNLFIMRTYYYITRLETDMTTYRKKLHEYFTQQYPNVNVSEQRISDQRRTIERNKLLTQAVLNKLKIEVKQLLQEEENREYDIRNEINTGQTAQPQTYPSLSPLTQTSNQTFYDTQNTETLHAATQTESIKSLLESESEPLTPTTQPIYENSIIDKFRINLSMYSNINPTQRPKLPKLKYCPKLFQLIDIFNQRFLDEFISTDTNLTDIHTLVYCTAFTISEELNYKITENTRTLRRNREHKPAWQHRLEKDIQKLREDLGHITQYIKGNRSRKIVNRVEVLLKNNIIHTRHERNNNKPEEILDTLKQKLALKAHRLKRYKKGLERKTHNNMFSMNEKQFYRNLRKNTSTAPESAIEIPTAEVLQDYWSGIWEEPSPHNINADWIEEEKLRWDTIEPMVFTEISEEDVRDVTTKLHNWKSPGIDKIHNFWFKKLTSIHKTLAKNITDIISGHQNIPEFIATGITYMLPKNHYSSDPSQYRPITCLPTIYKIITSLVTQKLNLHVEKYNIIAEEQKGCRKGHMGCKEQLIIDSVIHKHATSKHRNLHCTYIDYRKAFDSIPHSWLIQILDIYKVDPIIIHFLQHIMSYWNTTLHLYSPHDNITTRQIAIKRGIYQGDSLSPLWFCLALNPLSYRLNSTRAGYHFKNRNLETIVSHLIYMDDIKLYARNEKEMKTLINTTVELSQDINMQFGIEKCKTIHIIRGIIQPGDYTISDNNAITAMGVNDLYKYLGFEQLKGLDHTSIKQTLTTEYKKRVNAICKTQLSGKNFIKAINTYAIPILTYSFGIIKWTNTDIDYIQRATRTIFTKYNNHHPKSAVERLTIKREGRGRGLIDIHYLREKQHHTLKTHFFNKSRTSKIHKAITQADNKYTPLNLQENKNSETLSHNEAQNKKIETWKQKVLHGRHPHDLDQPHIDKKASNTWLANGYLYPETEGFMTAIQDQIINTKNYRRYIIKDPTLTNDKCRRCHTQPETIQHITGACTSLTQTDYTHRHNQLANIIHLKLALKHNLIQNSDTPYYKYTPQTIIENDLYKLYYDRAILTDRTIHHNRPDITLLDKLNKTTYLIDIAVPNTHNIKKVINDKIIKYTELREEIIRVWKQSKVYIVPIVLSTTGVVPHHIHQSLKLLNLPNNLINLLQKAAILNTCRIVRKFMQLDDNMVEQDNTHHTS

SEQ ID NO: 21151 - protein, 1287 aa, Dione vanillae
METRLRKKLRGPLPEGNRRGTPGADAGCFSIRTVSGEELSRRAPTGDLQPEKLTAEHLNTYTSRVNSPDRPYSPSTASYSPSVRSSSSSSVCSTGTPTPPLDVAREANAFLPVSTKAGKPRVRMQWSKDVNLFIMRTYYHITKLETDMTIYRKKLHEQFSLKYPQIKVSEQRVSDQRRTIERNKLLSQEILNRLKEEVKIQLQEEETNNQYTTEISNHTHIQTGTSSPRIFTSSKSNIQSVSIDRDQQTQSSHTFTQTETITQLLENDIESFVNEQTPNEEYTRSIMDKFRTNLTLYAGMDPKVRPKLPKLRYSQKLYQLTNLFNESILTEYISFDTKLIDLHTLVYCSALTITEELNYKITKKSIVKSKNNKNTPPWQYRLEKDIQKLRADIGRLTQYINNNRTKKIKERVDFLLMTTKVHTKHERNNKRPEEVLDTLKQKLALKSHRLKRYNKAQKRKTENNIFVRNEKQFYRNLFKPQNIIPEYNVEIPTEEELEKYWSGIWEEQTNHNNEAAWITKEEQRWHNIEVMEYNEIVEEDIKEVTDKLHNWKSPGIDKIHNFWFKKLTCLHRSLAKNISEIISGQQNIPEFIATGITYMLPKHNFSIQPSQYRPITCLPTVYKIITSLITRKINKHLEKNNIIAEEQKGCRRGHMGCREQLIIDSTIMKHASSKNRNLHCTYIDYKKAFDSIPHSWLLHILNIYKINPKITNFLRNIMTHWKTTLHLHSPNYNVSTREIAIKKGIYQGDSLSPLWFCMALNPLSYQLQCNRAGYRLKYDNSETIISHLIYMDDIKLYAKDNKEMKVLIDTTTQFSKDIHMHFGLDKCRTVHIIKGNIQSGDYMINEIDKITAMESNELYKYLGFQQLKGLSHTAIKETITNEYKIRINAICKTQLSAKHLIKALNIFAIPILTYTFGVIKWSKSNIEQIERLTRTTLTKHNNLHPKSAIERLTIKRKNGGRGLIDIKHLWQQQVHNLSKFFYIKAQSSRIHKSVVQNDLKFTPLNLKDGQSIENSINLDPQKKKIEEWKMKVMHGRHPNDLQQPHIDFEASNKWLMTGSLFPETEGFIIAIQDQIINTKNYRKYIIKDPTVTNDKCRRCNTQPETIQHITGACTSLTQTDYTHRHNQLLNIIHQSLALKYKLIQDRNIPYYKYTPQTILENNSHKIYYDRAILTDKTIHFNRPDITLQDKINKTVYLIDIAVPNTHNIQKTIVEKINKYTDLKEEVFRIWKLNKVYVVPIVISTTGVIPKAIHHYLKLINLQDNIICTLQKAAILNTCRIVRKFLQI

SEQ ID NO: 21152 - protein, 1297 aa, Leptidea sinapis
METRSMKKRKIGPLPGGDRRGTPGAGAGCPSMRTVSGEELNRRAPTGSSENTTAENDRLTDRTTPTEPYSPCTISYTPSIPSSPLSSRYSPTPTLDAAREANAFLLASTKAGKPRVRMKWSKEMNLFIMRTYYYITKLETDLTTYRKQLHELFLQKYPDLNVTEQRIADQRRVIVKNKLLNQETLNQIKEEIKSQLEIENENQFHINISEPTNDVIPCSSTQTIPNTQHNQSLNTFTYNIQSLQTFSYITQTSHNMPTQTEFVTIMMENDIDTVLDHNPGTNTEIEEICYKFKTALTQYSGMDPLVRPKLPKLRYNSHLFQLVNMFNSDILSRFISDDTKLTDIHTIVYCVALVISEELNYKVTEYIRSTRPKDCYKPPWQIRLEKDIEKLRADCGRLTQYINNNRSRKIIKHVKAIFKTGNTHTKHENSNIKLEEFLDTLKQKLALKVHRLKRYKKAQERKNDNTMFSTNEKNFYRNLHKLKTDTVNNPNVPTQEQLETFWSGIWEQQVHHNDKADWIIEEENKWNAIEEMDFTEITETDINNITARLHNWKSPGIDKIHNFWYKKLFSLHKIMAKNITDIIIGKQKIPDFIATGITYMLPKLQISPLPSQYRPITCLPTIYKILTSAITTKINKHVEHYNIIAEEQKGCRRGHMGCKEQLIIDSTIHKHATSKNRNLHCTYIDYKKAFDSIPHSWLIKILQIYKINPKIINFLHDIMSRWKTTLYLNTNQNTITTREIAIGKGIYQGDSLSPLWFCLALNPLSHLLRDCRAGYRLKHDIQETIVSHLIYMDDIKLYGKTEMEMKKLIDTTAQFSKDINMEFGLDKCRTLHIKRGKIRPGDYAVNDIDIIRAMEQTELYKYLGYKQLRGLDHTEVKNTLTIEFKKRINSLCKTQLTSKHLIKSLNTYAIPILTYSFGIIKWTKTDIEQIERTIRTTLTKHNNLHPKSAIERLTIKRKYGGRGLIDLNHLCQKQVGNLKDFFHLKSQTSEIHKAIVKNDINFTPLNLHEDISSQNTRRNDPQIQKLDSWKRKVLHGRHPHDLEQSHINTAASNKWLKIGNLFPETEGFIIAIQDQVVNTKNYRKFIIKDPSISNDKCRKCHVQPETIQHITGGCTTLTQTDYTHRHNQVVNIIHQKLALKHKLIQNTNTPYYKYKPQTVLENDTYKLYFDRAILTDRTIHYNRPDITLKDKLNEITYLIDIAVPNTHNLQKTISEKINKYTELKDEVARIWNQKKVYVIPIVLSTTGVIPNHLLHSLKLLELKETLYITLQKVAILNTCRIVRKFLQIDEHDISPYT

SEQ ID NO: 21153 - protein, 1295 aa, Emesis mandana
METRLKRKRIGPLPGGDRRGALGADAECYSMRTVSGRGLNRRTPTESLGRDITAEDNDRLSDNRNNSPIEPYSPSTVSYTPSVPSSPTTSTDQLTPNLDVAREENSFLPVSTKAGKPRMRMKWSNDVNLFIMRTYYYITKLETDLTIYRKRLHELFSQKYPDVKVSEQRISDQRRTIIRNKLLSQTVLNQLIEEARLKLQEEEDRHTDSQTQSTNIPQQHSYTQSQLTQPQTPTQFVPLNTQTTITASTQTELVTLLIENEIEVLPNADTPSLDRTSELRDKFRTNLTLYSGMDPAARPKLPKLRYSPKTTELIRIFNDTILVDYVTENSELTDVHTLIYCTAVVISEDLGYKIQHKNTQTHKIRDKPPWQKRLEKDIEKLRADIGRLIQYINNNRSRKLVKKVETIIKNRTLHTRHENKNKKPEEFLDTLKQKLALKVHRLKRYNKRNSRKTDNVLFETNEKSFYKQLRNNITTAQTTNGTNTTTTTPTKEQLEIFWANIWEKEAHHNENAEWIEHEKHRYNTIDEMTFIDVSTDEIKFITSKLHNWKGPGIDHIHNYWYKMLISLHKILAKNITDIITGKQRIPDFLATGITYMLPKNQHTDQPSQYRPITCLPTIYKIITSTITKRINKHIEENNIIAEEQKGCRRGHMGCKEQLIIDSCIHKHATTRNRNLHCSYIDYKKAFDSIPHSWLIQIFQIYKINPIIIKFMQNVMQLWKTTLQINNNHNNITTRQISIKKGIYQGDSLSPMWFCLALNPLSHQLRSCRAGYSFKPNTDDTLISHLIYMDDIKLYARTEKQLKSLLDTTTKFSKDINMEFGLDKCKTLHIIRGQVQPGNYAVDDNATITALEPNEFYKYLGYNQLKGIEHTAVKQILSSEFKNRINIICKTKLTGKSLIKAINTYAVPVLTYSFGIIKWSKTDTEQLERTTRTTLTKHKHLHPKSAIERLTLKRQAGGRGLIDIQNLWIKQICKLKEFFHNKAQTSDIHKIITENDHNYTPLNLSLSPETQTNTDRDLHLQKIEYWKMKTLHGRHPHDLEQSHIDLIASNKWLKIGKLFPETEGFMIAIQDQVINTKNYRKHIIKDPTITTDKCRRCHAQSETIQHITGACTALTQTDYTHRHNQIANIIHQHLAIKHKLIQNNSNTPYYKYMPETILENAEYKLYYDRAILTDRTIHYNRPDITLQDKINKITYLIDIAVPNSHNLQKTITEKTTKYADLKEEITRIWKQKKVYVVPIVLSTTGIIPKHLHHSLKLLDIKNSTYITLQKAAILNTCRIVRKFMELDEQDHQQPTL

SEQ ID NO: 21154 - protein, 1295 aa, Emesis furor
METRLKRKRIGPLPGGDRRGALGADAECYSMRTVSGRGLNRRTPTESLGRDITAEDNDRLSDNRNNSPIEPYSPSTVSYTPSVPSSPTTSTDQLTPNLDVAREENSFLPVSTKAGKPRMRMKWSNDVNLFIMRTYYYITKLETDLTIYRKRLHELFSQKYPDVKVSEQRISDQRRTIIRNKLLSQTVLNQLIEEARLKLQEEEDRHTDSQTQSTHIPQQQSYTQSQLTQPQTPTQFVPLNTQTTNTTSTQTELVTLLIENEIEVLSNADTPSLDRTSELRDKFRTTLTLYSGMDPAARPKLPKLRYSPKTTELIRIFNDSILVDYVTENSELTDVHTLIYCTAVVISEDLGYKIQHKNTQTHKNRDKPPWQIRLEKDIEKLRADIARLTQYINNNRSRKLVKKVETIIKNRTLHTRHENKNKKPEEFLDTLKQKLALKVHRLKRYNKRNSRKTDNVLFETNEKSFYKQLRNNITTAQTTNGTNTTTTTPTKEQLETFWANIWEKEAHHNENAEWIEHEKHRYNTIDEMTFNDVSTDEIKFITSKLHNWKGPGIDHIHNYWYKMLISLHKILAKNITDIITEKQRIPDFLATGITYMLPKNQHSDQPSQYRPITCLPTIYKIITSTITKRINKHIEENNIIAEEQKGCRRGHMGCKEQLIIDSCIHKHATTKNRNLHCSYIDYKKAFDSIPHSWLIQILQIYKINPIIIKFMQNVMQLWKTTLQINNNHNNITTRQIKIKKGIYQGDSLSPMWFCLALNPLSHQLRSCRSGYSFKPNTDDTLISHLIYMDDIKLYARTEKQLKSLLDTTTKFSKDINMEFGLDKCKTLHIIRGQVQPGNYAVDDSATITALEPNDFYKYLGYNQLKGIEHTAVKQTLRLEYKNRINIICKTKLTGKSLIKAINTYAVPVLTYSFGIIKWSKTDTEQLERTTRTTLTKHKHLHPKSAIERLTLKRQVGGRGLIDIPNLWLKQIRKLKEFFHNKAQTSDIHKIITENDHNYTPLNLSLSPETQTNTDRDLHLQKIEYWKMKTLHGRHPHDLEQSHIDSIASNKWLKIGKLFPETEGFMIAIQDQVINTKNYRKHIIKDPTITTDKCRRCHAQSETIQHITGACTALTQTDYTHRHNQIANIIHQHLAIKHKLIQNNSNTPYYKYMPETILENAEYKLYYDRAILTDRTIHYNRPDITLQDKINKITYLIDIAVPNSHNLQKTITEKTTKYADLKEEITRIWKQKKVYVVPIVLSTTGIIPKHLHHSLKLLDIKNSTYITLQKAAILNTCRIVRKFMELDEQDHQQPTL

SEQ ID NO: 21155 - protein, 1344 aa, Noctua pronuba
METRSKRKRIGPLPGGDRRGTPGADAGCLSMRTVGGEELSRRAPTDKNTTAEIIDDGDRLTDRTDTPVEPYSPSTVSYTPSRRSSPSIPSSPSVLSPPIISLNTVTPTPTLNAARGVSTFLPASTKAGKARVRMKWSKEVNLFIMRTYLHITKLETDMTTYRQQLHALFTRQYPEITVSEQRVSDQRRIIVRNKLLSQEVIDQLKEEVRTQLLQEETVNYIDANNITQNLSEITHQEQPQSLSQSQLIYSQPQPYNQSQAYTQISHTSTQTESITLMLENDIETIVVPDQQLTTDTYIQEINDKFRTTLTQYSGMDPAARPRLPKLKYTPNLFRLVNLFNESILTQFISDDTQLIDIHLLIYCTAVVISEELNFKITNHTGTPRTRQNLSPAWQQRLENDIEKLRADIGRLTQYINGCRSNKIVKRVEAIFRNNLTHTRHEKDNRKPEEFLDTLKQKLALKVHRLRRYKKAQQRKKDNATFATNEKMFYRNLHKPQTDTIDENNTNTPNLPTKEQLEEYWASIWEEPVQHNDKAAWIAEEEVKWRTLDEMEFVEVAETDITHITARLHNWKSPGIDKIHNFWYKKLTSLHKSLAKNLTDIILGQQNTPEFIATGITYMLPKTKNSPQPSQYRPITCLPTIYKILTSAITKKISSHIEHHNIIAEEQKGCRQGHMGCKEQLIIDSTIHKHATTKNRNLHCTYIDYKKAFDSVPHSWLIQILEIYRINPKIIDFIRHIMLQWKTTLQITYNHNAVTTRQISIKKGIYQGDSLSPLWFCLALNPLSHLLQRCGAGYCLKHTTDETTISHLIYMDDIKLYAKTENDMKKLVDVTAEFSKDINMQFGLEKCKTLHIVRGKVRPGDYVLNDTDTISAMEQTDLYKYLGYAQLKGLDHTRIKNTLTNEYKRRVNAVCKTQLSGKHLIKALNTFAIPVLTYSFGVIKWSKTDTEQLERTTRTTLTKHNNLHPKSAIERLTIKRQHGGRGLIDIQHLWRKQVSRLKSFFHSKSRSSSIHKAIVINDLNYTPLNLSHQTETLNTTNDDPQQHKMEDWKRKVLHGRHPHDLEQSHINKLASNKWLKIGNLFPETEGFIIAIQDQIINTKNYRKYIIKDPTVTNDKCRKCHSQPETIQHITGACTTLTQTDYTHRHNQVANVIHQKLALKHTLIQNTSTPYYNYKPEVTLENTTHKIYYDRAILTDKTIHYNRPDIILQDKINKVTYLIDIAVPNTHNIQKTITEKISKYAELKDEVTRIWRQEKVYVVPIVLSTTGVIPNHLLHSLKLLDLKESIYIILQKAAILNTCRIVRKFMQIEENEIGPSQHINIHKLTHHTLHLLWFRPVNVAKIQSKG

SEQ ID NO: 21156 - protein, 1319 aa, Mesoligia furuncula
METRSKSKRIGPLPGGDRRGAPGADAGCLSMRTVSGEELNRRAPTDKDTTAEIIDDGDRLTDRTNTPVEPYSPSTVSYTPSRPSSPSIPSSPTLLSPPITSLNLIPPTPTLNVAREVSSFLPASTKAGKARVRMRWSKEVNQFIMRTYFYITKLETDMTTYRQQLHELFTQQYPEINVSEQRISDQRRAIVRNKLLSREIIEQLKEETRIQLQEAENNTDSNAIPLSQNTTEIAEQSHPQPCSQVQSYTQSQSYNQSQAYTQTSHTSTQTESINLTLENDIETLTFADQNLTTDIYIQEIHDKFRTTLAQYSGMDPAVRPKLPKLRYSPCLFRLVNLFNENILTQFISDDTQLIDIHTLIYCTAVVVSEELNFKITQHTGNTRSKQNIKPARQQRLEKDIEKLRADCGRLTQYINNIRSNKVIRRVEAIFRSSVTHTRHENNNRKPEEFLDTLKQKLALKVHRLRRYKKAQQRKNDNVIFATNEKMFYRNLHKPKTNTNDDNNTVAPDQPTKEQLETYWSSIWEEQEQHNDKATWITEEEIKWRAIEEMEFVEITEADITHLTGRLHNWKSPGIDKIHNFWYKKLTSLHKPIAKNLTEIILGRQNIPDFIATGITYMMPKTINSPQPSQYRPITCLPTIYKILTSAITTKINSHIEHHNIMAEEQKGCRQGHMGCKEQLIIDSTIHKHATTKNRNLHCTYIDYKKAFDSVPHSWLIKTLEIYRINSKIIDFLRNIMPLWKTTLQINSNHNNVTTRQISIKKGIYQGDSLSPLWFCLALNPLSHLLQRCQVGYCLKHTAEQTTVSHLIYMDDIKLYAQTEKDMKKLVEVTAEFSLDINMQFGLDKCKTLHIIRGKIRPGDYVVNNTDTITAMEPTDLYKYLGYTQLKGLDHVRIKETLTAEYKRRLNTICKTQLSSKNLIKALNTFAIPILTYSFGVIKWTKTDTEQLERTTRTTLTKHNNLHPKSATERLTIKRQHGGRGLIDIQHLWQKQVYRLKTFFHSKSCTSNIHKAIVQNDFNYTPLNLSEQLDTPQITSDEPQVQKIENWKKKVLHGRHPHDLEQSHVNKVASNKFLKIGNLFPETEGFIIAIQDQIINTKNYRKFIIKDPSVTNDKCRKCHSQPETIQHITGACTTLTQTDYTHRHNQVANIIHQKLGLKYTLIQNTNTPYYNYTPQTILENDTHKLYYDRAILTDRTIHYNRPDITLQDKINKVTYLIDIAVPNTHNIQKTISEKISKYAELKDEVTRIWRQQKVYVVPIVLSTTGVIPNYLLHSLKLLNLKETLYITLQKAAILNTCRIVRKFMQIDENEIGPHQNTSLT

SEQ ID NO: 21157 - protein, 1273 aa, Arctia plantaginis
MQNKTNKYNLRPLPGGRRDSIRNNNINNQTDRQTDNDNISLNSLTSLSVTEPYSPSTSSYRPTPVSFVDEDSHETPNPTLAVTQEVNAFLPASTKSGKPRVRMRWSKEVNLFIMRTYYQITKLETDMTTYRKQLHELFTRHYPDINVTEQRIADQRRTIVRNKLLTEETLHILKEEIRMQLQQNEHIYEYIENNSNPQLHNTQSVTTALPTQSQPHTITQSSHISTQPETITLTLENDIEIMQNFNPSSDNIQKIQEKFRTALALYSRMDPITRPKLPKLKYSRKLSELTHVFNHNILHQFLSEDTQLTDIHTLIYCTALVISEELNYKIIDHPRNILRKNSKPPWQIRLEKDIEQLRADCGRLTQYINNNRSNKIVKRVEQIFRRQCTHTRHENNNRKPEEYLDTLKQKFTLKVHRLKRYKKAQLRKNDNMLFTLNEKSFYRNLSKPQTATTRPENIDIPTQTQLETFWSGIWEEPVQHNDKADWITEEENKWNSIEEMEFDCITEDDIAHVTGKLHNWKSPGIDKIHNYWYKKITLFHKPIAKNLTYIILGKQNIPEFIGMGITYMLPKTAHSPQPSQYRPITCLPTIYKILTSAIAHKINMHIEHNHIIAEEQKGCRRGHMECKEQLIIDSTIHKHATTKNRNLHCTYIDYKKAFDSIPHSWLLKILHIYKINPKITDFMRDIMSHWKTTLHLNMNDRTVTTRQISIKKGIYQGDSLSPLWFCLALNPLSHLLQRCQAGYRLRNSTEETIISHLIYMDDIKLYAKSDKEMTKLLQNTTKFSKDINMEFGLDKCKTLHIIRGKIRPGDYAVDESSTIAAMESTDLYKYLGYKQLKGLDHTSIKQILATEYKSRTNTLCKTQLSAKNLIKALNTYAIPILTYSFGIIKWTKTDIEQIERTTRTTLTKHNNLHPKSAIERLTIKRENGGRGLIDIYHLWQKQVYNLKTFFRTKSHTSNIHKAITLNDYNFTPLNLNDQTGIHNPNNIDPQADKIENWKKKVLHGRHPHDLEQPHIDTIASNSWLKIGNLFPETEGFIIAIQDQIVNTKNYRKYIIKDATVTDDKCRKCHIQSETIQHITGACITLTQTDYTHRHNQITNIIHQKLALKHHLIQNTNTPYYNYTPQSVLESSSHKLYYDRAILTDRTIHFNRPDITLQDKINKTTYLIDIAVPNTHNLQKTITEKISKYTELKEEIIRIWRQEKVYIVPIVLSTTGVIPKHLHHSLKLINLNESVYFNLQKAAILNTCRTVRKFMDIEENGTAQHTQQPPSTST

SEQ ID NO: 21158 - protein, 1002 aa, Dryas iulia
MDPKIRPKLPKLRYSRKLYQLSTLFNESILTDYVSPDTKLIDLHTLIYCTALTIAQELNYKITENSKIKVKDEKNKPAWQHRLERDIQKLRADIGKLTQYINNNRTKKVKEIVEFLLRTNKVHIKHEKNNKTPEEILDTLKQKLALKSHRLKRYNKAKNRITQNNIFVKNEKQFYRNLFKPQNVNQENIVETPTEEELQQYWSGIWEVQTNHNTQAAWIAKEEERWIDLEVMEYTQITEEDMKEVTNRLHSWKSPGIDKIHNFWFKKLTSLHKSLATNISEIISGQQAIPEFIATGITYMLPKNNYSTQPSQYRPITCLPTIYKIITSLITQKINRHVENNNIIAEEQKGCRRGHMGCREQLIIDSTITKHALSKNRNLHSTYIDYKKAFDSIPHSWLLHILNIYKINPTLVTFLKNIMTQWKTTLHLHSPNNNIETREIAIRKGIYQGDSLSPLWFCLALNPLSYRLQCNRAGYRFNHNNDETLISHLIYMDDIKLFARNEKEMKTLIETTAEFSTDIRMHFGLDKCRTAHIIKGNIRPGDYKINEIDKIIALEPTELYKYLGFHQLKGLNHTSIKNTITTEYRRRINAICKTQLSGKRLIKAINTYAIPILTYSFGIIKWSNTNIEQIERSTRTTLTKHNHLHPKSAIERLTIKRKNGGRGLIDIKHLWQKQIHNLSAFFFVKAQSSKIHKTIVENDYKYTPLNLNDSQNPENATNLEQQKRKMEDWKKKVMHGRHPNDLQQPHIDPEASNRWLTNGNLFPETEGFIIAIQDQMINTKNFRKYIIKDPTLTDDKCRRCHAQPETIQHITGACITLTQTDYTHRHNQLVNIIHQKLAHKLKLIEDTNIPYYKYIPLTVLENTSYKIYYDRAILTDKTIHFNRPDITLQDKINKTTYLIDIAVPNTHNIQKTITEKISKYADLKEEVTRIWKQNKVYVIPIVISTTGVVPKAIHQYLKTIGLKENTIPSLQKAAILNTCRIVRKFLQLEENDIIHNQTHYTL

SEQ ID NO: 21159 - protein, 1323 aa, Noctua janthe
METRSKKKRIGPLPGGDRRGAPGADAGCLSMRTVSGEELNRRAPTDKDTTAEIIDDGDGLTDRTDTPVEPFSPSTVSYTPSRRSSPSIPSSPTLSSSPIISLNTVSPTPTLNAARGVSTFLPASTKAGKARVRMKWSKEVNTFIMRTYLYITKLETDMTTYRQQLHELFIRRYPEITVSEQRISDQRRTIVRNKLLSQEEIDKLKVEVRTQLHLESVIDEDTNNIAVTQNTIENIQQEQPQSYDQSEPYTQSQPYYYLSSQAYSQITHTSTQTENVTIMLENDIEVLANINQNPPTDTRIREIHDKFKTALTQYSGMDPAARPKLPKLRYTPKLAQLVHVFNQNILTQYISEDTQLTDVHTLIYCTALVISEELNFKITEYTGNARQSNVNKPAWQQRLEKDIEKLRADCGRLTQYINNNRSNKVVKRVEVIFKNMAVHTRHENHNRRPEEFLDTLKQKLALKVHRLRRYKKAQERKNDNALFATNEKNFYRKLQKPQTDTDTPTTENNIELPTTTQLETFWAGIWEEQIHHKETSEWIQDEETKWSSLEEMEFIELSESDITSVTARLHNWKSPGIDKIHNYWYKKLESLHKILAKNLTEIILGKQNIPEFIATGITYMLPKTHYSSQPSQYRPITCLPTIYKILTSAITTKINKHVEHHNIIAEEQKGCRRGHMGCKEQLVIDSIIHKHAATKNRNLHCTYIDYKKAFDSIPHSWLIQILHIYKINPQIIEFLRNIMSRWKTTLQLNYCNNAVTTRQIAIKKGIYQGDSLSPLWFCLALNPLSHLLQRCQAGYCLKQTTEETTISHLIYMDDIKLYSKTEKEMKKLIDITTEFSKDINMQFGLDKCKTVHIIRGKIKPGDYAINTTDTITAMEPTDLYKYLGYRQLKGLDHTSIKQTLNTEYKRRVVAVCKTQLSGKHLIKALNTYAIPILTYSFGVIKWSKTDIQQIERTTRTTLTKHNNLHPKSAIERLTIKRQNGGRGLIDIHHLWQKQISRLKTFFNSKSHTSNIHKAIVMNDNSYTPLNLNEQTDTQNTNNEDPQKQKLEDWKKKVLHGRHPHDLEQPHIDTLASNKWLKIGSLFPETEGFIIAIQDQIINTKNYRKFIIKDPTMTNDKCRKCHTQPETIQHITGACTTLTQTDYTHRHNQVANIIHQNLARKHKLIQDSNTPYYKYVAQPVVENTTHKLFYDRGILTDRTIHYNRPDIILQDKVNKVTYLIDIAVPNTHNLQKTIGDKISKYAELKEEVTRIWRQEKVYVVPIVVSTTGVIPNHLHHSLKLLDLKDSIYITLQKAAILNTCRIVRKFMQIDENEISHNSHTHTLR

SEQ ID NO: 21160 - protein, 879 aa, Noctua pronuba
MAVHTRHENHNRRPEEFLDTLKQKLALKVHRLRRYKKAQERKNDNTLFATNEKNFYRKLQKPQTDTDTPTTENHTNNIELPTTEQLETFWADIWEEQVHHKETSEWIQAEKTKWSSLEEMEFIELSESDITSITARLHNWKSPGIDKIHNYWYKKLESLHNILAKNLTEIILGKQNIPEFIATGITYMLPKTHYSPQPSQYRPITCLPTIYKILTSAITRKINKHVEHHNIIAEEQKGCRRGHMGCKEQLVIDSIIHKHAATKNRNLHCTYIDYKKAFDSIPHSWLIQILNIYKINPKIMEFLQNIMTRWKTTLQLNYRDNAVTTRQIAIKKGIYQGDSLSPLWFCLALNPLSHLLQRCQAGYCLKQTTEETTISHLIYMDDIKLYAKTEKEMKKLIDITTEFSKDINMQFGLDKCKTVHIIRGKIKPGDYAINTNDTIAAMEPTDLYKYLGYRQLKGLDHTTIKQTLNTEYKRRVVAVCKTQLSGKHLIKALNTYAIPILTYSFGVIKWSKTDIQQIERTTRTTLTKHNNLHPKSAIERLTIKRQNGGRGLIDIHHLWQKQITRLKTFFNSKSHTSNIHKAIVMNDNRYTPLNLNEQTDTQHTNNEDPHKQKLEDWKKKVLHGRHPHDLEQPHIDTLASNKWLKIGSLFPETEGFIIAIQDQIINTKNYRKFIIKDPTMTNDKCRKCHSQPETIQHITGACTTLTQTDYTHRHNQLANVIHQNLALKHNLIQDSNTPYYKYVPQPVVENTTHKLFYDRGVLTDRTIHYNRPDIILQDKVNKVTYLIDIAVPNTHNLQKTIGDKISKYAELKEEVTRIWRQEKVYVVPIVVSTTGVIPNHLHHSLKLIDLKDSIYITLQKAAILNTCRIVRKFMQIDEN

SEQ ID NO: 21161 - protein, 1319 aa, Noctua pronuba
METRSKRKRIGPLPGGDRRGTPGAGAGCLSMRTVGGEELSRRAPTDKNTTAEIIDDGDRLTDRTDTPVEPYSPSTVSYTPSRRSSPSIPSSPSVLSPPIISLNTVTPTPTLNAARGVSTFLPASTKAGKARVRMKWSKEVNLFIMRTYLHITKLETDMTTYRQQLHALFTRQYPEITVSEQRVSDQRRIIVRNKLLSQEVIDQLKEEVRTQLLQEETVNYIDANNITQNLSEISHQEQPQSLSQSQIIYSQSQPYNQSQAYTQISHTSTQTESITLMLENDIETIYVVVPDQQLTTDTYIQEINDKFRTTLTQYSGMDPAARPRLPKLKYTPNLFRLVNLFNESILTQFISDDTQLIDIHLLIYCTAVVISEELNFKITNHTGTPRTRQNLSPAWQQRLENDIEKLRADIGRLTQYINGCRSNKIVKRVEAIFRNNLTHTRHEKDNRKPEEFLDTLKQKLALKVHRLRRYKKAQQRKKDNATFATNEKMFYRNLHKPQTDTIDENNTNTPNLPTKEQLEEYWASIWEEPVQHNDKAAWIAEEEVKWRALDEMEFVEVAETDITHITARLHNWKSPGIDKIHNFWYKKLTSLHKSLAKNLTDIILGQQNTPEFIATGITYMLPKTKNSPQPSQYRPITCLPTIYKILTSAITKKISSHIEHHNIIAEEQKGCRQGHMGCKEQLIIDSTIHKHATTKNRNLHCTYIDYKKAFDSVPHSWLIQILEIYRINPKIIDFIRHIMLQWKTTLQITYNHNAVTTRQISIKKGIYQGDSLSPLWFCLALNPLSHLLQRCGAGYCLKHTTDETTISHLIYMDDIKLYAKTENDMKKLVDVTAEFSKDINMQFGLEKCKTLHIVRGKVRPGDYVLNDTDTISAMEQTDLYKYLGYAQLKGLDHTRIKNTLTNEYKRRVNAVCKTQLSGKHLIKALNTFAIPVLTYSFGVIKWSKTDTEQLERTTRTTLTKHNNLHPKSAIERLTIKRQHGGRGLIDIQHLWRKQVSRLKSFFHSKSRSSSIHKAIVINDLNYTPLNLSHQTETPNTTNDDPQQHKMEDWKRKVLHGRHPHDLEQSHINKLASNKWLKIGNLFPETEGFIIAIQDQIINTKNYRKYIIKDPTVTNDKCRKCHSQPETIQHITGACTTLTQTDYTHRHNQVANVIHQKLALKHTLIQNTSTPYYNYKPEVTLENTTHKIYYDRAILTDKTIHYNRPDIILQDKINKVTYLIDIAVPNTHNIQKTITEKISKYAELKDEVTRIWRQEKVYVVPIVLSTTGVIPNHLLHSLKLLDLKESIYIILQKAAILNTCRIVRKFMQIEENEIGPHHNT

SEQ ID NO: 21162 - protein, 1299 aa, Pararge aegeria
MESRSKRKRIGPLPGGNRRGAPGADAGCLSMRTVSGEELNRRAPTDKNTTAEVIDDDDRLTDRTNTPIEPYSPSTISYTPSSRTSSPSLPSSPPIAILNANPSIQTLNVAREASTFLPASTKAGKARVRMKWSREVNIFIMRNYLYITKLETDLTTYRQRLHELFKEQYPSIIVSEQRISDQRRAIVRNKLLPQDIIDQLKIEIRRQLEEESKSNTDTNTAALTQTRSQNIQQIQPLQPNTQQQTYNQLQPYSQTSHTATQTETIILTIENDVEHLDNTDRNTISEKYVQEILNKFKTAITQYSGMDPAARPKLPKLKHSPNLFRLVNIFNESILYQFMSIDTQLIDIHTVIYCTALVISEELNFKITEYTENSRSRHNNKPPWQQRLEKDIEKLRADCGRLTQYINNNRSNKVVKRVEAIFKSNFIHTRHENSNTKPEEFLDTFKQKLGFHRLRRYKKAQQRKKDNAIFATNEKMFYRNLNKPHTDRISDEKIETPTIEHLENFWSGIWEQQVEHNNEAAWITEEDFKWRGIDEMEFKEFTESDITIITARLHNWKSPGIDKIHNFWYKKLTSLHKIIAKVFTDIVLGRQNIPEFIATGITYMLPKTKYTTQPSQYRPITCLPTIYKILTSAITTKINLHVERHNIIAEEQKGCRRGHMGCKEQLVIDSTIHKHATAKNRNLHCTYIDYQKAFDSIPHSWLIKVLEIYKVNPKINIFLRSIMSHWKTTLQLSNRLNTLVSRQIYIRKGIYQGDSLSPLWFCLALNPLSDLLHKCRAGYSFKHNSKETIISHLIYMDDIKLYAKSENEMKNLINITTEFSQDINMQFGIDKCKAVHIIKGKIKSGDYIINENDTISSMETTDLYKYLGYKQLKGIDYTAVKQTLNTEYRRRINAICKTQLSGKHLIKALNTFAIPILTYSFGVIKWSKTDIEQIERITRTTLTKHNNHHPKSAVERLTIKRQNGGRGLIDIYHLWQKQISRLRTFFHSKSLTSDIHKAITIMDLNYTPLNLNEKIDTQNTSITDPQKQKLENWKKKVVHGRHRHDLEQPHINTVASNKWLKIGNLFPETEGFIIAIQDQIINTKNYRKYIIKDSTITSDKCRRCHIQSETIQHITGACTTLTQTDYTHRHNQVANIIHQKLAFKHMLTQNTNTPYYKYTPQTILENTTYKLYYDRAILTDKTIHYNRPDIILQDKLRKTTYLIDIAVPNTHNIQKTVSEKICKYTELKEEITRIWKQAKVYVVPIVISTTGVIPNSLLHSLKIIGLEESLYIGLQKAAILNTCRIVRKFLQVDESIGLT

SEQ ID NO: 21163 - protein, 1303 aa, Hyles vespertilio
METRSKKKLRGPLPGGDRRGTPGADAGCSSLRTVSGEELSRRTPTGSPENITADNDLDRLTDSRSNSPIEPYSPSTISYTPSTCESPSIPSSPPSNNIRDPPILALDAAREVNTFLPVTTKAGKPRVRMSWSKDVNLFIMRTYYYITKLETDMTIYRKQLHEHFSRQYPDIKVTEQRLSDQKRAIERNKLLSQDILDQLKEEVRRQLNVETDSSENTIPGLANTSPCDLPRNNQSQPLTQNTQIFNRESETINQSYNLITQTSHISTQTDGIILTVENDIDCLPEPNIITEKHIQELQNKIITTLTLYSGLDPASRPKLPKLKYNPKLNSLIQTFNQKILNNFISDSTKLIDIHTLIYCSALVIAEELGYKIIELTDNQTRPKHNNKPSWQYRLEKDIEKLRADCGRLTQYINNNRSKKVIKRVEEIFKHHKTHTRHENNNSKPEEFLDTLKQKLALKAQRLKRYKKSQNRIKDNILFTTNEKLFYRSIRNPHLDTSNETPENPPTTEEVEHFWASVWEDQAQHNEKADWIKAEENRWSTIEEMEFIEITEADIKITTTRLHNWKSPGIDKIHNFWFKKFTTLHKAIAKNFTDIILRKQNIPQFIATGITYLLPKDKISSQPSQYRPITCLPTIYKILTSVITSKITTHIENHNIIAEEQKGCRRGHMGCKEQLVIDSVIHKHANTKNINLHCTYIDYKKAFDSIPHSWLIHILKIYKINNNIIGFLQDIMPYWKTTLYLNSRNSTLMTRQINIKKGIYQGDSLSPLWFCLALNPLSHILHNCRAGYHLKHASGETTVSHLIYMDDLKLYAKSEKDMKKLIEATSDFSRDIDMHFGLDKCKTIHIVRGKIRPGDYTVNNSDTITAMEPNDLYKYLGYKQLKGIDHGTIKNSLSAEYKRRINAICKTQLSGKHLIKALNTYAIPILTYSFGIIKWSKTNIETIERTTRTTLTKHNLLHPKSAIERLTIKRQEGGRGLIDIHHLWKKQLNNLKTFFHAKSSTSNIHNAIIQNDNNFTPLNLQEENRLESADNMDSQKKKTEDWKKKVLHGRHPHDIEQTHIDTTASNKWLKIGNLFPETEGFIIAIQDQVINTKNYRKYIIKDPTITNDKCRRCHSQPETIQHITGACTSLTQTDYTHRHNQIASIIHQKLALKYKLIHDSKTPYYKYKPETVIENPSYKLYFDRAILTDRTIHFNRPDITLQDKRNKTTYLIDIAVPNTHNIQKTIAEKNNKYSDLKDEITRIWRQDKVYIVPIVLSTTGVIPKHLHHSLKLLNLNESLYITLQKASILNTCRIVRKFLQLDET

SEQ ID NO: 21164 - protein, 1275 aa, Autochton zarex
MRRSIRIKNKHSAQSGTVAEIESNPPSPTSSTRSLFQSTNSTPLSFENRSNLISRSTTVSPISEDIEQIQNVIPPASAVARGANAFLPASTKAGKPRVRMKWSQDVNIFIMRTYYHTTKLETDMTTYRKTLHELFSIKYPDVNVSEQRVSDQRRMIIKNRYLTQEILDKLKEEVIKQLQEEEHINEVNNGSNQIHIEVDQNTLESQTHLHSNLSQSHTQTFIPNSHSSTQTEFITLLLENETDTIADFVPSNDISLQDMYDKLKTAITQYSGMDPTARPKLPRIKYTKHLNDLVNLFNQHILNNLISKETQLNDIHTLIYCTALVIAEELNYKIIHNTTHKKPRDFIKPSWQIRLERDIENLRVDIGRLTQYINNNRSDKLVKKVQNIFNRIARHTKHECNNRKPEEFLDTLKQKLALKTHRLKRYKKTQQRKKDNMQFATNEKLFYRNLYKPKNDYTTQTDNHTEIPTKEELEIYWSNIWEENIRHNDKADWIKEEQRKWELIDEMEFKEITELDISNVTARLHNWKAPGVDKIHNYWFKKLTTLHQPLARSLTEIILGKQNTPNFITIGITYMLPKTSNSTQPSQYRPITCLPTIYKILTSTITAKINAHIEHHNILAEEQKGCRRGTMGCKEQLVIDSIIHKHATSKHRNLHCTYIDYKKAFDSIPHSWLIQVLQIYRINPIIIDFLRNMMSLWKTTLHLNQGNTYISTRQININKGIYQGDSLSPLWFCLSLNPLSNLLHNCQTGYRFRNNPEETTISHLVYMDDIKLYARSQKDMQKLIDKTSQFSKDINMQFGLDKCKTLHIIKGKIQPGDYIVNDTDVISAMEPTDVYKYLGYNQLKGLLHTQIKHTLTTEFKRRIGAICKSHLSAKHLTKAINTYSIPILTYSFGIIKWTKTDIEQLERITRTTLTKHNHLHPKSAVERLNIKRQDGGRGVIDINYLWQKQIRNLRHFFFMKSTTSNIHSAITHNDENLTPLNLSDHTDQYTHTNRNPQVQKIEDWKKKVLHGRHPHDLEQTHVDKIASNKWLKVGNLFPETEGFIIAIQDQVINTKNYRKHIIKDANVKSDKCRRCHTQPETIQHITGACTNLTQTDYTHRHNQVTNIIHQNLALKLNLIQNTNTPYYKYTPQTVIENTSHKLYYDRAILTDRTIHYNRPDIILQDKLNKITYLIDIAVPNTHNIQKTIVEKINKYVDLKEEVTRIWKQNKVYVVPIVLSTTGVIPYHLHQSLKLIGLKHSIYISLQKAAILNTCRIVRKFMQIDEKEVGSHNLNP

SEQ ID NO: 21165 - protein, 1282 aa, Urbanus proteus
MRRSNRIKNKQSAQSGTVAEITSNLSSSSSSTHSLFQSPNSTPLSFEFRSNPVSRSTTVSPMSADIEQIQSITLPVSDVARGANAFLPASTKAGKPRVRMTWNQDVNIFIMRTYYHITKLETDMTTYRKTLHELFSIKYPDIKVPEQRVSDQRRMIIKNRYLSDEIINKLKEDVSKQLQEEQNINEVGNLDILTNVEALESQTQLESNSYQSHNLSQPHTLTFVPTSHSSTQTEFVTLLLENETETIADVVPSNDVSFQDMYDKLQAAVTQYSGMDPTARPRLPRIKSTKHLTDLVQLFNQHILHRFTSEKMELNDIHTLIYCTALVIAEELNYKITHTITHTKPKDHSKPSWQSRLERDIENLRVDIGRLTQFINNNRSDRLVRKVQEIFNRFSLHTKHESNNRKPEEFLDTLKQKLALKTHRLKRYKKTQQRRKDNIQFATNEKLFYRNICKSRKDFTPTEINQTEIPTKEELENYWSNIWEENITHNEEADWITEEQEKWKIIDEMEFQELTEGDITNTTARLHNWKAPGVDKVHNYWYKKLTILHRPIAKALTEIILGKQNIPNFITIGITYMLPKTNNSTQPSQYRPITCLPTIYKILTSTITSKINKHIEHHNVLAEEQKGCRRGHMGCKEQLVIDSIIHKHATSKHRNLHCTYIDYKKAFDSIPHSWLIKILQIYRINPIIVDFLRNIMSHWKTSLHLNQGNTFITTRQINIRKGIYQGDSLSPLWFCLALNPLSNLLHNCETGYRLNNSLEETTISHLIYMDDIKLYSKTHKDMQKLLDKTTQFSKDINMQFGLDKCKTLHIIKGKIKSGDYNVNDNDVISAMEPTDVYKYLGYYQLKGLLHTHIKQTLTTEFKRRIDIICKTHLTGKHLTKAINTYSIPILTYSFGIVKWTKTDIEQLERAIRTTLTKHNNLHPKSAVERLNIKRQDGGRGVIDINYLWQKQISKLRHFFFIKATTSNIHSAITHNDENFTPLNLSDQTDQCTLNNSNPQLQKIEHWKTKVLHGRHPHDLEHTHVDKISSNKWLKIGNLFPETEGFMIAIQDQVINTKNYRKHIIKDPNVKNDKCRRCHTQPETIQHITGACTNLTQTDYTHRHNQVTNIIHQNLALKHNLIQNTNTPYYKYTPQTVIENTSHKLYYDRAILTDRTIHYNRPDIILQDKLNKITYLIDIAVPNTHNIQKTIVEKINKYVELKEEVTRIWKQNKVYVVPIVLSTTGVIPYHLHQSIKLIGLKHSIYIPLQKAAILNTCRIVRKFMQIDEKDVGPHNLTQPITSS

SEQ ID NO: 21166 - protein, 1297 aa, Dryas iulia
METRLRKKLRGPLPEGNRRGAPGADAGCSSIRTVSGEELSRRAPTGDSQPEESTAEHFIHTSRVNSPSEPYSPSTASYNPSVQSSPTSSVCSRGTPTPLLDVAREVNTFLPASTKAGKPRVRMQWSKDVNLFIMRTYYHITKLETDMTIYRKKLHEQFTLKYPQINVSEQRVSDQRRTIERNKLLSRETLNRLKEEVRLQLQEEEKYENENNQQITETLNNTQLQTRSSSLTTSTFPLSHTSSHTSHVSTQTEVITQFLENDIESLVNVQPPNEEDIRDIKDKFRTNLTLYAGMDPKIRPKLPKLRYSRKLYQLSTLFNESILTCYVSPDTKLIDLHTLIYCTALTIAQELNYKIIENSSSIKVKDDRNKPAWQHRLERDIQKLRADIGKLTQYINNNRTKKVKERVEFLLRTTKVHTKHEKNNKTPEEILDTLKQKLALKSHRLKRYNKAQIRKTQNSMFVKNEKQFYRNLFKPENINQKNIVETPTEEELQQYWSGIWEVQTNHNTQAAWITKEEERWIDLEVMEYTQITEEDMKEVANRLNSWKSPGIDKIHNFWFKKLTSLHKSLAINISEIISGQQAIPEFIATGITYMLPKNNYSSQPSQYRPITCLPTIYKIITSLITQKINRHVENNNIIAEEQKGCRRGHMGCREQLIIDSTITKHALSKNRNLHSTYIDYKKAFDSIPHSWLLHILNIYKINPTITKFLKNIMTQWKTTLHLHSPNNNIKTREIAIKKGIYQGDSLSPLWFCLALNPLSYRLQCNRAGYRFNHNRDETLISHLIYMDDIKLFARNEKEMRTLIETTAEFSTDIRMHFGLDKCRTAHIIKGNVRPGDYNINAIDKITAMEPTELYNYLGFQQLKGLNHTSIKNTITIEYKTRINAICKTQLSGKRLIKAINTYAIPILTYSFGIIKWSKTNIEQIERSTRTTLTKHNHLHPKSAIERLTIKRKNGGRGLIDIKHLWKKQIHSLSAFFYTKAQSSKIHKTIVENDYKYTPLNLNDSQNLENATNLEQQKRKMKDWKKKVMHGRHPNDLQQPHIDPEASNRWLTNGNLFPETEGFIIAIQDQIINTKNFRKYVIKDPTVTDDKCRRCHAQPETIQHITGACVTLTQTDYTHRHNQLVNIIHQKLAHKLKLIEDTNIPYYKYTPLTVLENTSYKIYHDRAILTDKTIHFNRPDITLQDKINKTTYLIDIAVLNTHNIQKSITEKISNYVDLKEEVTRIWKQNKVYVVPIIISTTGIVPKAIHQYLKTIGLKENTITSLQKAAILNTCRIVRKFLQLEENDMMHNQTHIHTL

SEQ ID NO: 21167 - protein, 1163 aa, Papilio xuthus
MRTYYLITKLETDMTAYRKHLHEHFTREYPTVKVTEQRISDQRRTIIRNKLLSQELLNQLKEEVRLLMESDFNNDTNHNPTSEHNDLTITQFPDTQTLTKFTTPHTLLQTQPHTYTQSTHTSTQTEHITVTIENDLETLAATNPTTDLHIQQLLDKFKTTLTLYSGMDPTVRPKLPKLKYTQKLFQLINLFNLNILHQFVSEDSQLVDIHTLIYCTALTISEEFNYKITGYTGHRQRNTNKPPWQIRLEKDIERLRADCGRLTQYINNNRSNKVVKKVEKIFGNTQIHTSHESSNRKPEEYLDTLKQKLALKVHRLKRYKKAQQRKQDNILFHTSEKTFYRNIQHAHTNTSTTNNTTTPTQTQLETFWAGIWEEQIQHNDKAEWITAEKNKWSVIEEMAFDDITQTDIMNITSKLHNWKAPGIDKIHNFWYKKLTALHNPIAKNLTDIILGKQQIPEFIATGITYMLPKTTHCTLPSQYRPITCLPTIYKILTSAITRKINTHIEHNNILAEEQKGCRRGHMGCKEQLIIDSTIHKHATDKNRNLHCTYIDYKKAFDSIPHSWLLQILDIYKVNPTLTNFLRNIMSHWKTSLQLNSQNNTITTRPIFIKKGIYQGDSLSPLWFCLALNPLSNLLHGCRAGYRLKHTTEETTISHLIYMDDIKLYASTEKNMKTLLDNTTQFSKDIKMEFGLDKCKTLHIVRGKIRPGNYEVDGTNIIAAMESTDVYKYLGYKQLKGLDHTNTKHTLTTEYKKRINALCNTQLNGKLLIKSINTYAIPILTYSFGVIKWTKTDIEQIERTTRTTLTKHNHLHPKSAIERLTIKRQNGGRGMIDIHHLWQKQIHNLKSFFHTKSLTSNIHKAIVYNDNNYTPLNLHDHTNTQNQQNNDPQIHKIENWKKKTLHGRHPHDLEQTHIDKEASNKWLKVGSLFPETEGFMIAIQDQIINTRNYRKYIIKDPTINDDKCRRCHTQPETIQHITGACTTLTQTDYTHRHNQVANIIHQNLALEYNLIQNTNTPYYNYSPQTILENTTHKLYYDRAILTDKTIHYNRPDVTLIDKLNKTTYLIDIAVPNTHNIQKTITEKIGKYAELKEEVSRIWRQDKVYVVPIVLSTTGIIPKHLHHSLKLLDLKPTLYITLQKAAILNTCRIVRKFMQIDENNITEHS

SEQ ID NO: 21168 - protein, 1317 aa, Noctua janthe
METRSKKKRIGPLPGGDRRGAPGADAGCLSMRTVSGEELNRRAPTDKDTTAEIIDDGDRLTDRTDTPVEPYSPSTVSYTPSRRSSPSIPSSPTPLSPPIISFNTVSPTPTLNATRGVSTFLPASTKAGKARVRMKWSKEVNTFIMRTYLYITKLETDMTTYRQQMHALFTRQYPDIAVSEQRIADQRRTIVRNKLLSQEVIDQLKEEIRTQLLQEETLNCIDTNNITQNVNEIYHQEQPQLLSQSQLIYSQSQPYNQSQAHTQISHTATQTESITLMLENDIETIAVPYQHLTTDTYIQEINDKFRTTITQYSGMDPAARPRLPKLKYTPNLFRLVNLFNESILTQFISDDTQLIDIHLLIYCTAVVISEELNFKITDHTGTPRTRQNLAPAWQQRLEKDIEKLRVDIGRLTQYINGCRSNKLVKRVEVIFRNNLTHTRHEKNNRKSEEFLDTLKQKLALKVHRLRRYKKAQQRKKDNTTFATNEKMFYRNLHKPQTDTIDINNTNIPNLPTKEQLEEYWASIWEEPVQHNDKASWIAEEEVKWRGVDEMEFLEVAETDIAHITARLHNWKSPGIDKIHNFWYKKLTSLHKSLAKNLTDIILGQQNTPEFIATGITYMLPKTTNSPQPSQYRPITCLPTIYKILTSAITKKISSHIERHNIIAEEQKGCRQGHMGCKEQLIIDSTIHKHATSKNRNLNCTYIDYKKAFDSVPHSWLIQILEIYRINPKIIDFIRNIMLQWKTTLQINYNHNTVTTRQISIKKGIYQGDSLSPLWFCLALNPLSHLLQGCGAGYCLKHTTDETIISHLIYMDDIKLYAKTENDMKKLVDVTAEFSKDINMQFGLEKCKTLHIVRGKVRPGDYVVNDTDTISAMEQTDLYKYLGYAQLKGLDHTRIKNTLSNEYKRRVNAICKTQLSGKHLIKALNTFAIPVLTYSFGVIKWSKTDTEQLERTTRTTLTKHNNLHPKSAIERLTIKRQHGGRGLIDIQHLWRKQISRLKSFFHSKSRTSSIHKAIVINDLNYTPLNLSHQIETLNTNNDDPQQHKIEDWKKKVLHGRHPHDLEQFHINKLASNKWLKIGNLFPETEGFIIAIQDQIINTKNYRKYIIKDPTVTNDKCRKCHSQPETIQHITGACTTLTQTDYTHRHNQVANVIHQKLALKHTLIHNTSTPYYNYKPEATLENTTHKLYFDRAILTDKTIHYNRPDIILQDKINKVTYLIDIAVPNTHNIQKTITEKISKYAELKDEVTRIWRQEKVYVVPIVLSTTGVIPNHLLHSLKLLDLKESIYIILQKAAILNTCRIVRKFMQIEENEIGPHHNT

SEQ ID NO: 21169 - protein, 1317 aa, Noctua janthe
METRSKKKRIGPLAGGDRRGAPGADAGCLSMRTVSGEELNRRAPTDKDTTAEIIDDGDRLTDRTDTPVEPYSPSTVSYTPSRRSSPSIPSSPTPLSPPIISFNTVSPTPTLNATRGVSTFLPASTKAGKARVRMKWSKEVNTFIMRTYLYITKLETDMTTYRQQMHALFTRQYPDIAVSEQRIADQRRTIVRNKLLSQEVIDQLKEEIRTQLLQEETLNCIDTNNITQNVNEIYHQEQPQLLSQSQLIYSQSQPYNQSQAHTQISHTATQTESITLMLENDIETIAVPYQHLTTDTYIQEINDKFRTTITQYSGMDPAARPRLPKLKYTPNLFRLVNLFNESILTQFISDDTQLIDIHLLIYCTAVVISEELNFKITDHTGTPRTRQNLAPAWQQRLEKDIEKLRADIGRLTQYINGCRSNKLVKRVEVIFRNNLTHTRHEKNNRKSEEFLDTLKQKLALKVHRLRRYKKAQQRKKDNTTVATNEKMFYRNLHKPQTDTIDINNTNIPNLPTKEQLEEYWASIWEEPVQHNDKASWIAEEEVKWRGVDEMEFLEVAETDIAHITARLHNWKSPGIDKIHNFWYKKLTSLHKSLAKNLTDIILGQQNTPEFIATGITYMLPKTTNSPQPSQYRPITCLPTIYKILTSAITKKISSHIERHNIIAEEQKGCRQGHMGCKEQLIIDSTIHKHATSKNRNLHCTYIDYKKAFDSVPHSWLIQILEIYRINPKIIDFIRNIMLQWKTTLQINYNHNTVTTRQISIKKGIYQGDSLSPLWFCLALNPLSHLLQGCGAGYCLKHTTDETIISHLIYMDDIKLYAKTENDMKKLVDVTAEFSKDINMQFGLEKCKTLHIVRGKVRPGDYVVNDTDTISAMEQTDLYKYLGYAQLKGLDHTRIKNTLSNEYKRRVNAICKTQLSGKHLIKALNTFAIPVLTYSFGVIKWSKTDTEQLERTTRTTLTKHNNLHPKSAIERLTIKRQHGGRGLIDIQHLWRKQISRLKSFFHSKSRTSSIHKAIVINDLNYTPLNLSHQIETLNTNNDDPQQHKIEDWKKKVLHGRHPHDLEQSHINKLASNKWLKIGNLFPETEGFIIAIQDQIINTKNYRKYIIKDPTVTNDKCRKCHSQPETIQHITGACTTLTQTDYTHRHNQVANVIHQKLALKHTLIHNTSTPYYNYKPEATLENTTHKLYFDRAILTDKTIHYNRPDIILQDKINKVTYLIDIAVPNTHNIQKTITEKISKYAELKDEVTRIWRQEKVYVVPIVLSTTGVIPNHLLHSLKLLDLKESIYIILQKAAILNTCRIVRKFMQIEENEIGPHHNT

SEQ ID NO: 21170 - protein, 1323 aa, Agrochola circellaris
METRSKSKRIGPLPGGDRRGAPGADAGCLSMRTVSGEELNRRAPTDKDATAEIIDDGDRLTDRTNTPVEPYSPSTVSYTPSRPSSPSIPSSPIPPSPPITSLNSISPTPTLNVAREASSFLPASTKAGKARVRMRWSKEVNLFIMRTYFYITKLETDMTTYRQQLHELFTRQYPEITVSEQRISDQRRAIVRNKLLSQQIIEQLKEETRIKLQEAENNAGANAIPLSQNITEIAEQSHIQVEPYTQSQPYNQSQAYSQTSHTSTQTESITLTLENDIETLSGADENLTTDLYIQQIHDKFRTTLAQYSGMDPTVRPKLPKLRYSPNLFRLVNLFNENILNQFISDDTQLIDIHTLIYCTAVVISEELNFKITQHSGNARPKQNIKPAWQQRLEKDIEKLRADCSRLTQYINNNRSSKVVRRVEAIFRSSFTHTRHEDNNRKPEEFLDTLKQKLALKVHRLRRYKKAQQRKNDNAIFATNEKMFYRNLQKPDTDTNNENTSNTDAPDRPTKEQLETYWSSIWEEQEQHNDKATWITEEETKWRAIAEMEFVEITEADITHLTGRLHNWKSPGIDKIHNFWYKKLTSLYKPIAKNLTEIILGQQNIPDFIATGITYMLPKSKNSPQPSQYRPITCLPTIYKILTAAITMKINSHIEHHNIMAEEQKGCRRGHMGCKEQLIIDSTIHKHASTKNRNLHCTYIDYKKAFDSVPHSWLIQILEIYRINSKIIDFLRNIMPLWKTTLQINCNHNNVTTRKISIKKGIYQGDSLSPLWFCLALNPLSHLLQRCRAGYCLKHTTEQTTVSHLIYMDDIKLYAQTEKDMKKLVEATAEFSLDINMRFGLDKCKTLHIIRGKIRPGNYVVNNTDTITAMEPTDLYKYLGYTQLKGLDHVRIKETLTTEYKRRVNAICKTQLSGKNLIKALNTFAIPILTYSFGVIKWTKTDTEQLERTTRTTLTKHNNLHPKSAIERLTIKRQNGGRGLIDIQHLWRKQVCRLKTFFHSKSRTSNIHKAIAQNDFNYTPLNLNEQPDTPQITSDDPQKQKIEDWKKKVLHGRHPHDLEQSHVNTVASNKFLKIGNLFPETEGFIIAIQDQIINTKNYRKFIIKDSSVTNDKCRKCHIQPETIQHITGACTTLTQTDYTHRHNQVANVIHQKLAVKYTLIQDTNTPYYNYTPQTILENDTHKLYYDRAILTDRTIHYNRPDITLQDKLNKVTYLIDIAVPNTHNIQKTISEKISKYAELKDEVIRIWRQQKVYVVPIVLSTTGVIPNHLLHSLKLLNLKESLLYILNNYAGVSQYSLHHDIKPGAARPETLKTITLAMDSEQYY

SEQ ID NO: 21171 - protein, 1314 aa, Noctua pronuba
METRSKRKRIGPLPGGDRRGTPGADAGCLSMRTVGGEELSRRAPTDKNTTAEIIDDGDRLTDRTDTPVEPYSPSTVSYTPSRRSSPSIPSSPSVLSPPIISLNTVTPTPTLNAARGVSTFLPASTKAGKARVRMKWSKEVNLFIMRTYLHITKLETDMTTYRQQLHALFTRQYPEITVSEQRVSDQRRIIVRNKLLSQEVIDQLKEEVRTQLLQEETVNYIDANNITQNLSEISHQEQPQSLSQSQIIYTQSQLYNQTRAYTQISHTSTQTESITFTLENDIETIVVLDQHLTTDTYAQEINDKFRTTITQYSGMDPAARPRLPKLKYTPNLFRLVNLFNESILTHFISDDTQLIDIHLLIYCTAVVISEELKFKITDHTRTRQNVAPAWQQRLENDIEKLRADIGRLTQYINGCRSNKLVKRVEVIFRNNATHTRHEQNNRKPEEFLDTLKQKLALKVHRLKRYKKAQQRKNDNAIFATNEKIFYRNLHIPKNDRNSGNNTNTPNLPSKEQLETYWASIWEEQKQHNDKASWIADEEAKWRDIDGMEFVEVTESDIIHITTRLHNWKAPGIDKIHNFWYKKLTTLHKSLAKNLTDIVLGQQNIPEFITTGITYMLPKTKYTSEPSQYRPITCLPTIYKILTSAVTKKINSHIVHHNIIAEEQKGCRQGHMGCKEQLIIDSTIHKHATSKNRNLHCTYIDYKKAFDSVPHSWLIQILEIYRINPKIIHFLRHVMLQWKTTLQINSNNNNVTTRQIYIKKGIYQGDSLSPLWFCLALNPLSHLLQSCGAGYCLKHSTDETTVSHLIYMDDIKLYAKSEKEMKKLVDITAEFSQDINMQFGLEKCKTLHIVRGKVRPGDYELNESDTIAALEPTDLYKYLGYTQLKGLDHVKIKDTLTTEYKKRVNAVCKTQLSGKHLIKALNTFAIPVLTYSFGVIKWTKTDTEQLQRTTRTTLTKHNNLHPKSAIERLTIKREHGGRGLIDIQHLWRKQVNRLKLFFHTKSRTSNIHKAIVTNDLNYTPLNLSDQIETQNTANDDPQTQKIEDWKKKVLHGRHPHDLEQSHINKLASNKWLKIGNLFPETEGFIIAIQDQIINTKNYRKYIIKDPTVTNDKCRKCHVHPETIQHITGACTTLTQTDYTHRHNQVANVIHQKLALKHTLTQNSNTPYYNYKPETTLENTTHKLYYDRAILTDRTIHYNRPDIILQDKINKVTYLIDIAVPNTHNIQKTITEKISKYAELKEEVTRIWRQEKVYVVPIVLSTTGVIPNHLIHSLKLLDLKETLYITLQKAAILNTCRIVRKFMQIEENEIGPHHNT

SEQ ID NO: 21172 - protein, 1314 aa, Noctua pronuba
METRSKRKRIGPLPGGDRRGTPGADAGCLSMRTVGGEELSRRAPTDKNTTAEIIDDGDRLTDRTDTPVEPYSPSTVSYTPSRRSSPSIPSSPSVSSPPIISFNTVTPTPTLNAARGVSTFLPASTKAGKARVRMKWSKEVNLFIMRTYLHITKLETDMTTYRQQLHALFTRQYPEITVSEQRVSDQRRIIVRNKLLSQEVIDQLKEEVRSQLLQEETVNYIDANNITQNLSEISHQEQPQSLSQSQIIYTQSQPYNQSRAYTQISHTSTQTESITLTLENDIETIVVLDEHLTTDTYIQEINDKFRTTITQYSGMDPAARPRLPKLKYTPHLFRLVNLFNESILTNFISDDTQLIDIHLLIYCTAVVISEELKFKITDHTRTRQNVAPAWQQRLENDIEKLRADIGRLTQYINGCRSNKLVKRVEVIFRNNATHTRHEQNNRKPEEFLDTLKQKLALKVHRLKRYKKAQQRKNDNAIFTTNEKIFYRNLHIPKNDRNSGNNTNTPNLPSKEQLETYWASIWEEQKQHNDKASWIADEEAKWRDIDGMEFVEVTESDIIHITTRLHNWKAPGIDKIHNFWYKKLTTLHKSLAKNLTDIVLGQQNIPEFITTGITYMLPKTKYTSEPSQYRPITCLPTIYKILTSAVTKKINSHIVHHNIIAEEQKGCRQGHMGCKEQLIIDSTINKHATSKNRNLHCTYIDYKKAFDSVPHSWLIQILEIYRINPKIINFLRHVMLQWKTTLQINSNNNNVTTRQISIKKGIYQGDSLSPLWFCLALNPLSHLLQSCGAGYCLKHSTDETTISHLIYMDDIKLYAKSEKEMKKLVDITAEFSQDINMQFGLEKCKTLHIVRGKVRPGDYELNESDTIAALEPTDLYKYLGYTQIKGLDHVKIKDTLTTEYKKRVNAVCKTQLSGKHLIKALNTFAIPVLTYSFGVIKWTKTDTEQLQRTTRTTLTKHNNLHPKSAIERLTIKREHGGRGLIDIQHLWRKQVSRLKLFFHTKSRTSNIHKAIVINDLNYTPLNLSDQIETQNTTNDDPQTQKIEDWKKKVLHGRHPHDLEQSHINKLASNKWLKIGNLFPETEGFIIAIQDQIINTKNYRKYIIKDPTVTNDKCRKCHVHPETIQHITGACTTLTQTDYTHRHNQVANVIHQKLALKHTLTQNSNTPYYNYKPETTLENTTHKLYYDRAILTDRTIHYNRPDIILQDKINKVTYLIDIAVPNTHNIQKTITEKISKYAELKEEVTRIWRQEKVYIVPIVLSTTGVIPNHLIHSLKLLDLKETLYITLQKAAILNTCRIVRKFMQIEENEIGPHHNT

SEQ ID NO: 21173 - protein, 1317 aa, Xestia xanthographa
METRSKSKRIGPLPGGDRRGAPGADARCHSMRSVSGEELNRRAPTDKDTTAEIIDDGDRLTDRTDTPVEPYSPSTVSYTPSRRSSPSIPSSPTLTSPPILSLNTFSPTPTLNAARGVSTFFPASTKGGKTRVRMKWSKEVNLFIMRTYLYITKLETDMTTYRQQLHALFTRQYPDITVSEQRISDQRRTIVRNKLLSHEVIDQLKEEVRTQLLQEETLNSTDTNNTTQNVNEIGHQEQPQLFSQSQLISTQSQPNNQSQPSTQMSHTSTQTESITLTLENDIETIVVPDQHLTTDTYIQEIHDKFRTTITQYSGMDPAARPRLPKLKYTPNLFRLVNLFNESILTQFISDDTQLIDIHLLIYCTAVVISEELNFKITEHTGTPRARQNLTPAWQQRLEKDIEKLRADIGRLTQYIHGCRSNKLVKRVGAIFKNNLTHTRHEKNNRKPEEFLDTLKQKLALKVHRLRRYKKAQQRKKDNATFATNEKKFYRNLHNPQTDTIDENNTNTPNLPTKEQLEEYWASIWEDPVQHNDKASWIAEEEVKWRAVDEMEFVEVAETDITHITAKLHNWKSPGIDKIHNFWYKKLTSLHKSLAKNLTDIILRQQNTPEFIATGITYMLPKTKNSPEPSQYRPITCLPTIYKILTSAITRKISSHIEQHNIIAEEQKGCRQGHMGCKEQLIIDSTIHKHATSKNRNLHCTYIDYKKAFDSVPHSWLIQILEIYRINPKIIDFIRHIMLQWKTTLQINYNHNAVTTRQISIKKGIYQGDSLSPLWFCLALNPLSQLLHGCGAGYCLKHTTDETTISHLIYMDDIKLYAKTENDMKKLVDVTAEFSKDINMQFGLEKCKTLHIVRGKVRPGDYVVNDTDTISAMEQTDLYKYLGYAQLKGLDHTRIKNSLTSEYKRRVNAVCRTQLSGKHLIKALNTFAIPVLTYSFGIIKWSKTDTEQLERTTRTTLTKHNNLHPKSAVERLTIKRQHGGRGLIDIQHLWRKQIIRLKSFFHSKSRTSNIHKAIVVNDLNYTPLNLSHQTETLNTTNDDPQQHKMEDWKKKVLHGRHPHDLEQTHINKLASNKWLKIGNIFPETEGFIIAIQDQIINTKNYRKYIIKDPTVTNDKCRKCHSQPETIQHITGACTTLTQTDYTHRHNQVANVIHQKLALKHTLIQNTSTPYYNYKPEATLENTTHKLYYDRAILTDKTIHYNRPDIILQDKINKVTYLIDIAVPNTHNIQKTITDKISKYAELKDEVTRIWRQEKVYVVPIVLSTTGVIPNHLLHSLKLLDLKESIYITLQKAAILNTCRIVRKFMQIEENEIVPHHNI

SEQ ID NO: 21174 - protein, 1319 aa, Mesoligia furuncula
METRSKSKRIGPLPGGDRRGAPGADAGCISMRTVSGEELNRRAPTDKDTTAEIIDDGDRLTDRTNTPVEPYSPSTVSYTPSRPSSTSIPSSPTLLSPPITSLNLIPPTPTLNVAREVSSFLPASTKAGKARVRMRWSKEVNQFIMRTYFYITKLETDMTTYRQQLHELFTRQYPEITVSEQRISDQRRAIVRNKLLSREIIEQIKEETRIQLQEAENNTDGNAIPLSQNTNEIAEQSHPQPCSQVQSYTQSQSYNQSQAYTQTSHTSTQTESINLTLENDIETLTFADQNLTTDIYIQEIHDKFRTTLAQYSGMDPAVRPKLPKLRYSPCLFQLVNLFNENILTQFISDDTQLIDIHTLIYCTAVVVSEELNFKITQHTGNTRSKQNIKPAWQQRLEKDIEKLRADCGRLTQYINNIRSIKVIRRVEAIFRSSVTHTRHENNNRKPEEFLDTLKQKLALKVHRLRRYKKAQQRKNDNVIFATNEKMFYRNLHKPKTNTNDDNNTVAPDQPTKEQLETYWSSIWEEQEQHNDKATWITEEEIKWRAIEEMEFVEITEADITHLTGRLHNWKSPGIDKIHNFWYKKLTSLHKPIAKNLTEIILGRQNIPDFIATGITYMLPKTINSPQPSQYRPITCLPTIYKILTSAITTKINSHIEHHNIMAEEQKGCRQGHMGCKEQLIIDSTIHKHATTKNKNLHCTYIDYKKAFDSVPHSWLIKTLEIYRINSKIIDFLRNIMPLWKTTLQINSNHNNVTTRQISIKKGIYQGDSLSPLWFCLALNPLSHLLQRCQVGYCLKHTAEQTTVSHLIYMDDIKLYAQTEKDMKKLVEVTAEFSLDINMQFGLDKCKTLHIIRGKIRPGDYVVNNTDTITAMEPTDLYKYLGYTQLKGLDHVRIKETLTAEYKRRLNTICKTQLSSKNLIKALNTFAVPILTYSFGVIKWTKTDTEQLERTTRTTLTKHNNLHPKSATERLTIKRQHGGRGLIDIQHLWQKQVFRLKTFFHSKSRTSNIHKAIVQNDFNYTPLNLSEQLDTPQITSDDPQIQKIENWKKKVLHGRHPHDLEQSHVNKVASNKFLKIGNLFPETEGFIIAIQDQIINTKNYRKFIIKDPSVTNDKCRKCHSQPETIQHITGACTTLTQTDYTHRHNQVANIIHQKLGLKYTLIQNTNTSYYNYTPQTILENDTHKLYYDRAILTDRTIHYNRPDITLQDKINKVTYFIDIAVPNTHNIQKTISEKISKYTELKDEVTRIWRQQKVYVVPIVLSTTGVIPNYLLHSLKLLNLKETLYITLQKAAILNTCRIVRKFMQIDENEIGPHHNTSLT

SEQ ID NO: 21175 - protein, 1317 aa, Parnassius apollo
METRSKSKRIGPLPGGDRRGAPGADAGCHSMRSVSGEELNRRAPTHKDTTAELIDDGDRLTDRTDTPVEPYSPSTVSYTPSRPTSPSIPSSPTPPSPPITSLNTVPPTPTLSAAREVSTFLPASTKAGKARVRMKWSKEVNLFIMRTYLYITKLETDMTTYRQQLHAHFTRQYPEITVSEQRISDQRRTIVRNKLLSQEVINQLKEEVRTQLIQEEVTNSYVETNITQNTSENDRQVQPQLLSQSQLIHTQSQPCDHSQICTQISHTSTQTETVILTLENDIETIVVPDQHLTTDTYIQEINEKFSTTITLYSGMDPAARPRLPKLKYTPNLFRLVNLFNETILTQHISDDTQLIDIHLLIYCTAVVISEELNFKITDNARTTRTRQNTEPAWQQRLEKDIEKLRANIGRLTQYINGCRSNKLVKKVEVIFRNNATHTRHEKSNTRPEEYLDTLKQKLALKVHRLKRYKKAQQRKKDNVTFATNEKLFYRNLHKPQTDTIDERNTHTPNLPTKEQLEAYWASIWEEQKQHNDKASWIIEEEAKWRDIDEMEFEEVTELDITLITARLHNWKSPGIDKIHNFWYKKLTSLHKPLARSLTDIITGQQNTPEFIATGITYMLPKTKNSPQPSQYRPITCLPTIYKILTSAITKKIQSHIEHHNIIAEEQKGCRQGHMGCKEQLIIDSTIHKHATSKNRNLHCTYIDYKKAFDSVPHSWLLKILEIYRINPKIIDFLRRIMLQWKTTLQINCNQNNVTTRQISITKGIYQGDSLSPLWFCLALNPLSHLLQSCGAGYCLKLNTDETTISHLIYMDDIKLYAKTDKDMKKLIDITTEFSSDINMHFGLDKCKTLHIVRGKVRPGDYVVNETEAITAMESTDLYKYLGYVQLKSLDHIRIKNSLTMEYKRRLNAVCKTQLSSKHLIKAINTYAIPILTYSFGVIKWSKTDAEQLERTTRTTLTKHNNLHPKSAIERLTIKREHGGRGLIDIQHLWRKQVSRLKSFFYTKSHTSNIHKAIVTNDINYTPLNLSNQIESQNITSDNPQTHKIDEWKKKVLHGRHPHDLEQSHINKLASNKWLKIGNLFPETEGFIIAIQDQIINTKNYRKYIIKDPTVNNDKCRKCHTHPETIQHITGACTTLTQTDYTHRHNQVANVIHQKLALKHALIQDANTPYYNYTPKPTLENTTHKLFYDRGILTDRTIHYNRPDIILQDKINNITYLIDIAVPNTHNLQKTITEKISKYAELKDEVTRIWQQEKVYVVPIVLSTTGVIPNHLLRSLKLLQLKETLYITLQKAAILNTCRIVRKFMQIEENEIGPHQIT

SEQ ID NO: 21176 - protein, 1316 aa, Mythimna ferrago
METRSKRKRLGPLPGGDRRGAPGADAGCHSMRTVSGEELSRRAPTDKDTTAEVIDDGDRLTDRTNTPVEPYSPSTDSYVPSRSSSPSMPSSPIISHSPHPIASLNTIPPTPTLNVTQEASSFLPASTRAGKTRVRMRWSKEVNLFIMRTYFYITKLETDMTTYRQQLHERFTRQYPEITVSEQRIADQRRAIVRNKLLSLEIIEQLKEETRLQLQESEGNTNTTTLSQNITEIDRHPQTQLHTQLQTSSSLLYNQSQDYTQISHTSTQTESLTLMLENDVETLVVPEQNLATELYIQEINDKFRTTLTLYSGMDPGVRPKLPKLRHSRDLFRLVNLFNENILNQFISDDTQLIDIHTLIYCTAVVICEELKFKISQDTGNLRPKQNVKPAWQHRLEKDIDKLRADCSRLTQYINNNRSSKVVRRVEAIFRSSFTHTRHENNNRKPEEYLDTLKQKLSLKVHRLKRYKKAQQRKVDNTTFSSNEKMFYRNLRKSDTNTSTENNSDIIDLPTKKQLEAYWSSIWEERVQHNDKAAWIAEEETKWRAIEEMDFLEITESDVSHVTGRLHNWKAPGIDKIHNFWYKKLTSLYKPIAKNLTEIILGQQNIPEFIATGITYMLPKTKTSPQPSLYRPITCLPTIYKILTSLITTKINSHIERHNIMAEEQKGCRRGHMGCKEQLIIDSTIHKHASTKNRNLHCTYIDYKKAFDSVPHSWLIQILQIYKINSKIIDFLRNIMSQWKTTLQINHGNNRVLTRQIYIKKGIYQGDSLSPLWFCLALNPLSHLLQRSRAGYCFKHSTDQTTISHLIYMDDIKLYAQTEKDMRKLVEATAEFSQDINMQFGLDKCKTLHIIRGRIRPGSYEVNYTDTITAMESNDLYKYLGYMQLKGLDHVRIKDTLTTEYKKRLNTLCKTQLSGKHLIKAINTFAIPILTYSFGVIKWTKTDTEQLERITRTTLTKNNHLHPKSAIERLTIKRQNGGRGLIDVQHMWRKQVFKLKSFFETKSRTSKIHKAVVLHDSNYTPLNLNAHLDTQNITNDNPQTQKMEDWKRKVLHGRHPHDLEQSHVNKIASNKWLKVGSLFPETEGFMIAIQDQIINTRNYRKYIIKDPSITDDKCRKCHLQPETIQHITGACTTLTQTDYTHRHNQVANVIHQSLAVKYKLIQNTNTPYYNYTPQTVLENDTHKLYYDRAILTDRTIHYNRPDITLQDKINKITYLIDIAIPNTHNIKKTITEKISKYAELKDEVTRIWRQEKVYIVPIVLSTTGVIPNCLLHSLKLINLTETLYITLQKAAILNTCRIVRKFMQIDENALGPHHNTS

SEQ ID NO: 21177 - protein, 1317 aa, Agrochola circellaris
METRSKSKRIGPLPGGDRRGAPGADAGCLSMRTVSGEELNRRAPTDKDATAEIIDDGDRLTDRTNTPVEPYSPSTVSYTPSRPSSPSIPSSPIPPSPPITSLNSISPTPTLNVAREASSFLPASTKAGKARVRMRWSKEVNLFIMRTYFYITKLETDMTTYRQQLHELFTRQYPEITVSEQRISDQRRAIVRNKLLSQQIIEQLKEETRIKLQEAENNAGANAIPLSQNITEIAEQSHIQVEPYTQSQPYNQSQAYTQTSHTSTQTESITLTLENDIETLSGADENLTTDLYIQQIHDKFRTTLAQYSGMDPTVRPKLPKLRYSPNLFRLVNLFNENILNQFISDDTQLIDIHTLIYCTAVVISEELNFKITQHSGNARPKQNIKPAWQQRLEKDIEKLRADCSRLTQYINNNRSSKVVRRVEAIFRSSFTHTRHEDNNRKPEEFLDTLKQKLALKVHRLRRYKKAQQRKNDNAIFATNEKMFYRNLHKPDTDTNNENTSNTDAPDRPTKEQLETYWSSIWEEQEQHNDKATWITEEETKWRAIAEMEFVEITEADITHLTGRLHNWKSPGIDKIHNFWYKKLTSLYKPIAKNLTEIILGQQNIPDFIATGITYMLPKSKNSPQPSQYRPITCLPTIYKILTSAITMKINSHIEHHNIMAEEQKGCRRGHMGCKEQLIIDSTIHKHASTKNRNLHCTYIDYKKAFDSVPHSWLIQILEIYRINSKIIDFLRNIMPLWKTTLQINCNHNNVTTRKISIKKGIYQGDSLSPLWFCLALNPLSHLLQRCRAGYCLKHTTEQTIVSHLIYMDDIKLYAQTEKDMKKLVEATAEFSLDINMRFGLDKCKTLHIIRGKIRPGNYVVNNTDTITAMEPTDLYKYLGYTQLKGLDHVRIKETLTTEYKRRVNAICKTQLSGKNLIKALNTFAIPILTYSFGVIKWTKTDTEQLERTTRTTLTKHNNLHPKSAIERLTIKRQNGGRGLIDIQHLWRKQVCRLKTFFHSKSRTSNIHKAIAQNDFNYTPLNLNEQPDTPQITSDDPQKQKIEDWKKKVLHGRHPHDLEQSHVNTVASNKFLKIGNLFPETEGFIIAIQDQIINTKNYRKFIIKDPSVTNDKCRKCHIQPETIQHITGACTTLTQTDYTHRHNQVANVIHQKLAVKYTLIQDTNTPYYNYTPQTILENDTHKLYYDRAILTDRTIHYNRPDITLQDKLNKVTYLIDIAVPNTHNIQKTISEKISKYAELKDEVIRIWRQQKVYVVPIVLSTTGVIPNHLLHSLKLLNLKESLYITLQKAAILNTCRIVRKFMQIDENEIGSHHNTFST

SEQ ID NO: 21178 - protein, 1316 aa, Ochropleura plecta
METRSKNKRIGPLPGGDRRGAPGADAGCHSMRTVSGEELNRRAPTDKDTTAEIIDDGDRLTDRTDTPVEPYSPSTVSYTPSRPSSPSISSSPTLPTHPIITLNTVSPTPTLNAARGVSTFLPASTKAGKARIRMRWSKEVNLFIMRTYFYITKLETDMTTYRKQLHELFTQQYPEITVSEQRISDQRRAIVRNKLLSQALIDQLKEEIRVQLQSDDNTSPLLEGLTDIAQQPQTQLNTQLQPNIQSQLYNQSQANTQTSHTSTQTEYITFTLENDIETLVVENHNPTTDTYIQEIHDKFRTTLSQYSGMDPAIRPKLPKLRYSPNLFRLVNLFNENILNQFISDETQLIDIHTLIYCTAVVISEELNFKITQNTGNPRPKQNIKPAWQQRLEKDIEQLRADIGRLTQYINNNRSSKVVRRVEAIFRTHLVHTRHENNNRKPEEFLDTIKQKLALKVHRLRRYKKAQQRKNDNAIFATNEKIFYRNLNKPNTDTHYDTNTDTPTQPTKEQLETYWASIWEQQARHNDEAAWITEEETKWKAIDEMEFVEVTEADITHITGRLHNWKSPGIDKVHNFWFQKLTSLYKPIARNLTQIILGQQNAPEFMATGITYMLPKTKNSPEPSQYRPITCLPTIYKILTSAITTKINTHIEQHNIMAEEQKGCRRGHMGCKEQLIIDSTIHKHATTKNRNLHCTYIDYKKAFDSVPHSWLIQILKIYRINAKIIDFLSNIMSQWKTTLQINCNQNSIITRQILIKKGIYQGDSLSPLWFCLALNPLSHLLQRCQAGYRLKHTTEQTTISHLIYMDDIKLYAQTEKDMKKLVEVTADFSQDINMQFGLDKCKTLHIIRGKIRPGNYVVNNTDTITAMEPTDLYKYLGYTQLKGLDHVRIKETLTAEYKRRLNVVCKTQLSGKNLIKALNTFAIPILTYSFGVIKWTKTDTEQLERTTRTTLTKHNNLHPKSAIERLTIKRQNGGRGLIDIQHLWRKQVIGLRTFFHTKSQTSNIHKAIAQNDHNYTPLNLNEQLDTSHNTNEDPQTQKIEDWKKKVLHGRHPYDLEQTHVNKVASNKWLKIGNLFPETEGFIIAIQDQIINTKNYRKFIIKDPSVTNDKCRKCHTQPETIQHITGACTTLTQTDYTHRHNQVANVIHQRLAVQYTLIQDTNTPYYNYTPQATLENDTHKLYYDRAILTDRTIHYNRPDIILQDKINKITYLIDIAVPNTHNIQKTITEKISKYAELKEEVTRIWRQEKVYVVPIVLSTTGVIPNHLLHSLKLLSLKETLYITLQKAAILNTCRIVRKFMQIEENEIGPHHNTPHTST

SEQ ID NO: 21179 - protein, 1284 aa, Mythimna impura
MRTVSGEELSRRAPTDKDTTAEIIDDGDILTDRTNTPVEPYSPSTNSYIPSRSSPQSMPSSPILSHSSHPITSLNTIPSTPTLNVAQEASSFLPASTRAGKARVRMRWSKEVNIFIMRTYLYITKLETDMTTYRQQLHERFTRQYPEITVSEQRIADQRRAIVRNKLLSQEIIEQLKEETRLQLQESEGNTGTTTLSQNIIEIDQHPQTQLHTQLQNSRSQLYNQSQDYTQTSHTSTQTESLTLMLENDVETLVVSEQNFATELYIQEINDKFRTTLTLYSGMDPAVRPKLPKLRYSRDLFRLVNLFNENILNQFISDDTQLIDIHTLIYCTAVVICEELKFKISQDTGNLRPKKNVKPAWQQRLEKDIDKLRADCSRLTQYINNNRSSKVVRRVEAIFRSSFTHTRHENNNRKPEEYLDTLKQKLSLKVHRLKRYKKAQQRKIDNTIFSTNEKMFYRNLRKPDTNTNAENNSDQPTKEQLEAYWSSIWEEQVQHNDKAAWIVEEETKWGAIEEMDFIEITESDVTHVTGRLHNWKAPGIDKIHNFWYKKLTSLHKPIAKNLTEIILGQQNIPEFIATGITYMLPKTKNSPQPSLYRPITCLPTIYKILTSLITTKINSHIERHNIMAEEQKGCRRGHMGCKEQLIIDSTIHKHASTKNRNLHCTYIDYKKAFDSVPHSWLIQILQIYKINSKIIDFLRNIMLQWKTTLQLNHDHDRVITRQIYIKKGIYQGDSLSPLWFCLALNPLSHLLQRSRAGYCLKHSTDQTTISHLIYMDDIKLYAQTEKDMRNLVEATAEFSQDINMQFGLDKCKTLHIIRGRIRPGSYGVNDTDTITAMESNDLYKYLGYMQLKGLDHVRIKEALTTEYKKRLNTLCKTQLSGKHLIKAINTFAIPILTYSFGVIKWTKTDTEQLERITRTTLTKNNHLHPKSAIERLTIKRQNGERGLIDVQHMWRKQVVKLKTFFETKSRTSKIHKAVVLHDSNYTPLNLNAQLDTQNIINDNPQTQKMEDWKRKVLHGRHPHDLEQSHVNIIASNKWLKVGSLFPETEGFMIAIQDQIINTRNHRKYIIKDLSVRDDKCRKCHIQPETIQHITGACTTLTQTDYTHRHNQVANVIHQNLAVKYTLIQNTNTPYYNYTPQTVLENDTHKLYYDRAILTDRTIHYNRPDITLQDKINKITYLIDIAIPNTHNIKKTITEKISKYAELKDEVTRICQEKVYVVPIVLSTTGVIPNCLLHSLKLLNLKEALYITLQKAVILNTCRIVRKFMQIDENELGPHHNTPST

SEQ ID NO: 21180 - protein, 1054 aa, Xestia xanthographa
MSHTSTQTESITLTLENDIETIVVPDQHLTTDTYIQEIHDKFRTTITQYSGMDPAARPRLPKLKYTPNLFRLVNLFNESILTQFISDDTQLIDIHLLIYCTAVVISEELNFKITEHTGTPRARQNLTPAWQQRLEKDIEKLRADIGRLTQYIHGCRSNKLVKRVGAIFKNNLTHTRHEKNNRKPEEFLDTLKQKLALKVHRLRRYKKAQQRKKDNATFATNEKKFYRNLHNPQTDTIDENNTNTPNLPTKEQLEEYWASIWEDPVQHNDKASWIAEEEVKWRAVDEMEFVEVAETDITHITAKLHNWKSPGIDKIHNFWYKKLTSLHKSLAKNLTDIILRQQNTPEFIATGITYMLPKTKNSPEPSQYRPITCLPTIYKILTSAITRKISSHIEQHNIIAEEQKGCRQGHMGCKEQLIIDSTIHKHATSKNRNLHCTYIDYKKAFDSVPHSWLIQILEIYRINPKIIDFIRHIMLQWKTTLQINYNHNAVTTRQISIKKGIYQGDSLSPLWFCLALNPLSHLLQGCGAGYCLKHTTDETTISHLIYMDDIKLYAKTENDMKKLVDVTAEFSKDINMQFGLEKCKTLHIVRGKVRPGDYVVNDTDTISAMEQTDLYKYLGYAQLKGLDHTRIKNSLTSEYKRRVNAVCRTQLSGKHLIKALNTFAIPVLTYSFGIIKWSKTDTEQLERTTRTTLIKHNNLHPKSAVERLTIKRQHGGRGLIDIQHLWRKQIIRLKSFFHSKSRTSNIHKAIVVNDLNYTPLNLSHQTETLNTTNDDPQQHKMEDWKKKVLHGRHPHDLEQTHINKLASNKWLKIGNIFPETEGFIIAIQDQIINTKNYRKYIIKDPTVTNDKCRKCHSQPETIQHITGACTTLTQTDYTHRHNQVANVIHQKLALKHTLIQNTSTPYYNYKPEATLENTTHKLYYDRAILTDKTIHYNRPDIILQDKINKVTYLIDIAVPNTHNIQKTITDKISKYAELKDEVTRIWRQEKVYVVPIVLSTTGVIPNHLLHSLKLLDLKESIYITLQKAAILNTCRIVRKFMQIEENEIVPHHNI

SEQ ID NO: 21181 - protein, 1043 aa, Mesoligia furuncula
MLENEIETLADININQSTDTHIQEIHDKFKTALTQYSGMDPAARPRLPKLRYTPKLSQLVNLFNQNILQQYISEETHLIDIHTLIYCTALVISEELNFKITEYTGNQRQRNINKPAWQQRLEKDIEKLRADCGRLTQYINNNRSNKVVKRVDAIFKNMANHTRHENDNRKPEEFLDTLKQKLALKVHRLRRYKKAQERKHDNSLFATNEKNFYRNLQTAQTDTNTLTTENNIELPTAEQLETFWSGIWEEQVQHNNNSDWITDEETKWSSLEEMEFVELTESDITCVTARLHNWKSPGIDKIHNYWYKKLESLHKVLAKNLTQIILGKQNIPEFIATGITYMLPKAQYSPQPSQYRPITCLPTIYKILTSAITIKINKHIENHNIIAEEQKGCRRGHMGCKEQLVIDSIIHKHANTKHRNLHCTYIDYKKAFDSIPHSWLIQILQIYKINSKIIDFLQDIMARWRTTLQLNYRNNAITTRQISIKKGIYQGDSLSPLWFCLALNPLSDLLHRSQAGYAIKHTTEETIISHLIYMDDIKLYSKSEKEMKKLIDITTEFSKDINMQFGLDKCKTVHIIRGKIKPGDYPINNTDTITAMEPTDLYKYLGYRQLKGIDHSTIKYTLNSEYKRRVVAVCKTQLSGKHLIKALNTYAIPILTYSFGVIKWSKTDIQQIERTTRTVLTKHNNLHPKSAIERLTIKRQCGGRGLIDVHRLWQKQIAKLRTFFHSKSHTSNIHKAVVMNDISYTPLNLHDQIDIQTNSNEDPHKQKIEDWKKKVLHGRHPHDLEQSHIDTIASNKWLKIGNLFPETEGFIIAIQDQIINTKNYRKFIIKDPTITNDKCRKCHSQPETIQHITGACTTLTQTDYTHRHNQVANVIHQKLALKYKLIQDTNTPYYKYVPQTVLESTTHKLYYDRAILTDRTVHYNRPDITLQDKVNKVTYLIDIAVPNTHNLQKTISEKISKYADLKEEVSRIWRQEKVYVVPIVVSTTGVIPNHLHQSLKQIDLNDSIYITLQKAAILNTCRIVRKFMLIDENEITPHNINSS

SEQ ID NO: 21182 - protein, 1175 aa, Hyles vespertilio
MSWSKDVNLFIMRTYYYITKLETDMTIYRKQLHEHFSRQYPDIKVTEQRLSDQKRAIERNKLLSQDILDQLKEEVRRQLNVETDSSENTIPGLANTSPCDLPRNNQSQPLTQNTQIFNRESETINQSYNLITQTSHISTQTDGIILTVENDIDCLPEPNIITEKHIQELQNKIITTLTLYSGLDPASRPKLPKLKYNPKLNSLIQTFNQKILNNFISDSTKLIDIHTLIYCSALVIAEELGYKIIELTDNQTRPKHNNKPSWQYRLEKDIEKLRADCGRLTQYINNNRSKKVIKRVEEIFKHHKTHTRHENNNSKPEEFLDTLKQKLALKAQRLKRYKKSQNRIKDNILFTTNEKLFYRSIRNPHLDISNETPENPPTTEEVEHFWASVWEDQAQHNEKADWIKAEENRWSTIEEMEFIEITEADIKITTTRLHNWKSPGIDKIHNFWFKKFTTLHKAIAKNFTDIILRKQNIPQFIATGITYLLPKDKISSQPSQYRPITCLPIIYKILTSVITSKITTHIENHNIIAEEQKGCRRGHMGCKEQLVIDSVIHKHANTKNRNLHCTYIDYKKAFDSIPHSWLIHILKIYKINNNIIGFLQDIMPYWKTTLYLNSRNSTLMTRQINIKKGIYQGDSLSPLWFCLALNPLSHILHNCRAGYHLKHASGETTVSHLIYMDDLKLYAKSEKDMKKLIEATSDFSRDIDMHFGLDKCKTIHIVRGKIRPGDYTVNNSDTITAMEPNDLYKYLGYKQLKGIDHGTIKNSLSAEYKRRINAICKTQLSGKHLIKALNTYAIPILTYSFGIIKWSKTNIETIERTTRTTLTKHNLLHPKSAIERLTIKRQEGGRGLIDIHHLWKKQLNNLKTFFHAKSSTSNIHNAIIQNDNNFTPLNLQEENRLESADNMDSQKKKTEDWKKKVLHGRHPHDIEQTHIDTTASNKWLKIGNLFPETEGFIIAIQDQVINTKNYRKYIIKDPTITNDKCRRCHSQPETIQHITGACTSLTQTDYTHRHNQIASIIHQKLALKYKLIHNSKTPYYKYKPETVIENPSYKLYFDRAILTDRTIHFNRPDITLQDKRNKTTYLIDIAVPNTHNIQKTIAEKNNKYSYLKDEITRIWRQDKVYIVPIVLSTTGVIPKHLHHSLKLLNLNESLYITLQKASILNTCRIVRKFLQLDET

SEQ ID NO: 21183 - protein, 842 aa, Arctia plantaginis
MLFTLNEKSFYRNLSKPQTATTRPENIDIPTQTQLETFWSGIWEEPVQHNDKADWITEEENKWNSIEEMEFDCITEDDIAHVTGKLHNWKSPGIDKIHNYWYKKITSFHKPIAKNLTYIILGKQNIPEFIGMGITYMLPKTAHSPQPSQYRPITCLPTIYKILTSAIAHKINMHIEHNHRIAEEQKGCRRGHMGCKEQLIIDSTIHKHATTKNRNLHCTYIDYKKAFDSIPHSWLIKILHIYKINPKITDFMRDIMSHWKTTLHLNMNDRTVTTRQISIKKGIYQGDSLSPLWFCLALNPLSHLLQRCQAGYRLRNSTEETIISHLIYMDDIKLYAKSDKEMTKLLQNTTKFSKDINMEFGLDKCKTLHIIRGKIRPGDYAVDESSTIAAMESTDLYKYLGYKQLKGLDHTSIKQILATEYKSRTNTLCKTQLSAKNLIKALNTYAIPILTYSFGIIKWTKTDIEQIERTTRTTLTKHNNLHPKSAIERLTIKRENGGRGLIDIYHLWQKQVYNLKTFFRTKSHTSNIHKAITLNDYNFTPLNLNDHTGIHNPNNIDPQADKIENWKKKVLHGRHPHDLEQPHIDTIASNSWLKIGNLFPETEGFIIAIQDQIVNTKNYRKYIIKDATVTDDKCRKCHIQSETIQHITGACITLTQTDYTHRHNQITSIIHQKLALKHHLIQNTNTPYYNYTPQSVLESSSHKLYYDRAILTDRTIHYNRPDITLQDKINKTTYLIDIAVPNTHNLQKTITEKISKYTELKEEIIRIWRQEKVYIVPIVVSTTGVIPKHLHHSLKLINLNESVYFNLQKAAILNTCRTVRKFMDIEENGTAQHTQQPPSTST

SEQ ID NO: 21184 - protein, 834 aa, Mythimna ferrago
MFYRNLRKSDTNTSTENSSDTIDIPTKEQLEAYWSSIWEERVQHNDEATWIAEEETKWRAIEEMDFLEITESDVTHVTGRLHNWKAPGIDKIHNFWYKKLTSLYKPIAKNLTEIILGQQNIPEFITTGITYMLPKNKTSPQPSLYRPITCLPTIYKILTSLITIKINSHIERHNIMAEEQKGCRRGHMGCKEQLIIDSTIHKHASTKNRNLHCTYIDYKKAFDSVPHSWLIQILQIYKINSKIIDFLRNIMSQWKTTLQINHDNNRVITRQIYIKKGIYQGDSLSPLWFCLALNPLSRLLQRSRAGYCFKHSTNQTTISHLIYMDDIKLYAQTEKDMKKLVEATAEFSQDINMQFGLDKCKTLHIIRGRIRPGSYVVNDTDTITAMESNDLYKYLGYMQLKGLDHVRIKDTLTTEYKKRLNTLCKTQLSGKHLIKAINTFAIPILTYSFGVIKWTKTDTEQLERITRTTLTKNNHLHPKSAIERLTIKRQNGGRGLIDVQHMWRKQVFKLKSFFETKSRTSKIHKAVVLHDSNYTPLNLNARLDTQNINNDNPQTQKMEDWKRKVLHGRHPHDLEQSHVNKIASNKWLVVGSLFPETEGFMIAIQDQIINTRNHRKYIIKDPSVTDDKCRKCHLQPETIQHITGACTTLTQTDYTHRHNQVANVIHQSLAVKYTLIQNTNTPYYNYTPQTVLENDTHKLYYDRAILTDRTIHYNRPDITLQDKINKITYLIDIAIPNTHNIKKTITEKISKYAELKDEVTRIWRQEKVYVVPIVLSTTGVIPNCLLHSLKLINLKESLYITLQKAAILNTCRIVRKFMQIDENALGPPHNTPLT

SEQ ID NO: 21185 - protein, 1319 aa, Hydraecia micacea
METRSKSKRIGPLPGGDRRGAPGADAGCLSMRTVSGEELNRRAPTDKDTTAEIIDDGDRLTDRTNTPVEPYSPSTVSYTPSRPSSPSILSSPTLSSPPITSLNSIPPTPALSVAREVSSFLPASTKAGKARVRMRWSKEVNLFIMRTYFYITKLETDMTTYRQQLHELFTRQYPEITVSEQRISDQRRAIVRNKLLSQEIIEQLKEETRIQLQEAENNTSADAIPLSQNTTETAEQSHSQPHIQVTPYTQSQLYNQSQVFTQTSHTSTQTESIILTLENDIETLTVADQNLTADICIQEIVDKFRTSLAQYSGMDPAVRLKLPKLRYSPNLFRLVNLFNENILHQFISDDTQLLDIHTLIYCTAVVVSEELNFKITQHTGNTRPKQNIKPAWQQRLEKDIEKLRADCGRLTQYINNVRSSKVVKRVEAIFRSSVTHTRHENNNRKPEEFLDTLKQKLALKVHRLRRYKKAQQRKNDNAIFAANEKMFYRNLHKPNTDTNDVNDTVAPDQPTKEQLETYWSSIWEEQEQHNDKATWITEEETKWRAIQEMEFIEITEIDITHLTGRLHNWKSPGIDKIHNFWYKKLTSLHKPIAKNLTEIILGRQNILDFIATGITYMLPKTINSPQPSQYRPITCLPTIYKILTSAITTKINSHIEHHNIMAEEQKGCRRGHMGCKEQLIIDSTIHKHATTKNRNLHCTYIDYKKAFDSVPHSWLIKILEIYRINSKIIDFLRNIMPLWKTTLQINSNDNNVTTRQISIKKGIYQGDSLSPLWFCLALNPLSHLLQRCQAGYCLKHTADQTSVSHLIYMDDIKLYAQTEKDMKKLVEATAEFSLDINMQFGLDKCKTLHIIRGKIRPGDYVVNNTDTITAMEPTDLYKYLGYTQLKGLDHVRIKETLTAEYKRRLNTICKTQLSSKNLIKALNTFAIPILTYSFGVIKWTKTDTEQLERTTRTTLTKHNNLHPKSATERLTIKRQHGGRGLIDIQHLWRKQVCRLKTFFHSKSRTSNIHKAIVLNDFNYTPLNLNEQLDTPPIISDDPQIQKIEDWKKKVLHGRHPHDLEQSHVNKVASNKFLKIGNLFPETEGFIIAIQDQIINTKNYRKFIIKDPSVTNDKCRKCHSQPETIQHITGACATLTQTDYTHRHNQVANVIHQKLALKYTLIQNTNTPYYNYTPQTILENETHKLYYDRAILTDRTIHYNRPDITLQDKINKVTYLIDIAVPNTHNIQKTISEKISKYAELKDEVTRIWRQQKVYVVPIVLSTTGVIPNHLLHSLKLLNLKETLYITLQKAAILNTCRIVRKFMQIDENEIGPHHNTSVT

SEQ ID NO: 21186 - protein, 1353 aa, Thyatira batis
METRSKRIRIGPLPGGDRRGTPGADAGCFSMRTVSGEELNRRAPTDKDTTAENIDDGDRLTDRTNTPAEPYSPSTVSYTPSRTSSPSIPSSPASRILNTVSPIPTLNVAREVNTFLPVSTKAGKPRVRMRWSKDVNIFIMRTYFRITRLETDLTTYRQQLHELFTQQYPGITVSEQRISDQRRIIVRNKLLSPEIIQQLKEETRIQLQEEQNNTHNIATSQHANETNTQHSQIELTSNTRRPYNYTLTNTQTSHISTQTSHTSTQTESITVMLENDIETIDVPNQNMISNEIIQEINNKFRTTLIQYSGMDPAARPKLPKLKYSPKLFRYVNLFNENILNQFTSDDTKLIDIHTLIYCTAVVISEELNFKITDHSINSRPKHKTQPPWQQRLEKDIEKLRADCGRLTQYINNNRSSNVVRRVEAIFQSSLTHTRHENINRRPEEFLDTLKQKLALKVHRLRRYNKAQQRKNDNALFATNEKLFYRTLHKPHTDNVNTNDTNTNNTDTNNTNINNTDTNNTNTNNTDTNNTDTNNTDTNNTTNTPTKEQLETFWSSIWEEQVHHNDKASWIIDEKTKWKAIDEMEFVEITESDISNVTAKLHNWKSPGLDKIHNFWYKKLTSLHKALAKNLTEIILGKQNIPDFIATGITYMLPKSKISVQPSQYRPITCLPTIYKILTSAITAKINIHIEHHKIMAEEQKGCRRCHMGCKEQLIIDSTIHKHATTKNRNLHCTYIDYKKAFDSVPHSWLLQILEIYKINPKIIAFLRNIMSQWKTTLQINSNHNTIITRQISIKKGIYQGDSLSPMWFCLALNPLSHLLQRCQAGYSLKHTINQTKLSHLIYMDDIKLYAQTEKDMKKLVLATSQFSRDINMQFGLDKCKTLHIIRGKVKPGNYSINNTDVITAMEPADLYKYLGYTQLKGLDHVKIKNTLTTEYKRRLNAVCKSQLSGKHLIKALNTYAIPILTYSFGVIKWTKTDTEQLERTTRTTLTKHNNLHPKSAIERLTIKRQNGGRGLIDIQRLWRKQVSRLKTFFHTKSLTSNIHKAIVLNDLNYTPLNLIEQVDTQHTNNEDTERQKIEDWKQKVLHGRHPHDLQQPHINTIASNKWLNIGNLFPETEGFMIAIQDQIINTRNYRKYIIKDPTVNNDKCRKCHTQPETIQHITGACTTLTQTDYTHRHNQVANIIHQKLALKYTLIQNTKTPYYNYTPQSILENTTHKLYYDRAILTDRTIHYNRPDITLRDKINKITYLIDIAVPNTHNIQKTITEKLTKYLELKDEVTRIWRQEKVYIVPIVLSTTGVIPNHLLHSLKLIDLHETLYITLQKAAILNTCRIVRKFMQLEEGEIGPHSQNTNT

SEQ ID NO: 21187 - protein, 1353 aa, Thyatira batis
METRSKRIRIGPLPGGDRRGTPGADAGCFSMRTVSGEELNRRAPTDKDTTAENIDDGDRLTDRTNTPAEPYSPSTVSYTPSRTSSPSIPSSPASRILNTVSPIPTLNVAREVNTFLPVSTKAGKPRVRMRWSKDVNIFIMRTYFRITRLETDLTTYRQQLHELFTQQYPGITVSEQRISDQRRIIVRNKLLSPEIIQQLKEETRIQLQEEQNNTHNIATSQHANETNTQHSQIELTSNTRRPYNYTLTNTQTSHISTQTSHTSTQTESITVMLENDIETIDVPNQNMISNEIIQEINNKFRTTLIQYSGMDPAARPKLPKLKYSPKLFRYVNLFNENILNQFTSDDTKLIDIHTLIYCTAVVISEELNFKITDHSINSRPKHKTQPPWQQRLEKDIEKLRADCGRLTQYINNNRSSNVVRRVEAIFQSSLTHTRHENINRRPEEFLDTLKQKLALKVHRLRRYNKAQQRKNDNALFATNEKLFYRTLHKPHTDNVNTNDTNTNNTDTNNTNINNTDTNNTNTNNTDTNNTDTNNTDTNNTTNTPTKEQLETFWSSIWEEQVHHNDKASWIIDEKTKWKAIDEMEFVEITESDISNVTAKLHNWKSPGLDKIHNFWYKKLTSLHKALAKNLTEIILGKQNIPDFIATGITYMLPKSKISVQPSQYRPITCLPTIYKILTSAITAKINIHIEHHKIMAEEQKGCRRGHMGCKEQLIIDSTIHKHATTKNRNLHCTYIDYKKAFDSVPHSWLLQILEIYKINPKIIAFLRNIMSQWKTTLQINSNHNTIITRQISIKKGIYQGDSLSPMWFCLALNPLSHLLQRCQAGYSLKHTINQTKLSHLIYMDDIKLYAQTEKDMKKLVLATSQFSRDINMQFGLDKCKTLHIIRGKVKPGNYSINNTDVITAMEPADLYKYLGYTQLKGLDHVKIKNTLTTEYKRRLNAVCKSQLSGKHLIKALNTYAIPILTYSFGVIKWTKTDTEQLERTTRTTLTKHNNLHPKSAIERLTIKRQNGGRGLIDIQRLWRKQVSRLKTFFHTKSLTSNIHKAIVLNDLNYTPLNLIEQVDTQHTNNEDTERQKIEDWKQKVLHGRHPHDLQQPHINTIASNKWLNIGNLFPETEGFMIAIQDQIINTRNYRKYIIKDPTVNNDKCRKCHTQPETIQHITGACTTLTQTDYTHRHNQVANIIHQKLALKYTLIQNTKTPYYNYTPQSILENTTHKLYYDRAILTDRTIHYNRPDITLRDKINKITYLIDIAVPNTHNIQKTITEKLTKYLELKDEVTRIWRQEKVYIVPIVLSTTGVIPNHLLHSLKLIDLHETLYITLQKAAILNTCRIVRKFMQLEEGEIGPHSQNTNT

SEQ ID NO: 21188 - protein, 1317 aa, Xestia xanthographa
METRSKSKRIGPLPGGDRWGAPGADARCHSMRSVSGEELNRRAPTDKDTTAEIIDDGDRLTDRTDTPVEPYSPSTVSYTPSRRSSPSIPSSPTLSSPPILSLNTFSPTPTLNAARGVSTFFPASTKGGKTRVRMKWSKEVNLFIMRTYLHITKLETDMTTYRQQLHALFTRQYPDITVSEQRISDQRRTIVRNKLLSHEVIDQLKDEVRTQLLQEETLNSTDTNNTTQNVNEIGHQEQPQLFSQSQLISTQSQPYNQSQPSTQMSHTSTQTESITLTLENDIETIVVPDHHLTTDTYIQEIHDKFRTTITQYSGMDPAARPRLPKLKYTPNLFRLVNLFNESIHTQFISDDTQLIDIHLLIYCTAVVISEELNFKITEHTGTPIARQNLTPAWQQRLEKDIEKLRADIGRLTQYINGCRSNKLVKRVEAIFKNNLTHTRHEKNNKKPEEFLDTLKQELALKVHRLRRYKKAQQRKKDNATFATNEKMFYRNLHNPQTDTIDENNTNTPNLPTKEQLEEYWASIWEDPVQHNDKASWIAEEEVKWRAVDEMEFVEVTETDITHITARLHNWKSPGIDKIHNFWYKKLTSLHKSLEKNLTDIILRLQNTPEFIATGITYMLPKNKNSPEPSQYRPITCLPTIYKILTSAITRKISSHIEQHNIIAEEQKGCRQGHMGCKEQLIIDSTIHKHATSKNRNLHCTYIDYKKAFDSVPHSWLIQILEIYRINPKIIDFIRHIMLQWKTTLQINYNHNAVTTRQISIKKGIYQGDSLSPLWFCLALNPLSHLLQGCGAGYCLKHTTDETTISHLIYMDDIKLYAKTENDMKKLVDVTAEFSKDINMQFGLEKCKTLHIVRGKVRPGDYVVNDTDTISAMEQTDLYKYLGYAQLKGLDHTRIKNSLTSEYKRRVNAVCRTQLSGKHLIKALNTFAIPVLTYSFGVIKWSKTDTEQLERTTRTTLTKHNNLHPKSAVERLTIKRQHGGRGLIDIQHLWRKQISRLKSFFHSKSRTSNIHKAIVINDLNYTPLNLSHQTETLNTTNDDPQQHKMEDWKKKVLHGRHPHDLEQTHINKLASNKWLKIGNIFPETEGFIIAIQDQIINTKNYRKYIIKDPTVTDDKCRKCHSQPETIQHITGACTTLTQTDYTHRHNQVANVIHQKLALKHTLIQNTSTPYYNYKPEATLENTTHKLYYDRAILTDKTIHYNRPDIILQDKINKVTYLIDIAVPNTHNIQKTITDKISKYAELKDEVTRIWRQEKVYVVPIVLSTTGVIPNHLLHSLKLLDLKESIYITLQKAAILNTCRIVRKFMQIEENEIVPHHNI

SEQ ID NO: 21189 - protein, 1317 aa, Noctua fimbriata
METRSKKKRIGPLPGGDRRGAPGADAGCLCMRTVSGEELNRRAPTDKDITAEIIDDVDRLTDRTDTPVEPYSPSTVSYTPSRRSSPSIPSSPTPLSPPIITLNTISPTPTLNAARGVSTFLPASTKAGKARVRMKWSKEVNLFIMRTYLHITKLETDMTTYRQQLHALFTRQYPDITVSEQRISDQRRTIVRNKLLSQEVIDQLKEEVRTQLLHEETVNYTDTNNITQNLSEISHQEQPQSLSQSQIIYTQSAPYNQSQAYTQISHTSTQTESITLTLENDIETLVVPDQHLTTDIYIQEINDKFRTTITQYSGMDPAARPRLPKLKYTPNLFRLVNLFNESILTHFISDDTQLIDIHLLIYCTAVVISEELNFKITDHTRATRTRQNVAPAWQQRLEKGIEKLRADIGRLTQYINGCRSNKLVKRVEVIFRNNATHTRHEQNNRKPEEFLDTLKQKLALKVHRLKRYKKAQQRKNDNAIFTTNEKIFYRNLHNTKNDRNYENNTNTPNLPSKEQLETYWANIWEEQKQHNDKASWIVDEEVKWRDIDVMEFVEVTESDIIHITTRLHNWKAPGIDKIHNFWYKKLTTLHKSMAKNLTDIILGQQNIPEFIKTGITYMLPKTKYTSEPSQYRPITCLPTIYKILTSAVTKKINSHIIHHNIIAEEQKGCRQGHMGCKEQLIIDSTIHKHATSKNKNLHCTYIDYKKAFDSVPHSWLIQILEIYRVNQKIIDFMRHVMLQWKTTLQINSNNNNVTTRQIAIKKGIYQGDSLSPLWFCLALNPLSHLLQRCGAGYCLKHSTDETTISHLIYMDDIKLYAKSEKDMKKLVDITAEFSKDINMQFGLEKCKTLHIVRGKVRPGDYAVNESDSITALEPTDLYKYLGYTQLKGLDHVKIKNTLTSEYKKRVNAVCKTQLSGKHLIKALNTFAIPVLTYSFGVIKWTKTDTEQLQRTTRTTLTKHNNLHPKSAIERLTIKREHGGRGLIDIQHLWRKQVSRLKLFFHTKSRTSNIHKAIVTNDLNYTPLNLSDQIETQNTTNDDQQTQKIEDWKRKVLHGRHPHDLELSHINKLASNKWLKIGNLFPETEGFIIAIQDQIINTKNYRKYIIKDPTLTNDKCRKCHVHPETIQHITGACTTLTQTDYTHRHNQVANVIHQKLALKHTLIQNTNTPYYNYKPETTLENTTHKLYYDRAILTDRTIHYNRPDIILQDKLNKVTYLIDIAVPNTHNIQKTITEKISKYAELKEEVTRIWRQEKVYVVPIVLSTTGVIPNHLIHSLKLLDLKETLYITLQKAAILNTCRIVRKFMQIEENEIGPHHNT

SEQ ID NO: 21190 - protein, 1293 aa, Noctua fimbriata
METRSKKKRIGPLPGGDRRGAPGADAGCLSMRTVSGEELNRRAPTDKDTTAEIIDDGDRLTDRTDTPVEPYSPSTVSYTPSRRSSSSIPSSPTPLSPPIITLNTIPPTPTLNAARGVSTFLPASTKAGKARVRMKWSKEVNLFIMRTYLHITKLETDMTTYRQQLHALFTRQYPDITVSEQRISDQRRTIVRNKLLSQEVIDQLKEEVRTQLLHEETVNYTDTNNITQNLSEISHQEQPQSLSQSQIIYTQSQPYNQSQAYTQISHTSTQTESITLTLENDIETIVVPDQHLTTDIYIQEINDKFRTTITQYSGMDPAARPRLPKLKYTPNLFRLVNLFNESILTHFISDDTQLIDIHLLIYCTAVVISEELNFKITDHTRATRTRQNVAPAWQQRLEKGIEKLRADIGRLTQYINVCRSNKLVKRVEVIFRNNGTHTRHELNNRKPEEFLDTLKQKLALKVHRLKRYKKAQQRKNDNAIFTTNEKIFYRNLHNPKNDRNYENNTNTPNLPSKEQLETYWASIWEEQKQHNDKASWIVDEEEKWRDINVMEFVEVTESDIIHITTRLHNWKAPGIDKIHNFWYKKLTTLHKSIAKNLTDIILGQQNIPEFITTGITYMLPKTKHTSEPSQYRPITCLPTIYKILTSAVTKKINSHIIHHNIIAEEQKGCRQGHMGCKEQLIIDSTIHKHATSKNRNLHCTYIDYKKAFDSVPHSWLIQILEIYRVNPKIIDFMRHVMLQWKTTLQINSNNNNVTTRQISIKKGIYQGDSLSPLWFCLALNPLSHLLQRCGAGYCLKHSTDETTISHLIYMDDIKLYAKSEKDMKKLVDITAEFSKDINMQFGLEKCKTLHIVRGKVRPGDYVVNESDSITALEPTDLYKYLGYTQLKGLDHVKIKNTLTAEYKKRVNAVCKTQLSGKHLIKALNTFAIPVLTYSFGVIKWTKTDTEQLQRTTRTTLTKHNNLHPKSAIERLTIKREHGGRGLIDIQHLWRKQVSRLKLFFHTKSRTSNIHKAIVTNDLNYTPLNLSDQIETQNTTNDDQQIQKIEDWKRKVLHGRHPHDLEQSHINKLASNKWLKIGNLFPETEGFIIAIQDQIINTKNYRKYIIKDPTLTNDKCRKCHVHPETIQHITGACTTLTQTDYTHRHNQVANVIHQKLALKHTLIQNTNTPYYNYKPETTLENTTHKLYYDRAILTDRTIHYNRPDIILQDKLNKVTYLIDIAVPNTHNIQKTITEKISKYAELKEEVTRIWRQEKVYVVPIVLSTTGVIPNHLIHSLKLLDLKETLYITLQKAAI

SEQ ID NO: 21191 - protein, 1319 aa, Mesoligia furuncula
METRSKRKRIGPLPGGDRRGAPGADAGCLSMRTVSGEELNRRAPIDKDTTAEIIDDGDRLTDRTTTPVEPYSPSTVSYTPSRPSSPSMPSSPILSSPPITSLNLIPPTPTLNVAREVSSFLPASTKAGKARVRMRWSKEVNLFIMRTYFYITKLETDMTTYRQQLHELFTRQYPEITVSEQRISDQRRAIVRNKLLSQEIIEQLKEETRIQLQEAEYNTSADAIPLSQNTTETAQQSHSQPHIQVTPYTQSQPYNQSQVFTQTSHTSTQTESIMLTLENDIETLTVADQNLTADICIQEILDKFRTTLAQYSGMDPAIRPKLPKLRYSPNLFQLVNLFNENILHQFISDDTQLIDIHTLIYCTAVVVSEELNFKITQYTGNTRPKQNTKPAWQQRLEKDIEKLRADCSRLTQYINNIRSRKVVKRVEALFRSSVTHTTHENDNRKPEEFLDTLKQKLALKVHRLRRYKKAQQRKNDNAIFATNEKTFYRNLHKPDADTNDENNTDAPNQPTKEQLETYWSSIWEEQEQHNDKATWITEEETKWRAIEEMEFVEITEADITHLTGRLHNWKSPGIDKIHNFWYKKLTILHKPIAKNLTKMILGQQNIPDFIATGITYMLPKTKNSPQPSQYRPITCLPTIYKILTSAITMKINSHIEHHNIMAEEQKGCRRGHMGCKEQLIIDSTIHKHASTKNRNLHCTYIDYKKAFDSVPHSWLIQILEIYRINSKIIDFLRNIMPLWKTTLQINCNHNNITTRQISIRKGIYQGDSLSPLWFCLALNPLSNLLQRCRAGYCLKHTTEQTTVSHLIYMDDIKLYAQTEKDMKKLVEATAEFSLDINMQFGLDKCKTLHIIRGKIRPGNYVVNNTDTITAMEPTDLYKYLGYTQLKGLDHVRIKETLTTEYKRRLNAVCKTQLSSKNLIKALNTFAIPILTYSFGVIKWTKTDTEQLERTTRTTLTKHNNLHPKSAIERLTIKRQNGGRGLIDIQHLWRKQVCRLKTFFQSKSRTSNIHKAIVQNDFNYTPLNLNEQLDTPHNTSDDPQKQKIEDWKKKVLHGRHPHDLQQSHVNQLASNKFLKIGNLFPETEGFIIAIQDQIINTKNYRKFIIKDPSVTNDKCRKCYIQPETIQHITGACTTLTQTDYTHRHNQVANVIHQKLALKYTLIQDANTPYYNYTPQTILENDTHKLYYDRAILTDRTIHYNRPDITLHDKINKVTYLIDIAVPNTHNIQKTISDKISKYAELKDEVTRIWRQQKVYVVPIVLSTTGVIPNHLLHSLKLINLKETLYITLQKAAILNTCRIVRKFMQIDENEVVSHHNTSST

SEQ ID NO: 21192 - protein, 1186 aa, Mesoligia furuncula
MRWRKEVNLFIMRTYFYITKLETDMTTYRQQLHEIFTRQYPEITVSEQRISDQRRAIIRNKLLSQEIIEQLKEETRIQLQEAEYNTSADAIPLSQKITETAEQSHPQPHIQVTPYTQSQPYNQSQVFTQTSHTSTQTESIMLTLENDIETLTVADQNLTADICIQEILDKFRTTLAQYSGMDPAVRPKLPKLRYSPNLFQLVNLFNENILHQFIFDDTQLIDIHTLIYCTVVVVSEELNFKITEYTGNTRLKQNTKPAWQQMFEKDIEKLRADCSRLTQYINNIRSRKVVKRVEALFRSSVTHTRHENDNRKPEDFLDTLKQKLALKVHRLRRYKKAQQRKNDNAIFATNEKIFYRNLHKPEADTNDENNTDAPNQPTKEQLETYWSSIWEEQEQHNDKATWLTEEETKWRAIEEMEFVEITEADITHLTGRLHNWKSPGIDKIHNFWYKKLTILHKPIAKNLTKIILGQQNIPDFIATGITYMLPKTKNSPQPSQYRPITCLPTIYKILTSAITMKINSHIEHHNIMAEEQKGCRRGHMGCKEQLIIDSTIHKHASTKNRNLHCTYIDYKKAFDSVPHSWLIQILEIYRINSKIIDFLRNIMPLWKTTLQINCNDNNITTRQISIRKGIYQGDSLSPLWFCLALNPLSNLLQRCRAGYCFKHTTEQTTVSHLIYMDDIKLYTQTEKDMKKLVEATSEFNLDINMQFGLDKCKTLHIIRGKIRPGNYVVNNTDTITAMEPTDLYKYLGYTQLKGLDHVRIKETLTAEYKRRLNAVCKTQLSSKNLIKALNTFAIPILTYSFGVIKWTKTDTEQLERTTRTTLPKHNNLHPKSAIERLTIKRQIGGRGLIDIQHLWRKQVCRLKTFFQSKSRTSNIHKAIVQNYFNYTPLNLNEQLDTPQNTSDDPQKQKIEDWKKKVLHGRHPHDLEQSHVNQLASNKFLKIGNLFPETEGFIIAIQDQIINTKNYRKFIIKDPSVTNDKCRKCHIQPETIQHITGACTTLTQTDYTHRHNQVANVIHQKLALKYTLIQDANTPYYNYTPQTILENDTHKLYYDRAILTDRTIHYNRPDITLQDKINKVTYLIDIAVPNTHNIQKTISDKISKYAELKDEVTRIWRQQKVYVVPIVLSTTGVIPNHLLHSLKLINLKETLYITLQKAAILNTCRIVRKFMQIDENEVVSHHNTSST

SEQ ID NO: 21193 - protein, 982 aa, Mesoligia furuncula
MKTYLLTQFISDDTQLIDIHTLIYCTAVVVSEELNFKITQHTGNSRSKQNIKPAWQQRLEKDIEKLRADCGRLTQYINNIRSNKVIRRVEAIFRSSITHTRHENNNRKPEEFLDTLKQKLALKVHRLRRYKKAQQRKNDNVIFATNEKMFYRNLHKPKTNTNDDNNTVAPDQPTKEQLETYWSSIWEEQEQHNDKATWITEEEIKWRAIEEMEFVEITEADITQLTGRLHNWKSPGIDKIHNFWYKKLTSLHKPIAKNLTEIILGRQNIPDFIATGITYMLPKTINSPQPSQYRPITCLPTIYKILTSAITTKINSHIEHHNIMAEEQKGCRQGHVGCKEQLIIDSTIHKHATTKNRNLHCTYIDYKKAFDSVPHSWLIKTLEIYRINSKIIDFLRNIMPLWKTTLQINSNHNNVTTRQISIKKGIYQGDSLSPLWFCLALNPLSHLLQRCQVGYCLKHTAEQTTVSHLIYMDDIKLYAQTEKDMKKLVEVTAEFSLDINMQFGLDKCKTLHIIRGKIRPGDYVVNNTDTITAMEPTDLYKYLGYTQLKGLDHVRIKETLTAEYKRRLNTICKTQLSSKNLIKALNTFAIPILTYSFGVIKWTKTDTEQLERIARTTLTKHNNLHPKSATERLTIKRQHGGRGLIDIQHLWQKQVFRLKTFFYSKSRTSNIHKAIVQNDFNYTPLNLSEQLDTPQITSDDPQIQKIENWKKKVLHGRHPHDLEQSHVNKVASNKFLKIGNLFPETEGFIIAIQDQIINTKNYRKFIIKDPSVTNDKCRKCHSQPETIQHITGACTTLTQTDYTHRHNQVATIIHQKLGLKYTLIQNTNTPYYNYTPQTILENDTHKLYYDRAILTDRTIHYNRPDITLQDKINKVTYLIDIAVPNTHNIQKTISEKISKYAELKDEITRIWRQQKVYVVPIVLSTTGVIPNYLLHSLKLLNLKETLYITLQKAAILNACRIVRKFMQIDENEIGPHHNTSIT

SEQ ID NO: 21194 - protein, 1172 aa, Xestia c-nigrum
MRTYLHITKLETDMTTYRQQLHTLFTRQYPEITVSEQRISDQRRIIVRNKLLSQEVIDQLREEVRTQLLQVETVNYIDTNSITQNITEISNQEQPQSLSQSQIIDSPSPYNQSQNFTQNISHTSIQTELITLTLENDIEAIVVPDQNLATDTYIQEINDKFRTTITQYSGMDPAARPRLPKLKYTPNLFRLVNLFNETILTQFISDDTQLIDIHLLIYCTAVVISEELNFKITDHTGAPRTRPNIVPAWQQRLEKDVEKLRADIGRLTQYISGCRSNKLVKRVEIIFRNNSTHTRHEQNNRKPEEFLDTLKQKLALKVHRLKRYKKAQQRKNDNAIFTTNEKVFYRNLHIPKNDRNYENNTNTPTLPSKEQLETYWAGIWEEQKQHNDKASWIADEEMKWRGIDEMEFVEVTESDIIHITARLHNWKSPGIDKIHNFWYKKLTALHKTLAKNLTDIILGQQNLPVFITIGITYMLPKTKYTSEPSQYRPITCLPTIYKILTSVVTKKINSHIIQHNIIAEEQKGCRQGHMGCKEQLIIDSTIHKHATTKNRNLHCTYIDYKKAFDSVPHSWLIQILEIYRINPKIVDFMRHVMLQWKTSLQINSNNNNVTTRQISIKKGIYQGDSLSPLWFCLALNPLSHLLQRCGAGYCLKHSTDDTPISHLIYMDDIKLYAKSEKEMKKLVDITAEFSKDINMQFGLEKCKTLHIVRGKVRPGDYAVDESDSITALEPTDLYKYLGYTQLKGLDHVKNKDTLTTEYKKRVNAVCKTQLSGKHLIKALNTFAIPVLTYSFGVIKWTKTDTEQLQRITRTTLTKHNNLHPKSAIERLTIKRENGGRGLIDIQHLWSKQISRLKSFFHIKSRNSNIHKAIVTNDLNYTPLNLSDQIETHNTTNDDPQTQKIEDWKKKVLHGRHPHDLEQLHINKLASNKWLKIGNLFPETEGFIIAIQDQIINTKNYRKYIIKDPTVTNDKCRKCHVHPETIQHITGACTILTQTDYTHRHNQVANVIHQKLALKHSLIQNTSTPYYNYKPETTLENTTHKLYYDRAILTDRTIHYNRPDIILQDKINKVTYLIDIAVPNTHNIQKTITEKICKYAELKEEVTRIWRPEKVYVVPIVLSSTVVIPNHLLHSFKLLELNETLYITMQKAAILNTCRIVRKFMQIEENEIGPHHT

SEQ ID NO: 21195 - protein, 1309 aa, Hemaris fuciformis
METRSKKKLRGPLPGGDRRGTPGADAGCYSMQTVSGEELSRRAPTGSPESITAANLTDRQTDSRSNSPSEPYSPSTKSYTPSICSSSSRSPPSLTNKIREPSIPALDAAREVNRPFLPMSTKAGKPRVRMSWSRDVNLFIMRTYYYITKLETDMTIYRKLLHEHFSQRYPDVIVSEQRLSDQRRAIVRNNLLPQDVLDQLKTDVRKQLEEESMINDDTEIICRNQSPLPHPHTSNSNTPHLSLIQIQPITQENQNQCSQITHTSTQTENVILTLENDIDNMPEPNISTDIHIQTIQDKFTATLTLYSGLDPTLRPKLPKLKYTSKLTSLINIFNQSILNNCISKATTLLDIHTIIYCTAYVIAEELDFKINEQRVGRMKPGKNNKPPWQYRLEKDIEKLRADCGKLTQYINNNRSKKVIKKVEEIFKKYTTHTRHENNNKKPEEFLDTLKQKLAVKAQRLKRYKKAQERRKDNVLFAKNEKMFYRQLRNPHTNIKTNIHNENNISTPKKEALEAFWAKVWEEQIQHNDEANWIKEEENMWSEVDEMEFTEVTEADIKLITNRLHNWKSPGIDKIHNFWYKKLTSLHKAIAQNFTDIILRKQSFPHFLATGITYMLPKDKFSPDPSNYRPITCLPTIYKILTSVITSKINTHVENHNIIAEEQKGCRRGHMGCKEQLVIDSTIHKHASTKSRNLHCTYIDYKKAFDSIPHSWLIQILKIYKINSVIIEFLQNIMLNWKTTLHLYNVNDPIITRQLSIRKGIFQGDSLSPLWFCLALNPLSHILQRSRAGYHLKHNSEETNISHLIYMDDVKLYSKNEKDMNKLIEATLNFSKDINMHFSLDKCKTVHIIRGKIRPGDYTLNNSDLITAMEPTDLYKYLGYKQLKGIDHKNIKHTLSGEYRRRVNAICKTQLSAKNLIKALNTYAIPILTYSFGVIKWSKTNIEQIERLTRTTLTKHKYLHPKSAVERTTIKREAGGRGLIDIYNLWQKQIYNLKLFFREKSRTSNIHNAICQNDNNFTPLNLCEPPNPPNPNNIDRQQQKIEDWKKKVLHGRHPHDLEQPHIDKIGSNKWLKIGGLFPETEGFLIAIQDQVINTKNYRKFIIKDPTMINDKCRRCHTQPETIQHITGACICLTQTDYTHRHNQISNIIHQTLALKYNLIQSSKTPYYKYTPETILENALYKLYYDRAILTDRTIHYNRPDITLQDKRNKTTYLIDIAVPNTHNIQKTIAEKNNKYTDLKNEVIRIWKQEKVYVVPIVLSTTGIIPKHLHHSLKLLNLNKSLYITLQKAAILNTCRIVRKFMEIDETVSHS

SEQ ID NO: 21196 - protein, 1286 aa, Heliconius melpomene
METRLRKKLRGPLPEGNRRGAPGADAGCFSIRTVSGEELNRRAPTGDLQPEESTAEHLHTYTSRVNSPSEPYSPSTASYNPSVHSSPTSSVCSRGPPTPLLDVAQEANAFLPASTKAGKPRVRMQWSKDVNLFIMRTYYHITKLETDMTIYRKKLHEQFLLNYPQIKVSEQRISDQRRTIERNKLLSQEILNRLKEEVRIQLQEEETNNVNITEISNHTYIQTRTSSPTTFQYNANSQQTQTSHSFTQTETITQLLENDIEGFVNVQPPNEEYIRIIIDKFRTNLTLYAGMDPKMRPKLPKLRYCRKLYQLSNLFNENILIEYISPDTKLIDLHTLIYCTALTITEELNYKITGHSRINSKSNKYKPAWQYRLEKDIQKLRADIGKLTQFINNNRSKKIIERVEFLLKTTKVHTKHEKNNKRPEEVLDTLKQKLALKSHRLKRYNKAQERKAQNNTFVRNEKQFYRNLLKPQNLIQDKVETPTKEELEKYWSGIWEEQTYHNNQADWITKEEQRWHDLEVMDYNKIVKEDIKEITDKLHNWKSPGIDKIHNFWFKKLTFLHSSLAKNISEIISGQQNIPEFLATGITYMLPKNNFSTQPSQYRPITCLPTLYKIVTSLITQKINKHIENNNIIAEEQKGCRRGHMGCREQLIIDSTIMKHALSKNKNLHCTYIDYQKAFDSIPHSWLLHILNIYKINPKIINFLTNIMTQWKTTLHLHSSNYNINTREIAIKKGIYQGDSLSPLWFCLALNPLSYLLKCNRAGYVLKHDNNETIISHLIYMDDIKLYSKNNKEMKTLIDTTTEFSEDIHMHFGLDKCRTVHIVKGKIRPGDYAINEIDKITAMEPNEFYKYLGLQQLKGLNHTAIKETITNEYKKRINAICKSQLSSKHLIKALNTYAIPILTYTFGIVKWSNSNIEQIERLTRTTLTKHNNLHPKSAIERLTIKRKHGGRGLIDIKHLWQKQLHNLSNFFYTKAQSSDIHKSIVQNDFKYTPLNLNDCQSTENLTNTDPQKKKIEEWMKKVMHGRHPNDLQQPHIDLEASNKWLQTGSLFPETEGFIIAIQDQIINTKNFRKYIIKDPTVTSDKCRRCHTQPETIQHITGACASLTQTDYTHRHNQLVNIIHQILAHKHKLIQDTNIPYYKYTPQSVLENTSHKIYYDRAILTDKTIHFNRPDITLQDKINKTVYLIDVAVPNTHNIQKTIVEKINKYADLKEEVTRIWKQNKVYVVPIVISTTGVVPKAIHHYLKIIDLEESIIHTLQKAAILNTCRMVRKFLQIEENNINTQN

SEQ ID NO: 21197 - protein, 1262 aa, Emesis ocypore
METRSKSKRKGPLPGGDRRGAPGADAGCLSMRTVSGKELNRRAPTVKDTTAEICDDGDILTDRTNSPVEPFSPSTVSYTPSRTSSPSIPSSPPTTSFNTDPPIPTLNVAREASSFLPVSTKAGKSRVRMRWSKDVNIFIMRTYYFITKLETDLTTYRQQMHEIFSQQYPEINVSEQRIADQRRVIIRNKLLSQDILNQLREEVRTQLENYDNNITTNPDTQTIENIPQPQLPILSLLDTQTLSCYQSQTNSQTTHTSTQTESITIAFESDIETLGEISQNQNTETRIQEILDKFNTALIQYSGLNPAVRPRLPKLKYTPKLAQLVHLFNQHILNQFMNEDTHLIDTHTLIYCTALVISEELNYKITQQTRNTRSRNDSKPAWQQRLERDIEKLRADCGRLTQYINNNRSSNIVRKVEIIFKNMTNHTRHESNNRKPEEFLDTLKQKLALKVHRLRRYKKAQERKNDNTQFATNEKSFYRNLQNPKTDTSTNSSIELPSAEKLESFWSGIWEEQVQHNEKSDWIKDEKTKWNSLKEMDFVEITESDINSITARLHNWKSPGIDKIHNYWYKKLYSLHKTLAKNLTDIILGKQAIPEFIATGITYMLPKAHYTSQPSQYRPITCLPTIYKILTSAITSKITRHIEQHDILAEEQKGCRRGHMGCKEQLVIDSIVHKHATTKNRNLHCTYIDYKKAFDSIPHSWLIQILQIYKINTKIIDFLQNIMSQWKTTLQLNYRHENVTTRQIFIKKGIYQGDSLSPLWFCLALNPLSHLLRSCQAGYCLKHNIEETIISHLIYMDDIKLYAKTEKEMKRLIDTTAQFSNDINMHFGLDKCKTVHIIRGKIKPGDYIINDTDTITALEPTDLYKYLGYKQLRGLDHTAIKHTLNTEYKKRVVAVCKTQLAGKHLIKALNTYAIPILTYSFGVIKWSKTDIQKIERTTRTILTKQNNLHPKSAIERLNIKRQNGGRGLIDIHNLWQKQISRLKTFFHTKSHTSNIHKAIATNDLNYTPLNLNEQEETQHTNNEDPQKQKLEDWRKKVLHGRHPHDLDQPHIDSIASNKWLKIGNLFPETEGFIIAIQDQIINTKNYRKFIIRDPTITNDKCRKCHSQPETIQHITGACTTLTQTDYTHRHNQVANIIHQQLALKHKLIQDTNTPYYKYTPQNVLENTTHKLYYDRAILTDRTIHYNRPDITLRDKINKVTYLIDIAVPNTHNLQKTIGEKFSKYAELKEEVTRIWRQEKVYVVPIVLSTTGVIPNHLHHSLK

SEQ ID NO: 21198 - protein, 1337 aa, Cecropterus phalaecus
MAKGNLVVSMRTLGTGGNPVLLTLTTVKAGLCRGRRLLSLAHRGNKMRRSLRIKNLELRNKHSAQSGTVAEIVSNLSSPTSSTRSLFQSTNSTPLSFENRSNSISRSTTVSPMSVDAVQIQNVTRPASDVARGANAFLPASTKAGKPRLRMKWSQDVNIFIMRTYYHITKLETDLTTYRKTLHELFSIQYPDVNVSEQRFSDQRRMIIKNKYLTQEILDTLKEEVTRQLQEDKHIHEVNDDNNQVHIEINQNSLESQAHSQNTSSQFHNLSQLNTQTLIPTSHSSTQTEFITLLLENETNTIADLVPPNDNSFQDMYDKLQTAITQYSGMDPTARPKLPRIKYTKHLYDLVNLFNQHILHRLISKETQINDIHTLIYCAALVIAEELNYKIIHNTTHKKPKDYTKPSWQIRLEKDIENLRVDIGRLTQYINNNRSDRLIKKVQHIFNRITRHTKHESNNRKPEEFLDTLKQKLALKTHRLKRYKKTQQRKIDNIQFTTNEKLFYRNLRKPKLDFTTKKNNHTNIPTQEELETYWSNIWEENVRHNDNADWIREEQRKWEVIDEMEFEEITELDITNATARLHNWKAPGVDKIHNFWYKKLTTLHKPLARALTDIILGKQNIPNFITIGITYMLPKTNNSTQPSQYRPITCLPTIYKILTSTITARINTHIEHHNILAEEQKGCRKGHMGCKEQLVIDSVIHKHATSKHRNLHCTYIDYKKAFDSIPHSWLIQILQIYKIHPVIVNFLRNVMPLWKTTLHLNQENKSISTRRININKGIYQGDSLSPLWFCLALNPLSNLLHNCQIGYRFNNGPEKTTISHLIYMDDIKLYAKNHKDMQKLIDKTTQFSKDINMQFGLDKCKTLHIIKGKIQSGDYIVNDTDVISAMEPTDVYKYLGYNQLKGLPHINIKNELTTEFKRRLEAICKTHLASKHLTKAINTYAIPILTYSFGVIKWTKTDIEQLERIIRTTLTKHNHLHPKSAVERLNIKRQDGGRGVIDINYLWQKQINNLRHFFFIKSSTSNIHSAISYNDENLTPLNLSEHTDQHTLSYGNPQLQKIENWKNKVLHGRHPHDLEHTQVDKIASNKWLEVGNLFPETEGFMIAIQDQVINTKNYRKHIIKDPNVKNDKCRRCHTQPETIQHITGACTNLTQTDYTHRHNQLTSIIHLNLALKHNLIQNTNTPYYKYTPQTVIENTSHKLYYDRAILTDRTIHYNRPDIILQDKLNKITYLIDIAVPNTHNVQKTIVEKINKYIELKEEVARIWKQNKVYVVPIVLSTTGVIPYHLHQSLKLIGLQHSLYIPLQKAAILNTCRIVRKFMQIDEKEVGSHSLIQSIAPL

SEQ ID NO: 21199 - protein, 1274 aa, Graphium sarpedon
METRSKKKRLGPLPEGNRRGTLGADAGCFSMRTVSGEELNRRAPTDKNTTAEIITPPLYHCPIDLNTHNTINYIHFDTSLSSTAHITQPTPTLDVARGANAFMPVSTKAGKVRVRMKWSVDVNMFIMRTYYFITKLETDLSTYRQQLHRIFSEKYPTVNVSEQRVSDQRRTIIKNKLLTQEMLDRLKEEARTQLEIECDQTIQPKSPETSNEHSIESQTNPHRHFSTQTEFNSMIIENEFETLGTVTDNYRALEGYAQEILEKFKTALAQYSGINPILRPKLPKLKFTSHLAQLTHVFNNNILNNFLPEDAQLTDLHTVIYCAALVISLELNYKIRNHSIDAKTKNNIKPAWQQRLEIDIKKLRANCGILTQYINNNRSKKVLKKADLIFKNMKNHTKHENYNRSPKEFLDTLKQNLALKVHRLRRYNKAQKRKKDNKIFNSNEKTFYRNLENAQTEKGSTHGTINTPTKEQLEVCWASIWEEQVQHNNNATWIKEEETKWHGIEEMKFTEITEPDIQYITSKLHNWKSPGVDKIHNYWYKKFTSLHKSIAKNLTQIILRQQNIPEFLTTGTTYLLPKNHYSPEPSQYRPITCLPTIYKILTSAISLKINSHLEKHNIIAEEQKGCRRGHMGCKEQLIIDSVVHKHATIKNRNLHCTYIDYKKAFDSIPHSWLIQILKIYKIDAALIKFLGSAMSMWNTTIHLNNQHTNITTRRIAIKKGIFQGDSLSPLWFCLALNPLSTLLQNCQAGYCLKHSTETTIISHLLYMDDIKLYAETDNEMKTLIQKTTQFSNDINMNFGLDKCKTLHIIKGNIKPGNYEVNNFDCITAMEPSNFYKYLGYKQLKGIDHTATKQTLITEYKRRVNTLCRTQLAGKNLIKAINTYAIPILTYSFGIIKWAKTNIEQIERSTRTILTKYNNLHPKSAVERMMIKRQNGGRGLIDISNLWEKQLKILKTFFQNKSKTSNLHKSISQNDQNFTPLKLNEPLDAQINSNDDTQKCLITNWKKKVLHGRHPNDLDQNYVNKIASNKWLQVGYLFPETEGFIMAIQDQVINTKNYRKYIIKDPTILNDKCRKCHIQSETIQHITGACITLTQSDYTYRHNQIANIIHQKLALKYSLISDTTTPYYKYSPENVLDSSTHKLYYDRAILTDKTIHYNRPDIILQNKIKRITYLIDVAVPNTHNIQKTISEKIYKYTDLKEEVSRIWKQEKVYIVPLVLSTTGVIPNHLSHSLKLLDLNESLYITLQKAAILNTCRIVRKFLQVEDSTEIPLNHI

SEQ ID NO: 21200 - protein, 1287 aa, Arctia plantaginis
MSPATRGNEMIKMQNKTNKYNLRPLPGGRRDSIRNNNINNQTDRQTDNDNISLNSLTSLSVTEPYSPSTSAYRPTPVSFVDEDSHETPNPTLAVTQEVSAFLPASTKSGKPRVRMRWSKEVNLFIMRTYYQITKLETDMTTYRKQLHELFTRHYPDINVTEQRIADQRRTIVRNKLLTEETLHRLKEEIRMQLQENENNYEYIENNSNPQLHNTQSVTTALHTQSQPHTITQSSQISTEPETVTLTLENDMEIMQNFNPSSDNIQKIQEKFRTALALYSRMDPITRPKLPKLKYSRKLSELTHVFNHNILHQFLSEDTQLTDIHTLIYCTALVISEELNYKITDHPRNVLRKNSKPPWQIRLEKDIEQLRADCGRLTQYIKNNRSNKIVKRVEQIFRRQSTHTRHENNNRKPEEYLDTLKQKLALKVHRLKRYKKAQQRKNDNMLFTLNEKSFYRNLSKPQTATTRPENIDIPTQIQLETFWSGIWEVPVQHNDKADWITEEENKWNSIEEMEFDGITEDDIAHVTAKLHNWKSPGIDKIHNYWYKKITSFHKPIAKNLTYIILGKQNIPEFIGMGITYMLPKTAHSPQPSQYRPITCLPTIYKILTSAIAHKINMHIEHNHIIAEEQKGCRRGHMGCKEQLVIDSTIHKHATTKNRNLHCTYIDYKKAFDSIPHSWLIKILHIYKINPKITDFMRDIMSNWKTTLHLKMNDRTVTTRQISIKKGIYQGDSLSPLWFCLALNPLSHLLQRCQAGYRLGNSTEETIISHLIYMDDIKLYAKSDKEMTKLLENTTKFSKDINMEFGLNKCKTLHIIRGKIRPGDYAVDESSTIAAMESTDLYKYLGYKQLKGLDHTSIKQILATEYKSRTNTLCKTQLSAKNLIKALNTYAIPILTYSFGIIKWTKTDIEQIERTTRTTLTKHNNLHPKSAIERLTIKRENGGRGLIDIYHLWQKQVYNLKTFFHTKSHTSNIHKAITLNDYKFTPLNLNDHTGIHNPNNIDPQVDKIENWKKKALHGRHPQDLEQPHIDTISSNSWLKIGNLFPETEGFIIAIQDQIINTKNYRKYIIKDASVTDDKCRKCHIQSETIQHITGACITLTQTDYTHRHNQITNIIHQKLALKHHLIQNTNTPYYNYTPQSVLESSSHKLYYDRAILTDRTIHYNRPDITLQDKINKTTYLIDIAVPNTHNLQKTITEKISKYTELKEEIIRIWRQEKVYMVPIVLSTTGVIPKHLHHSLKLINLNESVYLNLQKAALLNTCRTVRKFMDIEENGTAQHTITTSTPSTST

SEQ ID NO: 21201 - protein, 1317 aa, Agrochola circellaris
METRSKSKRIGPLPGGDRRGAPGADAGCLSMRTVSGEELNRRAPTDKDATAEIIDDGDRLTDRTNTPVEPYSPSTVSYTPSRPSSPSIPSSPIPPSPPITSLNSISPTPTLNVAREASSFLPASTKAGKARVRMRWSKEVNLFIMRTYFYITKLETDMTTYRQQLHELFTRQYPEITVSEQRISDQRRAIVRNKLLSQQIIEQLKEETRIKLQQAENNAGANAIPLSQNITEIAEQSHIQVEPYTQSQPYNQSQAYTQTSHTSTQTESITLTLENDIETLSGADENLTTDLYIQQIHDKFRTTLAQYSGMDATVRPKLPKLRYSPNLFRLVNLFNENILNQFISDDTQLIDIHTLIYCTAVVISEELNFKITQHSGNARPKQNIKPAWQQRLEKDIEKLRADCSRLTQYINNNRSSKVVRRVEAIFRSSFTHTRHEDNNRKPEQFLDTLKQKLALKVHRLRRYKKAQQRKNDNAIFATNEKMFYRNLHKPDTDTNNENTSNTDAPDRPTKEQLETYWSSIWEEQEQHNDKATWITEEETKWRAIAEMEFVEITEADITHLTGRLHNWKSPGIDKIHNFWYKKLTSLYKPIAKNLTEIILGQQNIPDFIATGITYMLPKSKNSPQPSQYRPITCLPTIYKILTSAITMKINSHIEHHNIMAEEQKGCRRGHMGCKEQLIIDSTIHKHASTKNRNLHCTYIDYKKAFDSVPHSWLIQILEIYRINSKIIDFLRNIMPLWKTTLQINCNHNNVTTRKISIKKGIYQGDSLSPLWFCLALNPLSHLLQRCRAGYCLKHTTEQTTVSHLIYMDDIKLYAQTEKDMKKLVEATAEFSLDINMRFGLDKCKTLHIIRGKIRPGNYVVNNTDTITAMEPTDLYKYLGYTQLKGLDHVRIKETLTTEYKRRVNAICKTQLSGKNLIKALNTFAIPILTYSFGVIKWTKTDTEQLERTTRTTLTKHNNLHPKSAIERLTIKRQNGGRGLIDIQHLWRKQVCRLKTFFHSKSRTSNIHKAIAQNDFNYTPLNLNEQPDTPQITSDYPQKQKIEDWKKKVLHGRHPHDLEQSHVNTVASNKFLKIGNLFPETEGFIIAIQDQIINTKNYRKFIIKDPSVTNDKCRKCHIQPETIQHITGACATLTQTDYTHRHNQVANVIHQKLAVKYTLIQDTNTPYYNYTPQTILENDTHKLYYDRAILTDRTIHYNRPDITLQDKLNKVTYLIDIAVPNTHNIQKTISEKISKYAELKDEVIRIWRQQKVYVVPIVLSTTGVIPNHLLHSLKLLNLKESLYITLQKAAILNTCRIVRKFMQIDENEIGPHHNTFST

SEQ ID NO: 21202 - protein, 1282 aa, Autographa pulchrina
METRSKKKRIGPLPGGYRRGTPGADAGCLSMRSVSGEELSRRAPIDKDTTAETSDEIDRLTDRTNSPVEPFSPSTISYTPSLASSPLTVSNSDILPTPTLDVAREVNTFLPASTKAGKQRVRMRWSKEVNLFIMRTYYYITKLETDMTIYRKVLHELFSQKYPEISVSEQRISDQRRTIVRNKLLSQVELDRLKNEVRAQLEECANEIPLVQTNTEDLGIPLPNSAQLNLNMQTLSQNYLTSHIGTQTESLTLTIENDINTFVEPDPLPDPSTEDILEKLRTALVLYSGMDPVSRPKLPKLKYSPKLLQLVLLFNNSILSNFLSEDTQLVDLNTLIYCTALVISEELNYKVTEYAGNTRPKHNNKPAWQVRLERDIEKLRADCGRLTQYINNNRSNKVIKRVEAIFKSRIMHTRHETDNRKPEEFLDTLKQKLALKVHRLKRYKKAQQRKNDNIIFNSNEKMFYRNLLKPQSESIAQDNVEMPTKESLENFWSGIWEEQVQYNDNAEWIRQEETKWIAIEEMDFAEITETDILNITVRLHNWKSPGVDKIHNYWYKKLVTLHKILAKNLTDVILGRQLIPDFLATGVTYMLPKGKHSAEPSQYRPITCLPTLYKILTSALTSKINKHIEHHNIIAEEQKGCRRNHMGCKEQLIIDSTIHKHASTKNRNLHCTYIDYQKAFDSIPHSWLIKVLQIYKVNFKIIQFLSSIMTRWKTTLQLNCNRTSVTSRQISIRKGIYQGDSLSPLWFCLALNPLSSMLHRNRVGYCFKHSAQEVIISHLIYMDDIKLYSKSEHDMKKLLDTTTLFSNDINMQFGLDKCKTLHIVRGKIKPGDYPVNSIECITAMEPTDLYKYLGYKQLKGLDHTSIKSTLDTEYKRRVNTLCKSHLAGKHLIKAINTYAIPILTYSFGVIKWTKTDIEQIERTTRTTLTKHNNLHPKSAIERLTIKRQDGGRGLIDIHHLWQKQISRLKSFFLTKSNTSDIHKAIAQNDDNYTPLNLNDQTETLNISSSDPQKQKMETWKKKVLHGRHPHDLEQPHVDKIASNKWLKVGNVFPETEGFILAIQDQIINTKNYRKYIIKDPTVTNDKCRKCHTQPETIQHITGACTSLTQTDYTHRHNQVVNIIHQQLALKYKLIENNKTPYYKYTPQTVLENGKHKLYYDRAILTDKTIHYNRPDITLQDKENKTTYLIDIAVPNTHNLQKTMAEKISKYAELKEEVARIWRQDKVVVVPIVLSSTGVIPNNLHNSLKVIELNKSIYITLQKAAILNTCRIVRKFLSLEDNN

SEQ ID NO: 21203 - protein, 1228 aa, Mythimna impura
MPSSPILSHSSHPITSLNTIPSTPTLNVAQEASSFLPASTRAGKARVRMRWSKEVNIFIMRTYLYITKLETDMTTYRQQLHERFTRQYPEITVSEQRIADQRRAIVRNKLLSQEIIEQLKEETRLQLQESEGNTGTTTLSQNIIEIDRHPQTQLHTQLQNSRSQLYNQSQDYTQTSHTSTQTESLTLMLENDVETLVVSEQNIATELYIQEINDKFRTTLTLYSGMDPAVRPKLPKLRYSRDLFRLVNLFNENILNQFISDDTQLIDIHTLIYCTAVVICEELKFKISQDTGNLRPKKNVKPAWQQRLEKDIDKLRADCSRLTQYINNNRSSKVVRRVEAIFRSSFTHTRHENNNRKPEEYLDTLKQKLSLKVHRLKRYKKAQQRKIDNTIFSTNEKMFYRNLRKPDTNTNAENNSDQPTKEQLEAYWSSIWEEQVQHNDKAAWIVEEETKWGAIEEMDFIEITESDVTHVTGRLHNWKAPGIDKIHNFWYKKLTSLHKPIAKNLTEIILGQQNIPEFIATGITYMLPKTKNSPQPSLYRPITCLPTIYKILTSLITTKINSHIERHNIMAEEQKGCRRGHMGCKEQLIIDSTIHKHASTKNRNLHCTYIDYKKAFDSVPHSWLIQILQIYKINSKIIDFLRNIMLQWKTTLQLNHDHDRVITRQIYIKKGIYQGDSLSPLWFCLALNPLSHLLQRSRAGYCLKHSTDQTTISHLIYMDDIKLYAQTEKDMRNLVEATAEFSQDINMQFGLDKCKTLHIIRGRIRPGSYVVNDTDTITAMESNDLYKYLGYMQLKGLDHVRIKEALTTEYKKRLNTLCKTQLSGKHLIKAINTFAIPILTYSFGVIKWTKTDTEQLERITRTTLTKNNHLHPKSAIERLTIKRQNGGRGLIDVQHMWRKQVVKLKTFFETKSRTSKIHKAVVLHDSNYTPLNLNAQLDTQNIINDNPQTQKMEDWKRKVLHGRHPHDLEQSHVNIIASNKWLKVGSLFPETEGFMIAIQDQIINTRNHRKYIIKDPSVRDDKCRKCHIQPETIQHITGACTTLTQTDYTHRHYQVANVIHQNLAVKYTLIQNTNTPYYNYTPQTVLENDTHKLYYDRAILTDRTIHYNRPDITLQDKTNKITYLIDIAIPNTHNIKKTITEKISKYAELKDEVTRIWRQEKVYVVPIVLSTTGVIPNCLLHSLKLLNLKEALYITLQKAVILNTCRIVRKFMQIDENELGPHHNTPST

SEQ ID NO: 21204 - protein, 1159 aa, Mythimna impura
MRWSKEVNIFIMRTYLYITKLETDMTTYRQQLHERFTRQYPEITVSEQRIADQRRAIVRNKLLSQEIIEQLKEETRLQLQESEGNTGTTTLSQNIIEIDRHPQTQLHTQLQNSRSQLYNQSQDYTQTSHTSTQTESLTLMLENDVETLVVSEQNIATELYIQEINDKFRTTLTLYSGMDPAVRPKLPKLRYSRDLFRLVNLFNENILNQFISDDTQLIDIHTLIYCTAVVICEELKFKISQDTGNLRPKKNVKPAWQQRLEKDIDKLRADCSRLTQYINNNRSSKVVRRVEAIFRSSFTHTRHENNNRKPEEYLDTLKQKLSLKVHRLKRYKKAQQRKIDNTIFSTNEKMFYRNLRKPDTNTNAENNSDQPTKEQLEAYWSSIWEEQVQHNDKAAWIVEEETKWGAIEEMDFIEITESDVTHVTGRLHNWKAPGIDKIHNFWYKKLTSLHKPIAKNLTEIILGQKNIPEFIATGITYMLPKTKNSPQPSLYRPITCLPTIYKILTSLITTKINSHIERHNIMAEEQKGCRRGHMGCKEQLIIDSTIHKHASTKNRNLHCTYIDYKKAFDSVPHSWLIQILQIYKINSKIIDFLRNIMLQWKTTLQLNHDHDRVITRQIYIKKGIYQGDSLSPLWFCLALNPLSHLLQRSRAGYCLKHSTDQTTISHLIYMDDIKLYAQTEKDMRNLVEATAEFNQDINMQFGLDKCKTLHIIRGRIRPGSYVVNDTDTITAMESNDLYKYLGYMQLKGLDHVRIKEALTTEYKKRLNTLCKTQLSGKHLIKAINTFAIPILTYSFGVIKWTKTDTEQLERITRRTLTKNNHLHPKSAIERLTIKRQNGGRGLIDVQHMWRKQVVKLKTFFETKSRTSKIHKAVVLHDSNYIPLNLNAQLDTQNIINDNPQTQKMEDWKRKVLHGRHPHDLEQSHVNIIASNKWLKVGSLFPETEGFMIAIQDQIINTRNHRKYIIKDPSVRDDKCRKCHIQPETIQHITGACTTLTQTDYTHRHNQVANVIHQNLAVKYTLIQNTNTPYYNYTPQTVLENDTHKLYYDRAILTDRTIHYNRPDITLQDKINKITYLIDIAIPNTHNIKKTITEKISKYAELKDEVTRIWRQEKVYVVPIVLSTTGVIPNCLLHSLKLLNLKEALYHLTKSCYPKYMSNC

SEQ ID NO: 21205 - protein, 1301 aa, Euproctis similis
MEMHLRNRRIGPLPGGDRRGTSGADAGCDSIRSVGGEELNRRAPSGSPEDTTANPTDYRQTDSDNISVNSIISDPIEPYSPSSNSFIPTPVSSLGSDSSRTHSPVLTVAQEVNTFIPASTKAGKPRVRMRWSKEVNTFIMRTYYHITKLETDMTIYRKRLHELFSRQYPLITVTEQRISDQRRAIIRNKLLSQETLEQLKEEVRITLSEDENNAPNRNLDSFTDTQTEDTPDITSPTVTTHSQSRPYPLLQTINTSTQTETITLTLENDIEILVDNNNQTLDTYTGELESKLRTALTKYSGMKPADRPKLPKLKYSIQLTKLTHLFNQHILHTYLNKDSQLTDIHTLIYCTAVVISEELNYKISHNHQNFKTRDNRKPAWQLRLEKDIEKIRADCGRLTQYIKNNRSKKVVKRVEQIFKNHLIHTRHEGDNKNPAEYLDTLKQKLAVKVNRLKRYKKALQRKEENALFDSNEKSFYRNLKTSQIHISPSTNIEIPSKTDLEHFWSGIWEEKMEHNDKADWILEELKQWDTIEEMPFEEITENDIKDVTLKLPNWKSAGIDKVHNYWYKKFTILHKSIARILTDIILERENIPDFLTIGITYMIPRNKYSSQPSQYRPITCLPTIYKILTSVIAHKINNHAEQNNIIAEEQKGCRQGHMGCKEQLLIDSVIHRNASVKNRNLHCTYIDYKKAFDSIPHSWLLKILQIYKINTKLIRFLSNIMLHWKTTIQLNYNQTTIKTREININKGIFQGDSLSPLWFCLALNPLSHLLHRCKVGYCLKHTTEQTNISHLIYMDDIKLYAQSKKQMEKLLDVTTEFSKDINMQFGLDKCKTLNIIKGKIQPGDCSVDDDNIIAAMEPTDFYKYLGYNQTKGLNHTLIKENILLEYKNRVNTLCKTQLSAKNLFKALNTFAIPVLTYSFGVIKWSKTNLELLERVTRTTLTKHNHLHPISAIERLTIRRETGGRGLIDIQQLWQKQIQNLRTFFHKKSRASSIHKAITHNDLNFTPLNLSDFQNTLSNFNTDHQINQIESWKKKTLHGRHPHDLEQNHVDQIASNKWLKVGSLFPETEGFMIAIQDQIINTKNYRKFIIKDSSVTDDKCRKCYSQPETIQHITGACVTLTQTDYTHRHNQLVNIVHQNLALKHNLIPNSLTPYYNYTPQTVLENTTHKLYYDRAILTDKTIHYNRPDIVLQDKLNKITYMIDISVPNTHNVQKVISEKINKYTELKEEITRIWRQDKVYIVPIVLSTTGIIPKHLHGSIKLLGLKESLYIILQKAAILNTCRIVRKFMALDENSSHNVPST

SEQ ID NO: 21206 - protein, 1313 aa, Mamestra brassicae
METRSKRKRLGPLPGGDRRGAPGADAGCLSMRTVSGEELSRRAPTDKDTTVEISGDGDRLTNRTDTPVEPYSPSTVSYTPSRTSSPSVPSSPPLSSLNTVPPTPALNVAREVSTFLPASTKAGKARVRMRWSKDVNVFIMRTYLYITKLETDVTTYRQQLHAHFTRQYPEITVTEQRISDQRRIIVRNKLLSQEVIDQLKEEVRTQLSQEESVNVADNITITQNINENTLQGQPQALNQSQPINNQSQPYHQSQLSTQTSHISTQTEYLSLTLENDIETLVVENQNLTTDIYVQDIHDKFRSTIALYSGMDPAARPKLPKLKYTPNLFRLVNLFNEHILNQFLSDDAHLLDIHLLIYCTAVVISEELNFKITDHTQNTRVRQNTEPGWQQRLVNDIEKLRADCGRLTQYINGSRSNKVVKRVEAIFRNSFTHTRHENSNRKPEEFLDTLKQKLALKVHRLRRYKKAQQRKNDNAIFSTNEKIFYRNLNEPHTNTSDENSSDTSNLPTKEQLETYWSSIWEEPVQHNNEASWIADEDAKWRGIDKMEFIEVTESDITHITARLHNWKSPGIDRIHNFWYKKLTSLHKYLAKNLTDIILGKQHTPDFITTGITYMLPKTKNSPEPSQYRPITCLPTIYKILTSAITRKISSHIIHNNIIAEEQKGCRQGHMGCKEQLIIDSTIHKHASTKNRNLHCTYIDYKKAFDSVPHSWLIKILEIYRIDPKIIDFLRRIMLQWKTTLQINFNRHIVTTRQISIKKGIYQGDSLSPMWFCLALNPLSHLLQRCKTGYCLKHTTEETTISHLIYMDDIKLYAKTEKDMKKLVDVTSEFSKDINMRFGIDKCKTLHILRGKVRPGDYVVNNTDTIAAMEPTDLYKYLGYAQLKGLDHIRIKNTLTTEYKRRLNAICKTQLSSKYLIKAINTFAIPVLTYSFGVIKWTKTDAEQLERTTRTTLTKHNNLHPKSAIERLTVKRQHGGRGLIDIQHLWRKQVSRLKTFFYTKSRTSTIHKAIVINDLNYTPLNLSSQNESESTINDDPQIQKIEEWKKKVLHGRHPHDLELSHINKLASNKWLKIGNLFPETEGFIIAIQDQIINTKNYRKFIIKDPTVTNDKCRKCHTQPETIQHITGACTTLTQTDYTHRHNQVANVIHQKLALKHALIQNTNTPYYNYTPQTILENTTHWLYYDRAILTDRTIHYNRPDITLQDKINKITYLIDIAVPNTHNIQKTITEKISKYADLKDEVMRIWRQEKVYVVPIVLSTTGVIPNHLLHSLKLLDLKENLYITLQKAAILNTCRIVRKFMQIEENEVGPHHTTN

SEQ ID NO: 21207 - protein, 1324 aa, Mesoligia furuncula
METRSKRKRIGPLPGGDRRGALGADAECLSMRTVSGEELNRRVPTDKDATADIIDDGDRLTDRINTPVEPYSPSTVSYTPSRPSTPSIPSSPSIPSSPPITSFNSVQPNSTLNVTREVSTFLPASTKAGKARVRMRWSKEVNLFIMRTYLYITKLETDLTTYRKQLHELFTRQYPEITVTEQRISDQRRIIVRNKLLSQDIINQLKEEVRTQLQGESENTAGAISIANTQNTTAYNQQEQPCSQTEPIIQSQPITQSQPYFQSQAYSETTHTSTQTESITIMLENEIETLADISINQSTDTHIQEIHDKFKTALTQYSGMDPAARPRLPKLRYTPKLSQLVHLFNQNILQQYISEETHLIDIHTLIYCTALVISEELNFKITEYTGNSRQRNINKPAWQQRLEKDIEKLRADCGRLTQYINNNRSNKVVKRVDAIFKNMATHTRHENDNRKPEEFLDTLKQKLALKVHRLRRYKKAQERKHDNSLFATSEKNFYRNLQTAQTNTNTLTTENNIELPTAEQLETFWSGIWEEQVQHNNNSDWITDEETKWSSLEEMEFVELTESDITCVTARLHNWKSPGIDKIHNFWYKKLESLHKVLAKNLTQIILGKQNIPEFLATGITYMLPKAQYSSQPSQYRPITCLPTIYKILTSAITTKINKHIENHNIIAEEQKGCRRGHMGCKEQLVIDSIIHKHANTKHRNLHCTYIDYKKAFDSIPHSWLIQILQIYKINSKIIDFLQDIMARWRTTLQLNYRNNAITTRQISIKKGIYQGDSLSPLWFCLALNPLSDLLHRSQAGYSIKHTTEETIISHLIYMDDIKLYSKSEKEMKKLIDITTEFSKDINMQFGLDKCKTVHIIRGKIKPGDYPINNTDTITAMEPTDLYKYLGYKQLKGLDHSTIKYTLNSEYKRRVVAVCKTQLSGKHLIKALNTYAIPILTYSFGVLKWSKTDIQQIERTTRTTLTKHNNLHPKSAIERLTIKRQYGGRGLIDVHHLWQKQIAKLRTFFHSKSQTSNIHKAVVMNDISYTPLNLHDQIDIQHTSHEDPHKQKVEDWKKKVLHGRHPHDLEQSHIDTIASNKWLKIGNLFPETEGFIIAIQDQIINTKNYRKFIIKDPTITNDKCRKCHSQPETIQHITGACTTLTQTDYTHRHNQVANVIHQKLALKYKLVQDTNTPYYKYVPQTVLENTTHKLYYDRAILTDRTVHYNRPDITLQDKVNKVTYLIDIAVPNTHNLQKTIGEKISKYVELKEEVSRIWRQEKVYVVPIVVSTTGVIPNHLHHSLKQIDLKDSIYITPQKAAILNTCRIVRKFMQIDENEITPHNINSL

SEQ ID NO: 21208 - protein, 1319 aa, Mesoligia furuncula
METRSKSKRIGPLPGGDRRGAPGADAGCLSMRTVSGEELNRRAPTDKDTTAEIIDDGDRLTDMTNTPVEPYSPSTVSYTPSRPSSPSIPSSPTLLSPPIRSLNLIPPTPTLNVAREVSSFLPASTKAGKARVRMRWSKEVNQFIMRTYFYITKLETDMTTYRQQLHELFTRQYPEITVSEQRISDQRRAIVRNKLLSREIIEQLKEETRLQLQEAENNTDGNAIPLSQNTNEIAEQSHPQPCSQVQSYTQSQSYNQSQAYTQTSHTSTQTESINLTLENDIETLTFADQNLTTDIYIQEIHDKFRTTLAQYSGMDPAVRPKLPKLRYSPCLFRLVNLFNENILTQFISDDTQLIDIHTLIYCTAVVVSEELNFKITQHTGNSRSKQNIKPAWQQRLEKDIEKLRADCGRLTQYINNIRSNKVIRRVEAIFRSSVTHTRHENNNRKPEEFLDTLKQKLALKVHRLRRYKKAQQRKNDNVIFATNEKMFYRNLHKPKTNTNDDNNTVAPDHPTKEQLETYWSSIWEEQEQHNDKATWITEEEIKWRAIEEMEFVEITEADITQLTGRLHNWKSPGIDKIHNFWYKKLTSLHKPIAKNLTEIILGRQNIPDFIATGITYMLPKTINSPQPSQYRPITCLPTIYKILTSAITTKINSHIEHHNIMAEEQKGCRQGHMGCKEQLIVDSTIHKHATTKNRNLHCTYIDYKKAFDSVPHSWLIKTLEIYRINSKIIDFLRNIMPLWKTTLQINSNHNNVTTRQISIKKGIYQGDSLSPLWFCLALNPLSHLLQRCQVGYCLKHTAEQTTVSHLIYMDDIKLYAQTEKDMKKLVEVTAEFSLDINMQFGLDKCKTLHIIRGKIRPGDYVVNNTDTITAMEPTDLYKYLGYTQLKGLDHVRIKETLTAEYKRRLNTICKTQLSSKNLIKALNTFAIPILTYSFGVIKWTKTDTEQLERITRTTLTKHNNLHPKSATERLTIKRQHGGRGLIDIQHLWQKQVFRLKTFFYSKSRTSNIHKAIVQNDFNYTPLNLSEQLDTPQITSDDPQIQKIENWKKKVLHGRHPHDLEQSHVNKVASNKFLKIGNLFPETEGFIIAIQDQIINTKNYRKFIIKDPSVTNDKCRKCHSQPETIQHITGACTTLTQTDYTHRHNQVATIIHQKLGLKYTLIQNTNTPYYNYTPQTILENDTHKLYYDRAILTDRTIHYNRPDITLQDKINKVTYLIDIAVPNTHNIQKTISEKISKYAELKDEITRIWRQQKVYVVPIVLSTTGVIPNYLLHSLKLLNLKETLYITLQKAAILNTCRIVRKFMQIDENEIGPHHNTSIT

SEQ ID NO: 21209 - protein, 1190 aa, Mesoligia furuncula
MRWSKEVNLFIMRTYLYITKLETDLTTYRKQLHELFTRQYPEITVTEQRISDQRRIIVRNKLLSQDIINQLKEEVRTRLQGESENTAGAITTALTQNITAYNQQEQPCSQIEPIIQSQPITQSQPYFQSQAYSETTHTSTQTESITIMLENEIETLADININQSTDTHIQEIHDKFKTALTQYSGMDPAARPRLPKLRYTPKLSQLVHLFNQNILQQYISEETHLIDIHTLIYCTALVISEELNFKITEYTGNPRQRNINKPAWQQRFEKDIEKLRADCGRLTQYINNNRSNKVVKRVDAIFKNMATHTRHENDNRKPEEFLDTLKQKLALKVHRLRRYKKAQERKHDNSLFATNEKNFYRNLQTAQTDTNTLTTENNIELPTAEQLETFWSGIWEEQVQHNNNSDWITDEETKWSSLEEMEFVELTESDITCVTARLHNWKSPGIDKIHNYWYKKLESLHKVLAKNLTQIILGKQNIPEFIATGITYMLPKAQYSPQPSQYRPITCLPTIYKILTSAITTKINKHIENHNIIAEEQKGCRRGHMGCKEQLVIDSIIHKHANTKHRNLHCTYIDYKKAFDSIPHSWLIQILQIYKINSKIIDFLQDIMARWRTTLQLNYRNNAITTRQISIKKGIYQGDSLSPLWFCLALNPLSDLLHRSQAGYAIKHTTEETIISHLIYMDDIKLYSKSEKEMKKLIDITTEFSKDINMQFGLDKCKTVHIIRGKIKPGDYPINNTDTITAMEPTDLYKYLGYRQLKGIDHSTIKYTLNSEYKRRVIAVCKTQLSGKHLIKALNTYAIPILTYSFGVIKWSKTDIQQIERTTRTILTKHNNLHPKSAIERLTIKRQCGGRGLIDVHRLWQKQIAKLRTFFHSKSHTSNIHKAVVMNDISYTPLNLHDQIDIQHTSNEDPHKQKIEDWKKKVLHGRHPHDLEQSHIDTIASNKWLKIGNLFPETEGFIIAIQDQIINTKNYRKFIIKDPAITNDKCRKCHSQPETIQHITGACTTLTQTDYTHRHNQVANVIHQKLALKYKLIQDTNTPYYKYVPQTVLESTTHKLYYDRAILTDKTVHYNRPDITLQDKDNKVTYLIDIAVPNTHNVQKTISEKISKYADLKEEVSRIWRQEKVYVVPIVVSTTGVIPNHLHHSLKQIDLHDSIYITLQKAAILNTCRIVRKFMQIDENEITPHNINSS

SEQ ID NO: 21210 - protein, 1003 aa, Xestia c-nigrum
MDPAARPRLPKLKYTPNLFRLVNLFNETILTQYISDDTQLIDVHLLIYCTAVVISEELNFKITNHTGNPRTRPNIAPAWQQRLEKDIEKLRADIGRLTQYISGCRSNKLVKKVEIIFGNNLTHTRHEQNNRKPEEFLDTLKQKLALKVHRLKRYKKAQQRKNDNAIFTTNEKVFYRKLHIPKNDRNYENNTNTPNLPSKEQLETYWAGIWEEQKQHNDKASWIADEETKWRDIDEMEFVEVTESDITYITARLHNWKSPGIDKIHNFWYKKLTALHKSLAKNLTDIVLGKQNIPEFITTGITYMLPKTKYTSEPSQYRPITCLPTIYKILTSAITKKINSHIIHHNIIAEEQKGCRQGHMGCKEQLIIDSTIHKHATSKNRNLHCTYIDYRKAFDSVPHSWLIQILEIYRINPKIIDFIRHVMLQWKTTLQINSSNNNVTTRQISIKKGIYQGDSLSPLWFCLALNPLSHLLQSCGAGYCLKHSTDETTISHLIYMDDIKLYAKSEKDMKKLVDLTAEFSKDINMQFGLEKCKTLHIVRGKVRPGDYAVNESDSITALEPTELYKYLGYTQLKGLDHVKIKETLTTEYKKRVNAVCKTQLSGKNLIKALNTFAIPVLTYSFGVIKWTKTDTEQLQRTTRTTLTKHNNLHPKSAIERLTIKREHGGRGLIDIQHLWRKQISRLKSFFHTKSHNSNIHKAIVTNDLNYTPLNLSDQIEAQNTTNEDPQTQKIEDWKRKVLHGRHPHDLEQSHINKLASNKWLKIGNLFPETEGFIIAIQDQIINTKNYRKYIIKDPTVTNDKCRKCHLHPETIQHITGACTTLTQTDYTHRLNQVANVIHQKLAIKHTLIQNTNTPYYNYKPEATLENTTHKLYYDRAILTDRTTHYNRPDLILQDKIKKVTYLIDIAVPNTHNIQKTITEKISKYAELKEEVTRIWRQEKVYIVPIVLSTTGVIPNHLIHSLKLLDLKQTLYITLQKAAILNTCRIVRKFMQIEENEIGPYHNT

SEQ ID NO: 21211 - protein, 1316 aa, Busseola fusca
METRSKRKRIGPLPGGDRRGALGADAKCLSMRTVSGEELSRRTPTDKDATAEVIDDGDRQTNRTDTPVEPYSPSTVSYAPSRTSSPSIPSSPIPLPSSPLITSSNTLSPTPALNVAREVSTFLPASTKAGKPRVRMRWSKEVNLFIMRTYLYITKLETDFTTYRKQMHELFTRQYPEITVTEQRISDQRRIIVRNKLLSQEIIDQLKEETRIQLQETENNTSGDVIPLSENTTEIAEQSHSQPHTQVTLYTQSQPNIQSQASNTSTQTESIILTLENDIETLTVADQNLTADICIQEILDKFRTTLALYSGMDPAVRPKLPKLRYSPNLFRLVNLFNENILHQFISDDTQLIDLHTLIYCTAVVISEELNFRITHHTGNTRPKQNIKPAWQQRLEKDIEKLRADCGRLTQYINNIRSSKVVRRVEAIFRSNVMHTRHENNNRKPEEFLDTLKQKLALKVHRLRRYKKAQQRKNDNAIFNTNEKFFYRNLHKPDTDTDNDNNTDPDQPTKEQLETYWSSIWEEQEHHNDKAMWITEEEIKWRAIEEMEFVEITEADITQLTGRLHNWKSPGIDKIHNFWYKKLTTLYKPIAKNLTNIILGHQNIPNFIATGITYMLPKTKNSPQPSQYRPITCLPTIYKILTSAITMKINSHIEHHNILAEEQKGCRRGHMGCKEQLIIDSTIHKHATTKNRNLHCTYIDYKKAFDSVPHSWLIQILEIYRINSKIIDFLRKIMPLWKTTLQINGKYNNITTRQISIKKGIYQGDSLSPLWFCLALNPLSHLLQRCRAGYCLKHTTEQTTVSHLIYMDDIKLYAQTEKDMKKLVDATAEFSLDINMQFGLDKCKTLHIMRGKIRPGNYVVNSTDTITAMEANDLYKYLGYTQLKGLDHVRIKETLTIEYKRRLNIICKTQLSSKNLIKAFNTFAIPILTYSFGVIKWTKTDTEQLERITRTTLTKHNNLHPKSAIERLTIKRQNGGRGLIDIQHLWQKQVYRLKTFFQSKSHTSNIHKAIVQNDFNFTPLNLNEQLDTPQNTSDDPQKLKIEDWKKKVLHGRHPHDLEQSHVNQVASNKFLKIGNLFPETEGFIIAIQDQIINTKNYRKFIIKDPTVTNDKCRKCHIQPETIQHITGACTTLTQTDYTHRHNQVANVIHQKLALKYTLIQDTNTPYYNYTPQTILENDTHKLYYDRAILTDRTIHYNRPDITLKDKINKVTYLIDIAVPNTHNIQKTISEKISKYAELKDEIIRIWHQKQVYVVPIVLSTTGVIPNHLLHSLKLLKLKETLYITLQKAAILNTCRIVRKFMQIDENEIGPHHNTSTP

SEQ ID NO: 21212 - protein, 1300 aa, Muschampia nomas
METRLQKKKRSGPLPEGDRRGTPGADAGCLSMRTVSGEELSRRTPTGSSENATAEYDILTDRTTPIEPYSPSTKSYTPSIRTSSSSSTSSSNRHSPSPTLGVAQVANAFLPASTKAGKPRVRMKWSKETNLFIMRAYYYITKLETDLTTYRKQLHEYFSREYPEIKVTEQRIADQRRTIVKNKLLNQEILEELKQEVKLQLEEDSRNYTCTDISLPLGNHNVNASRSNIFESLSDIHNPSHSSNIAQCSHNTGTLTINNQSSHNTNTQINSITCTLENDINVAEDNSVATNIYIQEIDQKFRMALTQYSSKNPEDRPKLPKLRYCPQLFQLINIFNHDILNKFIFEDTQLSDTHTIIYCTALIISQELNYKIKEFTQNVTPKESNKPPWQIRLEKDIEKLRAECGRLTQYIKGNRSKKIIKYVQTIFKTKYIHTAHENDNRKPEEFLDTLKQKLALKVNRLRRYKKAQQRKNDNIVFTTNEKIFYKKLLKPRAVTENEPDIPTKEQLEEFWSGIWEDEIQHNEKASWIKDEEMKWSTIEEMTFVEITENDVTHITHRLHNWKSPGIDKIHNFWYKKLISLHKLIAKNLTDIILGKQSIPEFIATGITYMLPKSKYTSNPAQYRPITCLPTIYKILTSAITLKINRHIEQNNILAEEQKGCRRGHMGCKEQLIIDSTIHKHATSKNRNLHCTYIDYKKAFDSIPHSWLLKILQIYKINRKVIHFLKNIMTQWKTTLYLSTQHKKINTRQIFIKKGIYQGDSLSPMWFCLSLNPLSHLLHRCQVGYSLKNDTANTNISHLIYMDDIKLYAKTELGMRKLLDTTTHFSRDINMDFGLDKCKLLHIKRGKIQPGDYELNNTDRITAMESTDLYKYLGYSQLKGLNHTAIKETLTTEYRNRVNTLCKTQLSGKHLIKSINTYAIPILTYSFGIVKWTKTDIEQLERITRTTLTKHNNLHPKSAVERLTIKRENGGRGLIDLYQLWKNQINRLKTFFYTKSQTSHIHKAIVLNDHNYTPLNLLTPDLTLTQDSINTQKEKIEHWKKKVLHGRHPSDLEQAHVDAKASNIWLQIGNLFPETEGFIIAIQDQVINTKNYRKHIMKDPTIINDKCRKCHTQPETIQHITGACTTLTQTDYTHRHNQVANIIHQKLAVKYKLIQNSNTPYYNYVPQTVLENKSHKLYYDRAILTDKTIHFNRPDITLQDKLNKVTFLIDIAVPNTHNLQKTITEKITKYTELKEEVTRIWKQKKVFVVPIVLSTTGVIPNHLRHSIKLLDLKDTTYINLQKAAILNTCRIVRKFMQTDEN

SEQ ID NO: 21213 - protein, 1273 aa, Arctia plantaginis
MQNKTNKYNLRPLPGGRRDSIRNNNINNQTDRQTDNDNISLNSLTSLSVTEPYSPSTSSYRPTPVSFVDEDSHETPNPTLAVTQEVNAFLPASTKSGKPRVRMRWSKEVNLFIMRTYYQITKLETDMTTYRKQLHELFTRHYPDINVTEQRIADQRRTIVRNKLLTEETLHILKEEIRMQLQQNEHIYEYIENNSNPQLHNTQSVTTALPTQSQPHTITQSSHISTQPETITLTLENDIEIMQNVNPSSDNIQKIQEKFRTALALYSRMDPITRPKLPKLKYSRKLSELTHVFNHNILHQFLSEDTQLTDIHTLIYCTALVISEELNYKIIDHPRNILRKNSKPPWQIRLEKDIEQLRADCGRLTQYINNNRSNKIVKRVEQIFRRQCTHTRHENNNRKPEEYLDTLKQKLALKVHRLKRYKKAQLRKNDNMLFTLNEKSFYRNLSKPQTATTRPENIDIPTQTQLETFWSGIWEEPVQHNDKADWITEEENKWNSIEEMEFDCITEDDIAHVTGKLHNWKSPGIDKIHNYWYKKITLFHKPIAKNLTYIILGKQNIPEFIGMGITYMLPKTAHSPQPSQYRPITCLPTIYKILTSAIAHKINMHIEHNHIIAEEQKGCRRGHMGCKEQLIIDSTIHKHATTKNRNLHCTYIDYKKAFDSIPHSWLLKILHIYKINPKITDFMRDIMSHWKTTLHLNMNDRTVTTRQISIKKGIYQGDSLSPLWFCLALNPLSHLLQRCQAGYRLRNSTEETIISHLIYMDDIKLYAKSDKEMTKLLQNTTKFSKDINMEFGLDKCKTLHIIRGKIRPGDYAVDESSTIAAMESTDLYKYLGYKQLKGLDHTSIKQILATEYKSRTNTLCKTQLSAKNLIKALNTYAIPILTYSFGVIKWTKTDIEQIERTTRTTLTKHNNLHPKSAIERLTIKRQNGGRGLIDIYHLWQKQVYNLKTFFRTKSLTSNIHKAITLNDYNFTPLNLNDHTGIHNPNNIDPQADKIENWKKKVLHGRHPHDLEQPHIDTIASNSWLKIGNLFPETEGFIIAIQDQIVNTKNYRKYIIKDATVTDDKCRKCHIQSETIQHITGACITLTQTDYTHRHNQITNIIHQKLALKHHLIQNTNTPYYNYTPQSVLESSSHKLYYDRAILTDRTIHYNRPDITLQDKINKTTYLIDIAVPNTHNLQKTITEKISKYTELKEEIIRIWRQEKVYIVPIVLSTTGVIPKHLHHSLKLINLNESVYFNLQKAAILNTCRTVRKFMDIEENGTAQHTQQPPSTST

SEQ ID NO: 21214 - protein, 766 aa, Papilio xuthus
MAFDDITQTDIMNITSKLHNWKAPGIDKIHNFWYKKLTALHNPIAKNLTDIILGKQQIPEFIATGITYMLPKTTHCTLPSQYRPITCLPTIYKILTSAITRKINTHIEHNNILAEEQKGCRRGHMGCKEQLIIDSTIHKHATDKNRNLHCTYIDYKKAFDSIPHSWLLQILDIYKVNPTLTNFLRNIMSHWKTSLQLNSQNNTITTRPIFIKKGIYQGDSLSPLWFCLALNPLSNLLHGCRAGYCLKHTTEETTISHLIYMDDIKLYASTEKKMKTLLDNTTQFSKDIKMEFGLDKCKTLHIVRGKIRPGNYEVDGTNIIAAMESTDVYKYLGYKQLKGLDHTNTKHTLTTEYKKRINALCNTQLNGKLLIKSINTYAIPILTYSFGIIKWTKTDIEQIERTTRTTLTKHNHLHPKSAIERLTIKRQNGGRGMIDIHHLWQKQIHNLKSFFHTKSLTSNIHKAIVYNDNNYTPLNLHDHTNTQNQQNNDPQIHKIENWKKKTLHGRHPHDLEQTHIDKEASNKWLKVGSLFPETEGFMIAIQDQIINTRNYRKYIIKDPTINDDKCRRCHTQPETIQHITGACTTLTQTDYTHRHNQVANIIHQNLALEYNLIQNTNTPYYNYSPQTILENTTHKLYYDRAILTDKTIHYNRPDVTLIDKLNKTTYLIDMAVPNTHNIQKTITEKIGKYAELKEEVSRIWRQDKVYVVPIVLSTTGIIPKHLHHSLKLLDLKPTLYITLQKAAILNTCRIVRKFMQIDENNITEHS

SEQ ID NO: 21215 - protein, 1166 aa, Noctua janthe
MTTYRQQLHELFIRRYPEITVSEQRISDQRRTIVRNKLLSQEEIDKLKVEVRTQLHLESVIDEDTNNIAVIQNTIENIQQEQPQSYDQSEPYTQSQPYYYLSSQAYSQITHTSTQTENVTIMLENDIEVLANINQNPPTDTRIREIHDKFKTALTQYSGMDPAARPKLPKLRYTPKLAQLVHVFNQNILTQYISKDTQLTDVHTLIYCTALVISEELNFKITEYTGNARQSNVNKPAWQQRLEKDIEKLRADCGRLTQYINNNRSNKVVKRVEVIFKNRAVHTRHENHNRRPEEFLDTLKQKLALKVHRLRRYKKAQERKNDNALFATNEKNFYRKLQKPQTDTDTPTTENNIELPTTTQLETFWAGIWEEQIHHKETSEWIQDEETKWSSLEEMEFIELSESDITSVTARLHNWKSPGIDKIHNYWYKKLESLHKILAKNLTEIILGKQNIPEFIATGITYMLPKTHYSSQPSQYRPITCLPTIYKILTSAITTKINKHVEHHNIIAEEQKGCRRGHMGCKEQLVIDSIIHKHAATKNRNLHCTYIDYKKAFDSIPHSWLIQILHIYKINPQIIEFLRNIMSRWKTTLQLNYRNNAVTTRQIAIKKGIYQGDSLSPLWFCLALNPLSHLLQRCQAGYCLKQTTEETTISHLIYMDDIKLYSKTEKEMKKLIDITTEFSKDINMQFGLDKCKTVHIIRGKIKPGDYAINTTDTITAMEPTDLYKYLGYRQLKGLDHTTIKQTLNTEYKRRVVAVCKTQLSGKHLIKALNTYAIPILTYSFGVIKWSKTDIQQIERTTRTTLTKHNNLHPKSAIERLTIKRQNGGRGLIDIHHLWQKQISRLKTFFNSKSHTSNIHKAIVMNDNSYTPLNLNEQTDTQNTNNEDPQKQKLEDWKKKVLHGRHPHDLEQPHIDTLASNKWLKIGSLFPETEGFIIAIQDQIINTKNYRKFIIKDPTMTNDKCRKCHTQPETIQHITGACTTLTQTDYTHRHNQVANIIHQNLARKHKLIQDSNTPYYKYVAQPVVENTTHKLFYDRGILTDRTIHYNRPDIILQDKVNKVTYLIDIAVPNTHNLQKTIGDKISKYAELKEEVTRIWRQEKVYVVPIVVSTTGVIPNHLHHSLKLLDLKDSIYITLQKAAILNTCRIVRKFMQIDENEISHNSHTHTLR

SEQ ID NO: 21216 - protein, 1041 aa, Noctua janthe
MLENDIETIAVPYQHLTTDTYIQEINDKFRTTITQYSGMDPAARPRLPKLKYTPNLFRLVNLFNESILTQFISDDTQLIDIHLLIYCTAVVISEELNFKITDHTGTPRTRQNLAPAWQQRLEKDIEKLRADIGRLTQYINGCRSNKLVKRVEVIFRNNLTHTRHEKNNRKSEEFLDTLKQKLALKVHRLRRYKKAQQRKKDNTTFATNEKMFYRNLHKPQTDTIDKNNTNIPNLPTKEQLEEYWASIWEEPVQHNDKASWIAEEEVKWRGVDEMEFLEVAETDITHITARLHNWKSPGIDKIHNFWYKKLTSLHKSLAKNLTDIILGQQNTPEFIATGITYMLPKTTNSPQPSQYRPITCLPTIYKILTSAITKKISSHIERHNIIAEEQKGCRQGHMGCKEQLIIDSTIHKHATSKNRNLHCTYIDYKKAFDSVPHSWLIQILEIYRINPKIIDFIRNIMLQWKTTLQINYNHNTVTTRQISIKKGIYQGDSLSPLWFCLALNPLSHLLQGCGAGYCLKHTTDETIISHLIYMDDIKLYAKTENDMKKLVDVTAEFSKDINMQFGLEKCKTLHIVSGKVRPGDYVVNDTDTISAMEQTDLYKYLGYAQLKGLDHTRIKNTLSNEYKRRVNAICKTQLSGKHLIKALNTFAIPVLTYSFGVIKWSKTDTEQLERTTRTTLTKHNNLHPKSAIERLTIKRQHGGRGLIDIQHLWRKQISRLKSFFHSKSRTSSIHKAIVINDINYTPLNLSHQIETLNTTNDDPQQHKIEDWKRKVLHGRHPHDLEQSHINKLASNKWLKIGSLFPETEGFIIAIQDQIINTKNYRKYIIKDPTATNDKCRKCHSQPETIQHITGACTTLTQTDYTHRHNQVANVIHQKLALKHTLIHNTSTPYYNYKPEATLENTTHKLYYDRAILTDKTIHYNRPDIILQDKINKVTYLIDIAVPNTHNIQKTITEKISKYAELKDEVTRIWRQEKVYVVPIVLSTTGVIPNYLLHSLKLLDLKESIYIILQKAAILNTYRIVRKFLQIEENEIGPHHNT

SEQ ID NO: 21217 - protein, 1315 aa, Agrochola circellaris
METRSKSKRIGPLPGGDRRGAPGADAGCLSMRTVSGEELNRRAPTDKDATAEIIDDGDRLTDRTNTPVEPYSPSTVSYTPSRPSSPSIPSSPIPPSPPITSLNSISPTPTLNVAREASSFLPASTKAGKARVRMRWSKEVNLFIMRTYFYITKLETDMTTYRQQLHELFTRQYPEITVSEQRISDQRRAIVRNKLLSQQIIEQLKEETRIKLQEAENNAGANAIPLSQNITEISDQSHIQVESYTQSQPYNQSQAYTQTSHTSTQTETITLTLENDIETLSGADENLTTDMYIQQIHDKFRTTLAQYSGMDPTVRPKLPKLRYSPNLFRLVNLFNENILNQFISNDTQLIDIHTLIYCTAVVISEELKFKITQHSGNARPKQNIKPAWQQRLEKDIEKLRADCSRLTQYINNNRSSKVVRRVEAIFRSSFTHTRHEDNNRKPEEFLDTLKQKLALKVHRLRRYKKAQQRKNDNAIFATNEKMFYRNLHKPDTDTSNENNTDAPDRPTKEQLETYWSSIWEEQEQHNDKATWITEEETKWRAIAEMEFIEITEADITHLTGRLHNWKSPGIDKIHNFWYKKLTSLYKPIAKNLTEIILGQQNIPDFIATGITYMLPKSKNSPQPSQYRPITCLPTIYKILTSAITMKINSHIEHHNIMAEEQKGCRRGHMGCKEQLIIDSTIHKHASTKNRNLHCTYIDYKKAFDSVPHSWLIQILEIYRINSKIIDFLRNIMPLWKTTLQINCNHNNVTTRQISIKKGIYQGDSLSPLWFCLALNPLSHLLQRCRAGYCLKYTTEQTTVSHLIYMDDIKLYAQTEKDMKKLVEATAEFSLDINMRFGLDKCKTLHIIRGKIRPGNYVVNNTDTITAMEPTDLYKYLGYTQLKGLDHVRIKETLTTEYKRRVNAICKTQLSGKNLIKALNTFAIPILTYSFGVIKWTKTDTEQLERTTRTTLTKHNNLHPKSAIERLTIKRQNGGRGLIDIQHLWQKQVCRLKTFFHSKSRTSNIHKAIAQNDFNYTPLNLNEQPDTPQITSDDPQKQKIEDWKKKVLHGRHPHDLEQSHVNTVASNKFLKIGNLFPETEGFIIAIQDQIINTKNYRKFIIKDPSVTNDKCRKCHIQPETIQHITGACATLTQTDYTHRHNQVANVIHQKLAVKYTLIQDTNTPYYNYTPQTILENDTHKLYYDRAILTDRTIHYNRPDITLQDKLNKVTYLIDIAVPNTHNIQKTISEKISKYAELKDEVIRIWRQQKVYVVPIVLSTTGVIPNHLLHSLKLLNLKESLYITLQKAAILNTCRIVRKFMQIDENEIGPHHNTFST

SEQ ID NO: 21218 - protein, 1344 aa, Thyatira batis
METRSKRIRIGPLPGGDRRGTPGADAGCFSMRTVSGEELNRRTPTDKDTTAENIDDGDRLTDKTNTPAEPYSPSTVSYTPSRTSSPSIPSSPPNRILNTVSPTPTLNVAREVNTFLPVSTKAGKPRVRMSWSKDVNIFIMRTYFRITRLETDLTTYRQQLHELFTQQYPGITVSEQRISDQRRIIVRNKLLSPEIIKQLKEETRLHLQEEQNNTDNIATSLNANETNIQHSQIELTTNTHCQYNYSLTNTQTSHTSTQTESITVMLENDIETIDIPDQNIISNEILQEINNKFRTALTQYSGMDPAARPKLPKLKYSPKLFRYVNLFNENILNQFTSDDTKLIDIHTLIYCTAVVISEELNFKITDHLINSRPKHKTQPPWQQRLEKDIEKLRADCGRLTQYINNNRSSNVVRRVEAIFQSSLTHTRHENNNRRPEEFLDTLKQKLALKVHRLRRYNKAQQRKNDNALFAKNEKMFYRTLHKPHTDNVNTNNTNNTDTNNTNTNNTDTNNTNTNNTDTNNTNTNNTDTNNTTDIPTKEQLETFWSSIWEEQVQHNDKASWIIDEETKWKAIDEMEFVEITESDISNITARLHNWKSPGLDKIHNFWYKKLTTLHKALAKNLTEIILEKQNIPEFIATGITYMLPKTKNPLQPSQYRPITCLPTIYKILTSAITAKINTHIEHHKIMAEEQKGCRRGHMGCKEQLIIDSTIHKHATTKNRNLHCTYIDYKKAFDSVPHSWLLQILQIYKINPKIIAFLRNIMSQWKTSLQINTNHNTILTRQISIKKGIYQGDSLSPMWFCLALNPLSHLLQRCQAGYNFKHTINQTKVSHLIYMDDIKLYAQTEKDMKKLVVATSEFSKDINMQFGLDKCKTLHIIRGKVKPGNYNINNTDTITAMEPADLYKYLGYSQLKGLDHIRIKNTLTTEYKRRLNAICKSQLSGKHLIKALNTYAIPILTYSFGVIKWTKTDTEQLERTTRTTLTKHNNLHPKSAIERLTIKRQNGGRGLIDIQQLWRKQVSRLKTFFHTKSLTSNIHKAIVLNDLNYTPLNLIEQVDTQQTNNEDPQKQKMEDWKKKVLHGRHPHDLQQSHINTIASNKWLKIGNLFPETEGFMIAIQDQIINTKNYRKYIIKDPSVNNDKCRKCHTQPETIQHITGACTTLTQTDYTHRHNQIANIIHQKLALKYTLIQNTNTPYYNYTPQTILENTTHKLYYDRAILTDRTIHYNRPDITLRDKINKVTYLIDIAVPNTHNIQKTITEKLTKYLELKDEVTRIWRQEKVYIVPIVLSTTGVIPNHLLHSLKLIDLHESLYITLQKAAILNTCRIVRKFMQLEEGEIGPHSQNTHT

SEQ ID NO: 21219 - protein, 1353 aa, Thyatira batis
METRSKRIRIGPLPGGDRRGTPGADAGCFSMRTVSGEELNRRAPTDKDTTAENIDDGDRLTDRTNTPAEPYSPSTVSYTPSRTSSPSIPSSPASRILNTVSPIPTLNVAREVNTFLPVSTKAGKPRVRMRWSKDVNIFIMRTYFRITRLETDLTTYRQQLHELFTQQYPGITVSEQRISDQRRIIVRNKLLSPEIIQQLKEETRIQLQEEQNNTHNIATSQHANETNTQHSQIELTSNTRRPYNYTLTNTQTSHISTQTSHTSTQTESITVMLENDIETIDVPNQNMISNEIIQEINNKFRTTLIQYSGMDPAARPKLPKLKYSPKLFRYVNLFNENILNQFTPDDTKLIDIHTLIYCTAVVISEELNFKITDHSINSRPKHKTQPPWQQRLEKDIEKLRADCGRLTQYINNNRSSNVVRRVEAIFQSSLTHTRHENINRRPEEFLDTLKQKLALKVHRLRRYNKAQQRKNDNALFATNEKLFYRTLHKPHTDNVNTNDTNTNNTDTNNTNINNTDTNNTNTNNTDTNNTDTNNTDTNNTTNTPTKEQLETFWSSIWEEQVHHNDKASWIIDEKTKWKAIDEMEFVEITESDISNVTAKLHNWKSPGLDKIHNFWYKKLTSLHKALAKNLTEIILGKQNIPDFIATGITYMLPKSKISVQPSQYRPITCLPTIYKILTSAITAKINIHIEHHKIMAEEQKGCRRGHMGCKEQLIIDSTIHKHATTKNRNLHCTYIDYKKAFDSVPHSWLLQILEIYKINPKIIAFLRNIMSQWKTTLQINSNHNTIITRQISIKKGIYQGDSLSPMWFCLALNPLSHLLQRCQAGYSLKHTINQTKLSHLIYMDDIKLYAQTEKDMKKLVLATSQFSRDINMQFGLDKCKTLHIIRGKVKPGNYSINNTDVITAMEPADLYKYLGYTQLMGLDHVKIKNTLTTEYKRRLNAVCKSQLSGKHLIKALNTYAIPILTYSFGVIKWTKTDTEQLERTTRTTLTKHNNLHPKSAIERLTIKRQNGGRGLIDIQRLWRKQVSRLKTFFHTKSLTSNIHKAIVLNDLNYTPLNLIEQVDTQHTNNEDTERQKIEDWKQKVLHGRHPHDLQQPHINTIASNKWLNIGNLFPETEGFMIAIQDQIINTRNYRKYIIKDPTVNNDKCRKCHTQPETIQHITGACTTLTQTDYTHRHNQVANIIHQKLALKYTLIQNTKTPYYNYTPQSILENTTHKLYYDRAILTDRTIHYNRPDITLRDKINKITYLIDIAVPNTHNIQKTITEKLTKYLELKDEVTRIWRQEKVYIVPIVLSTTGVIPNHLLHSLKLIDLHETLYITLQKAAILNTCRIVRKFMQLEEGEIGPHSQNTNT

SEQ ID NO: 21220 - protein, 1319 aa, Mesoligia furuncula
METRSKRKRIGPLPGGDRRGAPGADAGCLSMRTVSGEELNRRAPIDKDTTAEIIDDGDRLTDRTTTPVEPYSPSTVSYTPSRPSSPSMPSSPILSSPPITSLNSIPSTSTLNVAREVSSFLPASTKAGKARVRMRWSKEVNLFIMRTYFYITKLETDITTYRQQLHELFTRQYPEITVSEQRISDQRRAIVRNKLLSQEIIEQLKEETRIQLQEAEYNASADAIPLSQNTTETAQQSHSQPHIQVTPYTQSQPYNQSQVFTQTSHTSTQTESIMLTLENDVETLTVADQNLTADICIQEILDKFRTTLAQYSGMDPAVRPKLPKLRYSPNLFQLVNLFNENILHQFISDDTQLIDIHTLIYCTAVVVSEELNFKITQYTGNTRPKQNTKPAWQQRLEKDIEKLRADCSRLTQYINNIRSRKVVKRVEALFRSSVTHTRHENDNRKPEEFLDTLKQKLALKVHRLRRYKKAQQRKNDNAIFATNEKIFYRNLYKPDVDTNDENNTDAPNQPTKEQLETYWSSIWEEQEQHNDKATWITEEETKWRAIEEMEFVEITEADITHLTGRLHNWKSPGTDKIHNFWYKKLTILHKPIAKNLTKIILGQQNIPYFIATGITYMLPKTKNSPQPSQYRPITCLPTIYKILTSAITMKINSHIEHHNIMAEEQKGCRRGHMGCKEQLIIDSTIHKHASTKNRNLHCTYIDYKKAFDSVPHSWLIQILEIYRINSKIIDFLRNIMPLWKTTLQINCNHNNITTRQISIRKGIYQGDSLSPLWFCLALNPLSNLLQRCRAGYCLKHTTEQTTVSHLIYMDDIKLYAQTEKDMKKLVEATAEFSLDINMQFGLDKCKTLHIIRGKIRPGNYVVNNTDTITAMEPTDLYKYLGYTQLKGLDHVRIKETLTTEYKRRLNAICKTQLSSKNLIKALNTFAIPILTYSFGVIKWTKTDTEQLERTTRTTLTKHNNLHPKSAIERLTIKRQNGGRGLIDIQHLWRKQVCRLKTFFQSKSRTSNIHKAIVQNDFNYTPLNLNEQLDTPHNTSDDPQKQKIEDWKKKVLHGRHPHDLEQSHVNQLASNKFLKIGNLFPETEGFIIAIQDQIINTKNYRKFIIKDPSVTNDKCRKCHIQPETIQHITGACTTLTQTDYTHRHNQVANVIHQKLALKYTLIQDANTPYYNYTPQTILENDTHKLYYDRAILTDRTIHYNRPDITLQDKINKVTYLIDIAVPNTHNIQKTISDKISKYAELKDEVTRIWRQQKVYVVPIVLSTTGVIPNHLLHSLKLINLKETLYITLQKAAILNTCRIVRKFMQLDENQVGSHHNTSLS

SEQ ID NO: 21221 - protein, 1309 aa, Omphaloscelis lunosa
METRSKSKRIGPLPGGDRRGTLGADAECLSMRTVSGEELNRRTPTDKDVTAEIIDDGDGLTNRTNTPVEPYSPSTVSYTPSRPSSPSIPSSPPITCLNSIPPTPTLNVAREVSSFLPASTKAGKARVRMRWSKEVNLFIMRTYFYITKLETDMTTYRQQLHELFTRQYPEITVSEQRISDQRRVIVRNKLLSPQIIEQLKEETRIQLQEAENITNDNAIPLLQNLTAIDEQPHTQVEPYTQSQPYNQSQAYTQTTHTSTQTESITLTLENDIETLTVADQNLTTDMYIQEIHDKFRTTLAQYSGMDPTVRPKLPKLRYSPNLFRLVNLFNENILNQFVSDDTQLIDIHTLIYCTAVVVSEELNFKITQHTGNTRPKQNIKPAWQQRLEKDIEKLRADCSRLTQYINNIRSNKVVRRVEAIFRNSFTHTRHENNNRKPEEFLDTLKQKLALKVHRLRRYKKAQQRKNDNAIFASNEKMFYRNLHKPDTDTNHENNTDAPDQPTKEQLETYWSSLWEEQEQHNNKATWITEEETKWRAIDEMEFVEITEADITHLTGRLHNWKSPGIDKIHNFWYKKLTSLYKPIAKNLTEIILGQQNIPDFIATGITYMLPKTKKSPQPSQYRPITCLPTIYKILTSAITTKINSHIEHHNIMAEEQKGCRRGHMGYKEQLIIDSTIHKHATIKNRNLHCTYIDYKKAFDSVPHSWLIQILEIYRINSKIIDFLRNIMPLWKTTLQINCNQYNVTTRQIAIKKGIYQGDSLSPLWFCLALNPLSHLLQRCRAGYCLKHTTEQTTISHLIYMDDIKLYAQTEKDMKKLVEATAEFSLDINMQFGLDKCKTLHIIRGKIRPGNYVVHSTDTITAMEPTDLYKYLGYTQLKGLDHVRIKESLTAEYKRRLSAICKTQLSSKNLIKALNTFAIPVLTYSFGVIKWTKTDTEHLERITRTTLTKHNNLHPKSAIERLTIKRQNGGRGLIDIQHLWRKQVCRLKTFFHSKSRTSNIHKAIAQNDFNYTPLNLIEHRDTTQITSDDPQKQKIEDWKKKVLHGRHPHDLEQSHVNKLASNKFLKIGNLFPETEGFIIAIQDQIINTKNYRKFIIKDPSVINDKCRKCHIQPETIQHITGACTTLTQTDYTHRHNQVANVIHQKLAVKYTLIQDTNTPYYNYAPQIILENDTHKLYFDRAILTDKTIHYNRPDITLQDKINKVTYLIDIAVPNTHNIQKTISEKISKYAELKDEVTRIWRQQKVYVVPIVLSTTGIIPNHLLHSLKLLNLKETLYITLQKAAILNTCRIVRKFMQIDENEIGPHNTSST

SEQ ID NO: 21222 - protein, 1291 aa, Entheus sp.
MRRSIRIKNKKSAQSGTVAEIISKRRTPEAGAGCFTGDLQPENAAADTIHTPTTSRINSPCEPYSPSTASYNPSIQSSPTSSVCRSTPTPVLDVVRQANAFLAVPTKSGKPRVRMQWIKEVNLFIMRTYYHITKLETDMTLYRKKLHEHFSLKYPEIKVSEQRISDQRRIIERNKLLTQDEMNRLKEEVRTLLQEEEMHENDNNDHLTQQELVQPSPTLIQLPSSLHLNTQQTRASCNLYYTNSQYTHTSTQTETITQLLDNDIETFVNIHPPNDAHIEKILNKFRSSTILYSGMDPTVRPKLPKLRYSPKLFYLIDLFNNIILNEYISIDMKLTDIHTLVYCTALTISEELNYKVITNSESTNRIKNTIKPAWQYRLEKDIKRLRADIGRITQYINNNRSRKVVERVEFLLRTITIHTKHENNNKKPEEVLDTLKQKLSIKAHRLKRYNTAQDRKNQNNTFVTNEKQFYRNLPKRQNTTQENNVEIPTEEQLEQYWSGIWEEQVSHNNQADWITEEEQRWKNMEEMSYAKVSEEDIKVVTTRLNNWKSPGIDKIHNFWYKKLICLHNSLAKNISEIISGHQNIPQFIATGITYMLPKNNYSKEPSQYRPITCLPTVYKIITSVITQKINKHIEHNNILAEEQKGCRRGHMGCREQLIIDSTIMKHATSKNRNLHCTYIDYKKAFDSIPHSWLLQILEIYKINPIIINFLRNIMRHWKTTLTLNSGNNKTVTRQISIRKGIYQGDSLSPLWFCLALNPLSHRLQCDRAGYRLKHDNNEIIISHLIYMDDIKLYAKNEKEMKALIKTTTEFSTDINMHFGLDKCRTVHIIKGKIRPGDYSINDSDTIIAMEPTDLYKYLGFQQLKGLDHTSIKEKLTTEYKKRVNAICKTHLSGKNIVKAINTYAIPILTYSFGIVKWTTTNIEQIERSTRTILTKHNYLHPKSAIERISIKRQDGGRGLIDIQHLWTKQIYSLKSFFYNKGKFSDMHKSITQNDNGYTPLNLKEYSNQENPTNTDPQKKKIEDWKMKTMHGRHPGDLQQPHIDSKASNKWLKTGNLFPETEGFIIAIQDQVINTKNYRKHIIKDPTITNDKCRRCHTQAETIQHITGACTSLTQTDYTHRHNQLANIIHQKLAHKHQLIQNTNIPYYKYSPQTVLENSSHKLYFDRAILTDKTIHFNRPDITLQDKINKTTYLIDIAVPNTHNVQKSTIDKINKYADLKEEIARIWKQDKVYIVPIVISTTGVIPKSIHHSLKMIDLKENIINTLQKAAILNTCRIVRKFMQLNETQTDLH

SEQ ID NO: 21223 - protein, 1285 aa, Urbanus velinus
MRRSNRIKNKHSAQSGTVAEISSHPSSPTSSTRSLFPSTNSSPFSFENRSNSVSRSTTVSPTSAEVEQTQHIRLLASDVARGANAFLPASTKAGKQRVRMTWSQDVNMFIMRTYYHITKLETDMTTYRKTLHELFSNQYPDVKVSEQRVSDQRRMIIKNKYLTQETLNKLKEEVSRMLREEESININSDNTQHLLEPDHNPLESHVRSQNNASQSHNLSQCYTQTLVPTSHSSTQTEFITLLLENETETIADLAPPNDASFQDMYEKLQTALSKYSGMDPTVRPKLPRIKYTKKLNDLVHLFNQHILHRLTSEDTQLNDIHTLIYCTAIAIAEELNYKIIHNTTHIKPKDHTKPSWQIRLEKDIENLRVDIGRLTQYINNNRSDRLIKKVQHIFNRLAKHTKHESNNRKPEEFLDTLKQKLALKTHRLKRYKKTQQRKKDNIQFATNEKLFYRNLCKPKIDCMAKETNQTGILCKEVLETYWSNIWEENISHNDKADWITEEQNRWEVIDEMEFQEITEHDITNITGRLHNWKAPGVDKVHNFWFKKLTSLHQPLARALTQIILGKQNIPKFITIGTTYMLPKSNNSTQPSQYRPITCLPTIYKILTSAITSKINTHIERHNILAEEQKGCRKGHMGCKEQLVIDSVIHKHATSKHRNLHCTYIDYKKAFDSIPHSWLIKILHIYKISPIIIDFLHNIMSHWKTTLHLNLGNKSITTRQIHIKKGIYQGDSLSPLWFCLSLNPLSNILHNCQTGYRLNNRTEETTISHLIYMDDIKLYAKTHKDMQKLLDKTTQFSNDLNMQFGLDKCKTLHIVKGKIQLGDYRVNDTEVISALEPTDVYKYLGYNQLKGILQTHTKQTLTTEFKRRVGAICKSHLSGKHLTKAINTYSIPILTYSFGIIKWTKTDIELLERTIRTTLTKHNHLHPKSAVERLNIKRQDGGRGIIDINCLWQKQISNLRQFFLLKANTSNIHSAITHNDQNLTPLNLSDNTDQNIHNNRNSQQQKIEHWKNKVLHGRHPHDLEHAHVDKIASNKWLKVGNLFPETEGFMVAIQDQVINTKNYRKHIIKDPNIKNDKCRRCHTQPETIQHITGACTNLTQTDYTHRHNQVTNIIHQNLALKHNLIQNTNTPYYKYTPQTVIENTSHKIYYDRAVLTDRTIHYNRPDIILQDKLNKITYLIDIAVPNTHNIQKTIVEKINKYVELKEEVTRIWKQNKVYVVPIVLSTTGVIPYHLHQSLKLIGLKHSLYIPLQKAAILNTCRIVRKFMQIDEKEVGPHNITQTIALP

SEQ ID NO: 21224 - protein, 1273 aa, Arctia plantaginis
MQNKTNKYNLRPLPGGRRDSIRNNNINNQTDRQTDNDNISLNSLTSLSVTEPYSPSTSSYRPTPVSFVDEDSHETPNPTLAVTQEVNAFLPASTKSGKPRVRMRWSKEVNLFIMRTYYQITKLETDMTTYRKQLHELFTRHYPDINVTEQRIADQRRTIVRNKLLTEETLRILKEEIRMQQQQSEHIYEYIENNSNPQLHNTQSVTTALPTQSQPHTITQFSQISTQPETITLTLENDIEIMQNVYPSSDNIQKIQEKFRTALALYSRMDPITRPKLPKLKYSRKLSELTHVFNHNILHQFLSEDTQLTDIHTLLYCTALVISEELNYKIIDHPRNILRKNNKPPWQIRLEKDIEQLRADCGRLTQYINNNRSNKIVKRVEQIFRRQSTHTRHENNNRKPEEYLDTLKQKLALKVHRLKRYKKAQQRKNDNMLFTLNEKSFYRNLSKPQTATTRPENIDIPTQTQLETFWSGIWEEPVQHNDKADWITEEENKWNSIEEMKFDCITEDDIAHVTGKLHNWKSPGIDKIHNYWYKKITSFHKPIAKNLTYIILGKQNIPEFIGMGITYMLPKTAHSPQPSQYRPITCLPTIYKILTSAIAHKINMHIEHNHIIAEEQKGCRRGHMGCKEQLIIDSTIHKHATTKNRNLHCTYIDYKKAFDSIPHSWLIKILHIYKINPKITDFMRDIMSHWKTTLHLNMNDRTVTTRQISIKKGIYQGDSLSPLWFCLALNPLSHLLQRCQAGYRLRNSTEETIISHLIYMDDIKLYAKSDKEMTKLLQNTTKFSKDINMEFGLDKCKTLHIIRGKIRPGDYAVDESSTIAAMESTDLYKYLGYKQLKGLDHTSIKQILATEYKSRTNTLCKTQLSAKNLIKALNTYAIPILTYSFGIIKWTKTDIEQIERTTRTTLTKHNNLHPKSAIERLTIKRENGGRGLIDIYHLWQKQVYNLKTFFRTKSHTSNIHKAITLNDYNFTPLNLNDHTGIHNPNNIDPQADKIENWKKKVLHGRHPHDLEQPHIDTIASNSWLKIGNLFPETEGFIIAIQDQIVNTKNYRKYIIKDATVTDDKCRKCHIQSETIQHITGACITLTQTDYTHRHNQITNIIHQKLALKHHLIQNTNTPYYNYTPQSVLESSSHKLYYDRAILTDRTIHYNRPDITLQDKINKTTYLIDIAVPNTHNLQKTITEKISKYTELKEEIIRIWRQEKVYIVPIVLSTTGVIPKHLHHSLKLINLNESVYFNLQKAAILNTCRTVRKFMDIEENGTAQHTQQPPSTST

SEQ ID NO: 21225 - protein, 1313 aa, Eilema depressum
METRSKRNRIGPLPGGDRRGTPGADAGCLSMRTVSGEELNRRAPTDKDTTAETADDGASLTDRTNTPAEPYSPSTISYTPSRISSPSIPSSVPSSPPSNIFYTDPPNPVLSVAQEVNTFLPASTKAGKPRKRMRWSKDVNTFIMRTYYTITKLETDMTTYRKQLHELFSQKYPTIIVTEQRVSDQRRTIVKNKLLNVDELNRLKEEVRVLLQEHSINTITQSQNTIENNLQQSPPLDTQLLLHTQTQSYSHPHPMQIDTQTSHIFTQTSHISTQTESMTLMIENDIETLTVTNQNHLAQAHIQKIQDKFNSTLLLYSGMDPSSRPKLPKLRYSPNLFRLVNLFNEDILQQFESSDTQLTDIHTLIYCTAVVISEELNFKITEHTRNTAPRHTIKPPWQQRLEHDIEKLRADCGRLTQYINNNRSNKVVKRVEAIFKTHNTHTRHENSNKKPEEFLDTLKQKLALKVHRLRRYKKAQQRKNDNTIFATNEKMFYRNLQKPQTDTLVENHTDIPTKENLETFWSNIWEEQAHHNDKANWIQEETTKWRSIEEMEFIEITEQDIRNTTARLHNWKSPGIDKIHNFWYKKLTTLHKSIAKNLTDIVLGKQNIPEFIATGITYMLPKTKYTSQPSQYRPITCLPTIYKILTSAITNKINSHIDTHNIIAEEQKGCRRGHMGCKEQLIIDSTIHKHATTKNRNLHCAYIDYQKAFDSIPHSWLIQVLEIYKINPTIIDFLRNIMSSWKTTLQLNNGLSTLITRQIQIRKGIYQGDSLSPLWFCLALNPLSHLLHQCQAGYNLKLNTEETYISHLIYMDDIKLYAKTEKQMKKLLDTTTEFSNDINMQFGLDKCKTVHIIKGKVKPGNYVVNDTDTIAAMEPTDLYKYLGYQQLKGLDHTMIKNTLKTEYQRRVSAVCKSQLSGKHLIKALNTFAIPILTYSFGVIKWSKTDITNLERTTRTTLTKHNNLHPKSATERLTIKRQNGGRGLIDIQNLWQKQITRLRTFFHTKSNTSNIHKAIILNDLNYTPLNLSDPENPHSTSNSDPQNQKIIDWKSKVLHGRHPHDLEQPHVNTLASNKWLKVGNLFPETEGFIIAIQDQIINTKNYRKYIIKDPTITNDRCRRCYTQSETIQHITGACTTLTQTDYTHRHNQVANIIHQKLALKYSLIQDTNTPYYKYTPQTILENNTHKIYYDRAILTDRTIHYNRPDIILQDKIKKVTYLIDIAVPNTHNLQKTIAEKISKYAELKEEVIRIWRQDNVFVVPLVLSTTGVIPNHLLHSLKLIDLPESLFINLQKAAILNTCRIVRKFMQLDENTPT

SEQ ID NO: 21226 - protein, 1318 aa, Agrochola circellaris
METRSKRKRIGPLPGGDRRGAPGADAGCLSMRTVSGEELNRRAPTDKDATAEADDGDRLTNRTDTPVEPYSPSTVSYAPSRTSSPSIPSSPIPSSPPIPSFNTVTSTPALNVAREVSTFLPASTKAGKSRVRMRWSKEVNLFIMRTYLYITKLETDMTTYRQQLHELFTRQYPEITVTEQRISDQRRAIVRNKLLSKEIIDQLKDEVRTQLLEESENIEGAITIALTQNAIEHNPQEQPQPYTQPQPILQSQPYFQSHAYSHTTHTSTQTESITIMLENEIETLVDNNQNQSTDTRIQEIHDKFKTALTQYSGMDPATRPKLPKLRYTPKLFHLVNLFNQNILNQYISEETQLIDVHTLIYCTALVISEELNFKITEYTGNTRQRNVNKPAWQQRLEKDIEKLRADCSRLTHYINNNRSNKVVKRVETIFKNMSTHTRHENDNRKPEEFLDTLKQKLALKVHRLRRYKKAQERKNDNSLFASNEKNFYRKLQKPQTDAETPTAENNIELPTAEQLETFWSSLWEEQVQHNAQSDWISDEETKWSSLEEMEFVELTESDIGSITARLHNWKSPGIDKIHNYWYKKLDSLHKVLAKNLTEIILGKQNIPEFIATGITYMLPKKQYSPQPSQYRPITCLPTIYKILTSAITTKINKHIENHTIVAEEQKGCRRGHMGCKEQLVIDSIIHKHAATKNRNLHCTYIDYKKAFDSIPHSWLIQILQIYKINSKIIDFLQNIMSRWKTTLQLNYRHNTITTQQISIKKGIYQGDSLSPLWFCLALNPLSHLLHRCQAGYSLKHSTEETVISHLIYMDDIKLYAKSEKEMKKLIDITTEFSKDINMQFGLDKCKTIHIIRGKIKPGDYPVNNTDTITAMEQTDLYKYLGYNQLKGIDHTSIKHTLNTEYKRRVIAVCKTQLSGKHLIKALNTYAIPILTYSFGVIKWSKTDIQQIERSTRTTLTKHNNLHPKSAIERLTIKRQYGGRGLIDVHNLWQKQIAKLRTFFHSKSHTSNIHKAVIMNDIRYTPLNLHEQIDTQDTSNNDPHKQKIEDWKKKVLHGRHPHDLEQSHIDAIASNKWLKIGNLFPETEGFIIAIQDQIINTKNYRKFIIKDPTITNDKCRKCHSQPETIQHITGACTTLTQTDYTHRHNQVANVIHQKLALKYKLIQDTNTPYYKYIPQIILENTTHKLYYDRAILTDRTVHYNRPDITLQDKVNKVTYLIDIAVPNTHNLQKTIGEKISKYAELKEEVTRIWRQEKVFVVPIVVSTTGVIPNHLHHSLKLIDLKDSIYITLQKAAILNTCRIVRKFMQIEENEITPHNINFT

SEQ ID NO: 21227 - protein, 1319 aa, Hydraecia micacea
METRSKSKRIGPLPGGDRRGAPGADAGCLSMRTVSGEELNRRAPTDKDTTAEIIDDGDRLTDRTNTPVEPYSPSTVSYTPSRPSSPSIPSSPTLSSPPITSLNSIPPTPALSVAREVSSFLPASTKAGKARVRMRWSKEVNLFIMRTYFYITKLETDMTTYRQQLHELFTRQYPEITVSEQRISDQRRAIVRNKLLSQEIIEQLKEETRIQLQEAENNTSADAIPLSQNTTETAEQSHSQPHIQVTPYTQSQLYNQSQVFTQTSHTSTQTESIILTLENDIETLTVADQNLAADICIQEIVDKFRTSLAQYSGMDPAVRPKLPKLRYSPNLFRLVNLFNENILHQFISDDTQLLDIHTLIYCTAVVVSEELNFKITQHTGNTRPKQNIKPAWQQRLEKDIEKLRADCGRLTQYINNVRSSKVVKRVEAIFRSSVTHTRHENNNRKPEEFLDTLKQKLALKVHRLRRYKKAQQRKNDNAIFAANEKMFYRNLHKPNTDTNDVNDTVAPDQPTKEQLETYWSSIWEEQEQHNDKATWITEEETKWRAIQEMEFIEITEIDITHLTGRLHNWKSPGIDKIHNFWYKKLTSLHKPIAKNLTEIILGRQNIPDFIATGITYMLPKTINSPQPSQYRPITCLPTIYKILTSAITTKINSHIEHHNIMAEEQKGCRRGHMGCKEQLIIDSTIHKHATTKNRNLHCTYIDYKKAFDSVPHSWLIKILEIYRINSKIIDFLRNIMPLWKTTLQINSNDNNVTTRQISIKKGIYQGDSLSPLWFCLALNPLSHLLQRCQAGYCLKHTADQTSVSHLIYMDDIKLYAQTEKDMKKLVEATAEFSLDINMQFGLDKCKTLHIIRGKIRPGDYVVNNTDTITAMEPTDLYKYLGYTQLKGLDHVRIKETLTAEYKRRLNTICKTQLSSKNLIKALNTFAIPILTYSFGVIKWTKTDTEQLERTTRTTLTKHNNLHPKSATERLTIKRQHGGRGLIDIQHLWRKQVCRLKTFFHSKSRTSNIHKAIVLNDFNYTPLNLNEQLDTPPIISDDPQIQKIEDWKKKVLHGRHPHDLEQSHVNKVASNKFLKIGNLFPETEGFIIAIQDQIINTKNYRKFIIKDPSVTNDKCRKCHSQPETIQHITGACATLTQTDYTHRHNQVANVIHQKLALKYTLIQNTNTPYYNYTPQTILENETHKLYYDRAILTDRTIHYNRPDITLQDKINKVTYLIDIAVPNTHNIQKTISEKISKYAELKDEVTRIWRQQKVYVVPIVLSTTGVIPNHLLHSLKLLNLKETLYITLQKAAILNTCRIVRKFMQIDENEIGPHHNTSVT

SEQ ID NO: 21228 - protein, 1285 aa, Mythimna impura
MRTVSGEELSRRAPTDKDTTAEIIDDGDILTDRTNTPVEPYSPSTNSYIPSRSSPQSMPSSPILSHSSHPITSLNTIPSTPTLNVAQEASSFLPASTRAGKARVRMRWSKEVNIFIMRTYLYITKLETDMTTYRQQLHERFTRQYPEITVSEQRIADQRRAIVRNKLLSQEIIEQLKEETRLQLQESEGNTGTTTLSQNIIEIDRHPQTQLHTQLQNSRSQLYNQSQDYTQTSHTSTQTESLTLMLENDVETLVVSEQNIATELYIQEINDKFRTTLTLYSGMDPAVRPKLPKLRYSRDLFRLVNLFNENILNQFIFDDTQLIDIHTLIYCTAVVICEELKFKISQDTGNLRPKKNVKPAWQQRLEKDIDKLRADCSRLTQYINNNRSSKVVRRVEAIFRSSFTHTRHENNNRKPEEYLDTLKQKLSLKVHRLKRYKKAQQRKIDNTIFSTNEKMFYRNLRKPDTNTNAENNSDQPTKEQLEAYWSSIWEEQVQHNDKAAWIVEEETKWGAIEEMDFIEITESDVTHVTGRLHNWKAPGIDKIHNFWYKKLTSLHKPIAKNLTEIILGQQNIPEFIATGITYMLPKTKNSPQPSLYRPITCLPTIYKILTSLITTKINSHIERHNIMAEEQKGCRRGHMGCKEQLIIDSTIHKHASTKNRNLHCTYIDYKKAFDSVPHSWLIQILQIYKINSKIIDFLRNIMLQWKTTLQLNHDHDRVITRQIYIKKGIYQGDSLSPLWFCLALNPLSHLLQRSRAGYCLKHSTDQTTISHLIYMDDIKLYAQTEKDMRNLVEATAEFSQDINMQFGLDKCKTLHIIRGRIRPGSYVVNDTDTITAMESNDLYKYLGYMQLKGLDHVRIKEALTTEYKKRLNTLCKTQLSGKHLIKAINTFAIPILTYSFGVIKWTKTDTEQLERITRTTLTKNNHLHPKSAIERLTIKRQNGGRGLIDVQHMWRKQVVKLKTFFETKSRTSKIHKAVVLHDSNYTPLNLNAQLDTQNIINDNPQTQKMEDWKRKVLHGRHPHDLEQSHVNIIASNKWLKVGSLFPETEGFMIAIQDQIINTRNHRKYIIKDPSVRDDKCRKCHIQPETIQHITGACTTLTQTDYTHRHNQVANVIHQNLAVKYTLIQNTNTPYYKYTPQTVLENDTHKLYYDRAILTDRTIHYNRPDITLQDKINKITYLIDIAIPNTHNIKKTITEKISKYAELKDEVTRIWRQEKVYVVPIVLSTTGVIPNCLLHSLKLLNLKEALYITLQKAVILNTCRIVRKFMQIDENELGPHHNTPST

SEQ ID NO: 21229 - protein, 1286 aa, Heliconius nattereri
METRLRKKLRGPLPEGNRRGAPGADAGCFSIRTVSGEELNRRAPTGDLQPEKSTAEHLHTYTSRVNSPSEPYSPSTASYNPSVHSSPTSSVCSRGLPTPVLDVAQEANAFLPASTKAGKPRVRMQWSKDVNLFIMRTYYHITKLETDMTIYRKKLHEQFLLNYPQIKVSEQRISDQRRTIERNKLLSQEILNRLKEEVRIQLQEEETNNVNITEIPNHTYIRARTSSPTTCQHYANSQQTQTTHIFTQTETITQLLENDIEGFVNVQPPNEEYIRNIIDKFRTNLTLYAGMDPKMRPKLPKLRYCRKLYQLSNLFNENILIEYISPDTKLIDLHTLIYCTALTITEELNYKITGHSRINSKSNKYKPAWQHRLEKDIQKLRADIGKLTQFINNNRSKKIIERVEFLLKTTKVHTKHEKNNKRPEEVLDTLKQKLALKSHRLKRYNKAQERKAQNNTFVRNEKQFYRNLLKPQNLIRDKVETPTKEELEKYWSSIWEEQTYHNNQADWITKEEQRWHDLEVMEYNEIVKEDIKEITDKLHNWKSPGIDKIHNFWFKKLTFLHSSLANNISEIISGQQNIPEFLATGITYMLPKNNFSTQPSQYRPITCLPTLYKIITSLITQKINKHIENNNIIAEEQKGCRRGHMGCREQLIIDSTIMKHALSKNKNLHCTYIDYQKAFDSIPHSWLLHILNIYKINPKIINFLTNIMTQWKTTLHLHSSNYNINTREIAIKKGIYQGDSLSPLWFCLALNPLSYLLKCNRAGYVLKHDNSETIISHLIYMDDIKLYSKNNKEMKTLIDTTTEFSEDIHMHFGLDKCRTVHIVKGKIRPGDYAINEIDKITAMEPNEFYKYLGLQQLKGLNHTAIKETITNEYKKRINAICKSQLSSKHLIKALNTYAIPILTYTFGIVKWSNSNIEQIERLTRTTLTKHNNLHPKSAIERLTIKRKHGGRGLIDIKHLWQKQLHNLSNFFYTKAHSSNIHKSIVQNDFKYTPLNLNDCQSTGNLTNIDPQKKKIEEWKKKVMHGRHPNDLQQPHIDLEASNKWLQTGSLFPETEGFIIAIQDQIINTKNFRKYIIKDPTVISDKCRRCHTQPETIQHITGACASLTQTDYTHRHNQLVNIIHQRLAHKHKLIQDTNTPYYKYTSQSVLENSSHKMYYDRAILTDKTIHFNRPDITLQDKINKSVYLIDVAVPNTHNIQKTIVEKINKYADLKEEVTRIWKQNKVYVVPIVISTTGVVPKAIHHYLKIINLEDNILHTLQKAAILNTCRIVRKFLQIEENNINTLN

SEQ ID NO: 21230 - protein, 1305 aa, Mesoligia furuncula
MIIIIIIIRADAGCLSMRTVSGEELNRRAPTDKDTTAEIIDDGDRLTDMTNTPVEPYSPSTVSYTPSRPSSPSIPSSPTLLSPPIRSLNLIPPTPTLNVAREVSSFLPASTKAGKARVRMRWSKEVNQFIMRTYFYITKLETDMTTYRQQLHELFTRQYPEITVSEQRISDQRRAIVRNKLLSREIIEQLKEETRLQLQEAENNTDGNAIPLSQNTNEIAEQSHPQPCSQVQSYTQSQSYNQSQAYTQTSHTSTQTESTNLTLENDIETLTFADQNLTTDIYIQEIHDKFRTTLAQYSGMDPAVRPKLPKLRYSPCLFRLVNLFNENILTQFISDDTQLIDIHTLIYCTAVVVSEELNFKITQHTGNSRSKQNIKPAWQQRLEKDIEKLRADCGRLTQYINNIRSNKVIRRVEAIFRSSVTHTRHENNNRKPEEFLDTLKQKLALKVHRLRRYKKAQQRKNDNVIFATNEKMFYRNLHKPKTNTNDDNNTVAPDHPTKEQLETYWSSIWEEQEQHNDKATWITEEEIKWRAIEEMEFVEITEADITQLTGRLHNWKSPGIDKIHNFWYKKLTSLHKPIAKNLTEIILGRQNIPDFIATGITYMLPKTINSPQPSQYRPITCLPTIYKILTSAITTKINSHIEHHNIMAEEQKGCRQGHMGCKEQLIVDSTIHKHATTKNRNLHCTYIDYKKAFDSVPHSWLIKTLEIYRINSKIIDFLRNIMPLWKTTLQINSNHNNVTTRQISIKKGIYQGDSLSPLWFCLALNPLSHLLQRCQVGYCLKHTAEQTTVSHLIYMDDIKLYAQTEKDMKKLVEVTAEFSLDINMQFGLDKCKTLHIIRGKIRPGDYVVNNTDTITAMEPTDLYKYLGYTQLKGLDHVRIKETLTAEYKRRLNTICKTQLSSKNLIKALNTFAIPILTYSFGVIKWTKTDTEQLERITRTTLTKHNNLHPKSATERLTIKRQHGGRGLIDIQHLWQKQVFRLKTFFYSKSRTSNIHKAIVQNDFNYTPLNLSEQLDTPQITSDDPQIQKIENWKKKVLHGRHPHDLEQSHVNKVASNKFLKIGNLFPETEGFIIAIQDQIINTKNYRKFIIKDPSVTNDKCRKCHSQPETIQHITGACTTLTQTDYTHRHNQVATIIHQKLGLKYTLIQNTNTPYYNYTPQTILENDTHKLYYDRAILTDRTIHYNRPDITLQDKINKVTYLIDIAVPNTHNIQKTISEKISKYAELKDEITRIWRQQKVYVVPIVLSTTGVIPNYLLHSLKLLNLKETLYITLQKAAILNTCRIVRKFMQIDENEIGPHHNTSIT

SEQ ID NO: 21231 - protein, 1319 aa, Mesoligia furuncula
METRSKSKRIGPLPGGDRRGAPGADAGCLSMRTVSGEELNRRAPTDKDTTAEIIDDGDRLTDMTNTPVEPYSPSTVSYTPSRPSSPSIPSSPTLLSPPIRSLNLIPPTPTLNVAREVSSFLPASTKAGKARVRMRWSKEVNQFIMRTYFYITKLETDMTTYRQQLHELFTRQYPEITVSEQRISDQRRAIVRNKLLSREIIEQLKEETRLQLQEAENNTDGNAIPLSQNTNEIAEQSHPQPCSQVQSYTQSQSYNQSQAYTQTSHTSTQTESTNLTLENDIETLTFADQNLTTDIYIQEIHDKFRTTLAQYSGMDPAVRPKLPKLRYSPCLFRLVNLFNENILTQFISDDTQLIDIHTLIYCTAVVVSEELNFKITQHTGNSRSKQNIKPAWQQRLEKDIEKLRADCGRLTQYINNIRSNKVIRRVEAIFRSSVTHTRHENNNRKPEEFLDTLKQKLALKVHRLRRYKKAQQRKNDNVIFATNEKMFYRNLHKPKTNTNDDNNTVAPDHPTKEQLETYWSSIWEEQEQHNDKATWITEEEIKWRAIEEMEFVEITEADITQLTGRLHNWKSPGIDKIHNFWYKKLTSLHKPIAKNLTEIILGRQNIPDFIATGITYMLPKTINSPQPSQYRPITCLPTIYKILTSAITTKINSHIEHHNIMAEEQKGCRQGHMGCKEQLIVDSTIHKHATTKNRNLHCTYIDYKKAFDSVPHSWLIKTLEIYRINSKIIDFLRNIMPLWKTTLQINSNHNNVTTRQISIKKGIYQGDSLSPLWFCLALNPLSHLLQRCQVGYCLKHTAEQTTVSHLIYMDDIKLYAQTEKDMKKLVEVTAEFSLDINMQFGLDKCKTLHIIRGKIRPGDYVVNNTDTITAMEPTDLYKYLGYTQLKGLDHVRIKETLTAEYKRRLNTICKTQLSSKNLIKALNTFAIPILTYSFGVIKWTKTDTEQLERITRTTLTKHNNLHPKSATERLTIKRQHGGRGLIDIQHLWQKQVFRLKTFFYSKSRTSNIHKAIVQNDFNYTPLNLSEQLDTPQITSDDPQIQKIENWKKKVLHGRHPHDLEQSHVNKVASNKFLKIGNLFPETEGFIIAIQDQIINTKNYRKFIIKDPSVTNDKCRKCHSQPETIQHITGACTTLTQTDYTHRHNQVATIIHQKLGLKYTLIQNTNTPYYNYTPQTILENDTHKLYYDRAILTDRTIHYNRPDITLQDKINKVTYLIDIAVPNTHNIQKTISEKISKYAELKDEITRIWRQQKVYVVPIVLSTTGVIPNYLLHSLKLLNLKETLYITLQKAAILNTCRIVRKFMQIDENEIGPHHNTSIT

SEQ ID NO: 21232 - protein, 1324 aa, Mesoligia furuncula
METRSKRKRIGPLPGGDRRGALGADAECLSMRTVSGEELNRRAPTDKDATADIIDDGDRLTDRINTPVEPYSPSTVSYTPSRPSTPSIPSSPSIPSSPPITSFNSVQPNSTLNVTREVSTFLPASTKAGKARVRMRWSKEVNLFIMRTYLYITKLETDLTTYRKQLHELFTRQYPEITVTEQRISDQRRIIVRNKLLSQDIINQLKEEVRTQLQGESENTAGAISIALTQNTTAYNQQEQPCSQTEPIIQSQPITQSQPYFQSQAYSETTHTSTQTESITIMLENEIETLADISINQSTDTHIQEIHDKFKTALTQYSGMDPAARPRLPKLRYTPKLSQLVHLFNQNILQQYISEETHLIDIHTLIYCTALVISEELNFKITEYTGNSRQRNINKPAWQQRLEKDIEKLRADCGRLTQYINNNRSNKVVKRVDAIFKNMATHTRHENDNRKPEEFLDTLKQKLALKVHRLRRYKKAQERKHDNTLFATSEKNFYRNLQTAQTNTNTLTTENNIELPTAEQLETFWSGIWEEQVQHNNNSDWITDEETKWSSLEEMEFVELTESDITCVTARLHNWKSPGIDKIHNFWYKKLESLHKVLAKNLTQIILGKQNIPEFLATGITYMLPKAQYSSQPSQYRPITCLPTIYKILTSAITTKINKHIENHNIIAEEQKGCRRGHMGCKEQLVIDSIIHKHANTKHRNLHCTYIDYKKAFDSIPHSWLIQILQIYKINSKIIDFLQDIMARWRTTLQLNYRNNAITTRQISIKKGIYQGDSLSPLWFCLALNPLSDLLHRSQAGYSIKHTTEETIISHLIYMDDIKLYSKSEKEMKKLIDITTEFSKDINMQFGLDKCKTVHIIRGKIKPGDYPINNTDTITAMEPTDLYKYLGYKQLKGLDHSTIKYTLNSEYKRRVVAVCKTQLSGKHLIKALNTYAIPILTYSFGVVKWSKTDIQQIERTTRTTLTKHNNLHPKSAIERLTIKRQYGGRGLIDVHHLWQKQIAKLRTFFHSKSQTSNIHKAVVMNDISYTPLNLHDQIDIQHTSHEDPHKQKVEDWKKKVLHGRHPHDLEQSHIDTITSNKWLKIGNLFPETEGFIIAIQDQIINTKNYRKFIIKDPTITNDKCRKCHSQPETIQHITGACTTLTQTDYTHRHNQVANVIHQKLALKYKLVQDTNTPYYKYVPQTVLENTTHKLYYDRAILTDRTVHYNRPDITLQDKVNKVTYLIDIAVPNTHNLQKTIGEKISKYVELKEEVSRIWRQEKVYVVPIVVSTTGVIPNHLHHSLKQIDLKDSIYITLQKAAILNTCRIVRKFMQIDENEITPHNINSS

SEQ ID NO: 21233 - protein, 1318 aa, Xestia c-nigrum
METRSKRKRIGPLPGGDRRGAPGADAGCHSMRTVSGEELNRRAPTDKATTAEIIDDGDRLTDRTDTPVEPYSPSTVSYTPSRQSSPSIPSSPTLSSSPTISLNTVTPTPVLNAARGVSTFLPASTKAGKARVRMKWSKEVNLFIMRTYLHITKLETDLTTYRQQLHTLFTRQYPEITVSEQRISDQRRIIVRNKLLSQEVIDQLKEEVRTQLLQEETVTDTNNITQNISEISNQEQPQSLNQSQILYSLSPYNQSQAYTQNISHTSTQTESITLTLENDIETIVTPDQHLTTDTYIQEIIDKFRTTITQYSGMDPAARPRLPKLKYTPNLFRLINLFNETILTQYISDDTQLIDIHLLIYCTAVVISEELNFKITNHTGNPRTRPNIVPAWQQRLEKDIEKLRADIGRLTQYISGCRSNKLVKKVKVIFRNNLTHTRHEKNNRKPEEFLDTLKQKLALKVHRLKRYKKAQQRKNDNAIFTTNEKVFYRNLHIPKNDRNYENNTNTHTKVGLPSKEQLETYWAGIWEEQKQHNDKASWIANEETKWRGIDEMEFVEVTESDITHITARLHNWKSPGIDKIHNFWYKKLTALHKSLAKNLTDIVLGKQNIPEFITTGITYMLPKTKYTSEPSQYRPITCLPTIYKILTSAITKKINSHIIHHNIIAEEQKGCRQGHMGCKEQLIIDSTIHKHATSKNRNLHCTYIDYRKAFDSVPHSWLIQILEIYRINPKIIDFMRHVMLQWKTTLQINSSNNNVTTRQISIKKGIYQGDSLSPLWFCLALNPLSHLLQSCGAGYCLKHSTDETTISHLIYMDDIKLYAKSEKDMKKLVDITAEFSKDINMQFGLEKCKTLHIVRGKVRPGDYAVNESDSITALEPTELYKYLGYTQLKGLDHVKIKETLTTEYKKRVNAVCKTQLSGKHLIKALNTFAIPVLTYSFGVIKWTKTDTEQLQRTTRTTLTKHNNLHPKSAIERLTIKREHGGRGLIDIQHLWRKQISRLKSFFHTKSHNSNIHKAIVTNDLNYTPLNLSDQIEAQNTTNEDPQTQKIEDWKRKVLHGRHPHDLEQSHINKLASNKWLKIGNLFPETEGFIIAIQDQIINTKNYRKYIIKDPTVTNDKCRKCHLHPETIQHITGACTTLTQTDYTHRHNQVANVIHQKLAIKHTLIQNTNTPYYNYKPEATLENTTHKLYYDRAILTDRTIHYNRPDLILQDKIKKVTYLIDIAVPNTHNIQKTITEKISKYAELKEEVTRIWRQEKVYIVPIVLSTTGVIPNHLIHSLKLLDLKETLYITLQKTAILNTCRIVRKFMQIEENEIGPYHNT

SEQ ID NO: 21234 - protein, 1309 aa, Omphaloscelis lunosa
METRSKSKRIGPLPGGDRRGTLGADAECLSMRTVSGEELNRRTPTDKDVTAEIIDDGDGLTNRTNTPVEPYSPSTVSYTPSRPSSPSIPSSPPITCLNSIPPTPTLNVAREVSSFLPASTKAGKARVRMRWSKEVNLFIMRTYFYITKLETDMTTYRQQLHELFTRQYPEITVSEQRISDQRRVIVRNKLLSPQIIEQLKEETRIQLQEAENITNDNAIPLLQNLTAIDEQPHTQVEPYTQSQPYNQSQAYTQTTHTSTQTESITLTLENDIETLTVADQNLTTDMYIQEIHDKFRTTLAQYSGMDPTVRPKLPKLRYSPNLFRLVNLFNENILNQFVSDDTQLIDIHTLIYCTAVVVSEELNFKITQHTGNTRPKQNIKPAWQQRLEKDIEKLRADCSRLTQYINNIRSNKVVRRVEAIFRNSFTHTRHENNNRKPEEFLDTLKQKLALKVHRLRRYKKAQQRKNDNAIFASNEKMFYRNLHKPDTDTNHENNTDAPDQPTKEQLETYWSSLWEEQEQHNNKATWITEEETKWRAIDEMEFVEITEADITHLTGRLHNWKSPGIDKIHNFWYKKLTSLYKPIAKNLTEIILGQQNIPDFIATGITYMLPKTKKSPQPSQYRPITCLPTIYKILTSAITTKINSHIEHHNIMAEEQKGCRRGHMGCKEQLIIDSTIHKHATIKNRNLHCTYIDYKKAFDSVPHSWLIQILEIYRINSKIIDFLRNIMPLWKTTLQINCNQYNVTTRQIAIKKGIYQGDSLSPLWFCLALNPLSHLLQRCRAGYCLKHTTEQTTISHLIYMDDIKLYAQTEKDMKKLVEATAEFSLDINMQFGLDKCKTLHIIRGKIRPGNYVVHSTDTITAMEPTDLYKYLGYTQLKGLDHVRIKESLTAEYKRRLSAICKTQLSSKNLIKALNTFAIPVLTYSFGVIKWTKTDTEHLERITRTTLTKHNNLHPKSAIERLTIKRQNGGRGLIDIQHLWRKQVCRLKTFFHSKSRTSNIHKAIAQNDFNYTPLNLIEHRDTTQITSDDPQKQKIEDWKKKVLHGRHPHDLEQSHVNKLASNKFLKIGNLFPETEGFIIAIQDQIINTKNYRKFIIKDPSVINDKCRKCHIQPETIQHITGACTTLTQTDYTHRHNQVANVIHQKLAVKYTLIQDTNTPYYNYAPQIILENDTHKLYFDRAILTDKTIHYNRPDITLQDKINKVTYLIDIAVPNTHNIQKTISEKISKYAELKDEVTRIWRQQKVYVVPIVLSTTGIIPNHLLHSLKLLNLKETLYITLQKAAILNTCRIVRKFMQIDENEIGPHNTSST

SEQ ID NO: 21235 - protein, 1257 aa, Apodemia chisosensis
METRSKYRKRIGSLPGGDRRGTPGADAGCHSMRTVSGVELSRRAPTGSSEFVTADPNDNTDRLTDNDNISINSISTIVEPYSPSTNSSIPPPVSSVEENSREVPNPTLTVAQEVNTFLPASTKAGKPRVRMSWNKDVNMFIMRTYYYITKLETDMTTYRKQLHESFTLQYPEVKVTEQRISDQRRTIIRNKLLTDEVLNRLKDEARVQIENENHNNTHTNIIEDTNNIPEMFQSLPSQTDTQLTLHMHSQLQLYTQTLDTSTQTETVTLTLENDIETFVDPTPVANIHEQEITDKFKSALTKNSGMDPASRPKLPKLKYSEKLFQLTKIFNQSILNQFLNDDTELVDIHTLIYCTAVVISEELNYKIMECDKSNPKPKYSDKPPWQVRLEKDIEKLRADCGRLTQYVNNNRSNKVVKRVEAIFKSRLMHTRHEDNNRKPEEFLDTLKQKLALKVHRLRRYKKAQQRKNDNILFTNNEKLFYRNLAKAYNDTPTTHSTQIPTQVQLETFWSGIWEERIQHNDKAQWIAEEENRWNAIGEMEFHKITKTDITKVTARLHNWKSPGIDKIHNFWYKKLTSLHNYIAKNFTDIIVGKQNIPEFIATGITYMIPKSNYSAHPSQYRPITCLPTIYKILTSAITSKITTHIEQNRIISEEQKGCRRGHMGCKEQLIIDSTIHKHATTKHRNLHCTYIDYKKAFDSVPHSWLLQILKIYKINSKIIKFIQNIMQHWKTTLQVNNHNNIVTTRQIFIRKGIYQGDSLSPLWFCLALNPLSNMLHGCQAGYCLRHTEQETVLSHLIYMDDIKLYAKSEKDMKKLLDKTIEFSKDINMEFGIDKCKTLHIIRGKIRPGDYVIDNNTIITAMESTDLYKYLGYKQLKGFDHTTIKQTLMTEYRRRLGSICKTQLSGKNLIKALNTYAIPILTYSFGIIKWSKTDIENLERIIRTTLTKHNHLHPKSAIERLTIKRQNGGRGLIDIHNLWQKQIHNLKIFFQEKSEISNLHKAIIHNDSSYTPLNLSEPPNIQDPTNTNPQTQKIDTWKKKTLHGRHPHDLDQTHIDTVASNKWLKVGSLFPETEGFIIAIQDQVINTKNYKKYIIKDPSVTNDKCRKCHTQPETIQHITGACTTLTQTDYTHRHNQIVNIIHQNLALKHQLIQNTNTPYYRYKPETVLENMTHKLYYDRAILTDRTIHYNRPDITLQDKTKKITYLIDIAVPNTHNIQKTITEKISKYTELKDEVTRIWRQEKVYIVPIVISTTGVIP

SEQ ID NO: 21236 - protein, 1319 aa, Hydraecia micacea
METRSKSKRIGPLPGGDRRGAPGADAGCLSMRTVSGEELNRRAPTDKDTTAEIIDDGDRLTDRTNTPVEPYSPSTVSYTPSRPSSPSIPSSPTLSSPPITSLNSIPPTPALSVAREVSSFLPASTKAGKARVRMRWSKEVNLFIMRTYFYITKLETDMTTYRQQLHELFTRQYPEITVSEQRISDQRRAIVRNKLLSQEIIEQLKEETRIQLQEAENNTSADAIPLSQNTTETAEQSHSQPHIQVTPYTQSQLYNQSQVFTQTSHTSTQTESIILTLENDIETLTVADQNLAADICIQEIVDKFRTSLAQYSGMDPAVRPKLPKLRYSPSLFRLVNLFNENILHQFISDDTQLLDIHTLIYCTAVVVSEELNFKITQHTGNTRPKQNIKPAWQQRLEKDIEKLRADCGRLTQYINNVRSSKVVKRVEAIFRSSVTHTRHENNNRKPEEFLDTLKQKLALKVHRLRRYKKAQQRKNDNAIFAANEKMFYRNLHKPNTDTNDVNDTVAPDQPTKEQLETYWSSIWEEQEQHNDKATWITEEETKWRAIQEMEFIEITEIDITHLTGRLHNWKSPGIDKIHNFWYKKLTSLHKPIAKNLTEIILGRQNIPDFIATGITYMLPKTINSPQPSQYRPITCLPTIYKILTSAITTKINSHIEHHNIMAEEQKGCRRGHMGCKEQLIIDSTIHKHATTKNRNLHCTYIDYKKAFDSVPHSWLIKILEIYRINSKIIDFLRNIMPLWKTTLQINSNDNNVTTRQISIKKGIYQGDSLSPLWFCLALNPLSHLLQRCQAGYCLKHTADQTSVSHLIYMDDIKLYAQTEKDMKKLVEATAEFSLDINMQFGLDKCKTLHIIRGKIRPGDYVVNNTDTITAMEPTDLYKYLGYTQLKGLDHVRIKETLTAEYKRRLNTICKTQLSSKNLIKALNTFAIPILTYSFGVIKWTKTDTEQLERTTRTTLTKHNNLHPKSATERLTIKRQHGGRGLIDIQHLWRKQVCRLKTFFHSKSRTSNIHKAIVLNDFNYTPLNLNEQLDTPPIISDDPQIQKIEDWKKKVLHGRHPHDLEQSHVNKVASNKFLKIGNLFPETEGFIIAIQDQIINTKNYRKFIIKDPSVTNDKCRKCHSQPETIQHITGACATLTQTDYTHRHNQVANVIHQKLALKYTLIQNTNTPYYNYTPQTILENETHKLYYDRAILTDRTIHYNRPDITLQDKINKVTYLIDIAVPNTHNIQKTISEKISKYAELKDEVTRIWRQQKVYVVPIVLSTTGVIPNHLLHSLKLLNLKETLYITLQKAAILNTCRIVRKFMQIDENEIGPHHNTSVT

SEQ ID NO: 21237 - protein, 1312 aa, Noctua pronuba
METRSKKKRIGPLPGGDRRGTPGADAGCLSMRTVSGEELSRRAPTDKDTTAEIIGDGDRLTDRTDTPVEPYSPSTVSYTPSRRSSPSIPSSPTISSPPIISLSTVSPIPTLNAARGVSTFLPASTKAGKARVRMKWSKEVNTFIMRTYLYITKLETDMTTYRQQLHELFKRRYPEITVSEQRISDQRRTIVRNKLLSLEEMDRIKVDVRTQLNLESVNDEDTNNIAVTENTIENTQQEQPQAYAQLETYTQSQPYYQSQTYSQSTHTSTQTENVTIMLENDIEVLANIDQNPPTDTRVQEIHDKFKTALTQYSGMDPTARPKLPKLRYTPKLVQLVNCFNQNILTQYISEETQLIDVHTLIYCTALVISEELNFKITEYTGNTRQSNVNKPAWQQRLEKDIEKLRADCGRLTQYINNNRSNKVVKRVEVIFKNMAVHTRHENHNRRPEEFLDTLKQKLALKVHRLRRYKKAQERKNDNTLFATNEKNFYRKLQKPQTDTDTPTTENHTNNIELPTTEQLETFWAGIWEEQVHHKETSEWIQAEKTKWSSLEEMEFIELSESDITSITARLHNWKSPGIDKIHNYWYKKLESLHNILAKNLTEIILGKQNIPEFIATGITYMLPKTHYSSQPSQYRPITCLPTIYKILTSAITRKINKHVEHHNIIAEEQKGCRRGHMGCKEQLVIDSIIHKHAATKNRNLHCTYIDYKKAFDSIPHSWLIQILNIYKINPKIMEFLQNIMTRWKTTLQLNYRDNAVTTRQIAIKKGIYQGDSLSPLWFCLALNPLSHLLQRCQAGYCLKQTTEETTISHLIYMDDIKLYAKTEKEMKKLIDITTEFSKDINMQFGLDKCKTVHIIRGKIKPGDYAINTNDTIAAMEPTDLYKYLGYRQLKGLDHTTIKQTLNTEYKRRVVAVCKTQLSGKHLIKALNTYAIPILTYSFGVIKWSKTDIQQIERTTRTTLTKHNNLHPKSAIERLTIKRQNGGRGLIDIHHLWQKQITRLKTFFNSKSHTSNIHKAIVMNDNRYTPLNLNEQTDTQHTNNEDPHKQKLEDWKKKVLHGRHPHDLEQPHIDTLASNKWLKIGSLFPETEGFIIAIQDQIINTKNYRKFIIKDPTMTNDKCRKCHSQPETIQHITGACTTLTQTDYTHRHNQLANVIHQNLALKHKLIQDSNTPYYKYVPQPVVENATHKLFYDRGVLTDRTIHYNRPDIILQDKVNKVTYLIDIAVPNTHNLQKTIGDKISKYAELKEEVTRIWRQEKVYVVPIVVSTTGVIPNHLHHSLKLIDLKDSIYITLQKAAILNTCRIVRKFMQIDEN

SEQ ID NO: 21238 - protein, 1307 aa, Noctua pronuba
METRSKKKRIGPLPGGDRRGTPGADAGCLSMRTVSGEELSRRAPTDKDTTAEIIDDGDRLTDRTDTPVEPYSPSTVSYTPSRRSSPSIPSSPTLSSSPIISLNTVSPTPTLNAARGVSTFLPASTKAGKARVRMKWSKEVNTFIMRTYLHITKLETDMTTYRQQLHELFTRRYPEITVSEQRISDQRRTIVRNKLLSLEEIERLKVEVRLQLESENNEDINNISITQNIFENTQQEQPQTVDQSEPYTQSLPYYQSQTYSQSTHTSTQTENVTIMLENDIEVLANIDQNPPTDTRIQEIHDKFKIALTQYSGMDPAARPKLPKLRYTPKLVQLINCFNQNILTQYISEETQLIDVHTLIYCTALVISEELNFKITEYTGNTRQPNAYKPAWQQRLEKDIEKLRADCGRLTQYINNNRSNKVVKRVELIFKNMAVHTRHENHNRKPEEFLDTLKQKLALKVHRLRRYKKAQERKNDNTLFATNEKNFYRKLQKPQSDTDTPTTENNIELPTTEQLETFWAGIWEEQVQHRETSEWIQDEETKWSSLEEMEFIELSESDISSVTARLHNWKSPGIDKIHNYWYKKLESLHKILAKNLTEIILGKQNIPEFIATGITYMLPKTHYSPQPSQYRPITCLPTIYKILTSAITTKINKHVEHHNIIAEEQKGCRRGHMGCKEQLVIDSIIHKHAATKNRNLHCTYIDYKKAFDSIPHSWLIQILHIYKINPKIIEFLRNIMSRWKTTLQLNYRDNAVTTRQIAIKKGIYQGDSLSPLWFCLALNPLSHLLQRCQAGYCLKQTTDETTISHLIYMDDIKLYARTEKEMKKLVDITTEFSKDINMQFGLDKCKTVHIIRGKIKPGDYTINTTDTITAMEPTDLYKYLGYRQLKGLDHTTIKQTLNTEYKRRVVAVCKTQLSGKHLIKALNTYAIPILTYSFGVIKWSKTDIQQIERTTRTTLTKHNNLHPKSAIERLTIKRQNGGRGLIDIHHLWQKQITRLKTFFYSKSHTSNIHKAIVMNDNSYTPLNLNEQTDTQNTNNEDPQKQKIEDWKKKVLHGRHPHDLEQPHIDTLASNKWLKIGSLFPETEGFIIAIQDQIINTKNYRKFIIKDPTMSNDKCRKCHSQPETIQHITGACTTLTQTDYTHRHNQLANIIHQNLALKHKLTQDSNTPYYKYVPQPVVENTTHKLFYDRGVLTDRTIHYNRPDIILQDKVNKVTYLIDIAVPNTHNLQKTIGDKISKYAELKEEVTRIWRQEKVYVVPIVVSTTGVIPNHLHHSLKLIDLKDSIYITLQKAAILNTCRIVRKFMQIDES

SEQ ID NO: 21239 - protein, 1282 aa, Autographa pulchrina
METRSKKKRIGPLPGGYRRGTPGADAGCLSMRSVSGEELSRRAPIDKDTTAETSDEIDRLTDRTNSPVEPFSPSTISYTPSLASSPLTVSNSDILPTPTLDVAREVNTFLPASTKAGKQRVRMRWSKEVNLFIMRTYYYITKLETDMTIYRKVLHELFSQKYPEISVSEQRISDQRRTIVRNKLLSQVELDRLKNEVRAQLEECAKEIPLVQTNTEDLGIPLPNSAQLNLNMQTLSQNYLTSHIGTQTESLTLTIENDINTFVEPDPLPDPSTEDILEKLRTALVLYSGMDPVSRPKLPKLKYSPKLLQLVLLFNNSILSNFLSEDTQLVDLNTLIYCTALLISEELNYKVTEYAGNTRPKHNNKPAWQVRLERDIEKLRADCGRLTQYINNNRSNKVIKRVEAIFKSRIMHTRHETDNRKPEEFLDTLKQKLALKVRRLKRYKKAQQRKNDNIIFNSNEKMFYRNLLKPQSESIAQDNVEMPTKESLENFWSGIWEEQVQYNDNAEWIRQEETKWIAIEEMDFAEITETDILNITVRLHNWKSPGVDKIHNYWYKKLVTLHKILAKNLTDVILGRQLIPDFLATGVTYMLPKGKHSAEPSQYRPITCLPTLYKILTSALTSKINKHIEHHNIIAEEQKGCRRNHMGCKEQLIIDSTIHKHASTKNRNLHCTYIDYQKAFDSIPHSWLIKVLQIYKVNFKIIQFLSSIMTRWKTTLQLNCNRTSVTSRQISIRKGIYQGDSLSPLWFCLALNPLSSMLHRNRVGYCFKHSAQEVLISHLIYMDDIKLYSKSEHDMKKLLDTTTLFSNDINMQFGLDKCKTLHIVRGKIKPGDYPVNSIECITAMEPTDLYKYLGYKQLKGLDHTSIKSTLDTEYKRRVNTLCKSHLAGKHLIKAINTYAIPILTYSFGVIKWTKTDIEQIERTTRTTLTKHNNLHPKSAIERLTIKRQDGGRGLIDIHHLWQKQISRLKSFFLTKSNTSDIHKAIAQNDDNYTPLNLNDQTETLNISSSDPQKQKMETWKKKVLHGRHPHDLEQPHVDKIASNKWLKVGNLFPETEGFILAIQDQIINTKNYRKYIIKDPTVTNDKCRKCHTQPETIQHITGACTSLTQTDYTHRHNQVVNIIHQQLALKYKLIENNKTPYYKYTPQTVLENGKHKLYYDRAILTDKTIHYNRPDITLQDKENKTTYLIDIAVPNTHNLQKTMAEKISKYAELKEEVARIWRQDKVVVVPIVLSSTGVIPNNLHNSLKVIELNKSTYITLQKAAILNTCRIVRKFLSLEDNN

SEQ ID NO: 21240 - protein, 1309 aa, Omphaloscelis lunosa
METRSKSKRIGPLPGGDRRGTLGADAECLSMRTVSGEELNRRTPTDKDVTAEIIDDGDGLTNRTNTPVEPYSPSTVSYTPSRPSSPSIPSSPPITCLNSIPPTPTLNVAREVSSFLPASTKAGKARVRMRWSKEVNLFIMRTYFYITKLETDMTTYRQQLHELFTRQYPEITVSEQRISDQRRVIVRNKLLSPQIIEQLKEETRIQLQEAENITNDNAIPLLQNLTAIDEQPHTQVEPYTQSQPYNQSQAYTQTPHTSTQTESITLTLENDIETLTVADQNLTTDMYIQEIHDKFRTTLAQYSGMDPTVRPKLPKLRYSPNLFRLVNLFNENILNQFVSDDTQLIDIHTLIYCTAVVVSEELNFKITQHTGNTRPKQNIKPAWQQRLEKDIEKLRADCSRLTQYINNIRSNKVVRRVEAIFRNSFTHTRHENNNRKPEEFLDTLKQKLALKVHRLRRYKKAQQRKNDNAIFASNEKMFYRNLHKPDTDTNHENNTDAPDQPTKEQLETYWSSLWEEQEQHNNKATWITEEETKWRAIDEMEFVEITEADITHLTGRLHNWKSPGIDKIHNFWYKKLTSLYKPIAKNLTEIILGQQNIPDFIATGITYMLPKTKKSPQPSQYRPITCLPTIYKILTSAITTKINSHIEHHNIMAEEQKGCRRGHMGCKEQLIIDSTIHKHTTIKNRNLHCTYIDYKKAFDSVPHSWLIQILEIYRINSKIIDFLRNIMPLWKTTLQINCNQYNVTTRQIAIKKGIYQGDSLSPLWFCLALNPLSHLLQRCRAGYCLKHTTEQTTISHLIYMDDIKLYAQTEKDMKKLVEATAEFSLDINMQFGLDKCKTLHIIRGKIRPGNYVVHSTDTITAMEPTDLYKYLGYTQLKGLDHVRIKESLTAEYKRRLSAICKTQLSSKNLIKALNTFAIPVLTYSFGVIKWTKTDTEHLERITRTTLTKHNNLHPKSAIERLTIKRQNGGRGLIDIQHLWRKQVCRLKTFFHSKSRTSNIHKAIAQNDFNYTPLNLIEHRDTTQITRDDPQKQKIEDWKKKVLHGRHPHDLEQSHVNKLASNKFLKIGNLFPETEGFIIAIQDQIINTKNYRKFIIKDPSVINDKCRKCHIQPETIQHITGACTTLTQTDYTHRHNQVANVIHQKLAVKYTLIQDTNTPYYNYAPQIILENDTHKLYFDRAILTDKTIHYNRPDITLQDKINKVTYLIDIAVPNTHNIQKTISEKISKYAELKDEVTRIWRQQKVYVVPIVLSTTGVIPNHLLHSLKLLNLKETLYITLQKAAILNTCRIVRKFMQIDENEIGPHNTSST

SEQ ID NO: 21241 - protein, 1282 aa, Heliconius ethilla
METRLQKKLRGPLPEGDRRGTPGADAGCFSMRTVGGLELNRRAPTDKYTTAEHTSQPNSPIEPYSPSSESYTPSIPSSPSSNHTVEHVPTFSVAQEANAFLPASTKAGKPRVRMRWSSEVNMFIMRTYYRITKLETDFSTYRQRLHELFCQKYPYITVSEQRVSDQRRAIVRNRLVPQDLLNQIKEEVKCEIELEEIEMDNITRNQNQSHLVLSNITTAVSQVGEQSQNYFNTQTTQTSTQTESLNCLIENEIETLIVPTNYTDEFITNLREKLSPTLNLFSGLDPSIRLNLPKLKYTRKLTELIQIFNFKILGNYNSNDIQLIDIHTLIYCTALVIGEELGYKIIQRTNTGQRKKYKNKPSWQIRLEKSIEKLRVDIGRLTQYINSNRSQKVVKTVMKIFRNTTLHTKHENDNQKLEEFLDTLKQKLALKSHRLKRYKKAQKRKDDNILFRTREKTFYRQLSKPNHQSQDINKMSIPTEEQLTTYWSDIWEQELKHNETAKWILDETDKYKIIDTMNFSEITETEILKITAKLHNWKSPGADKVHNFWYKKLTIFHRALAKNFTDIILNKQNIPNFMAIGITYMIPKNKFSSEPSQYRPITCLPTIYKILTSVITSRITTHIEKYNVIAEEQKGCRRGHMGCKEQLIIDSTIHKHATTKNRNLHCTYIDYKKAFDSIPHSWLIQILKIYKISPFIIEFLNIIMSQWKTTLQLNYNSTTVTTRHIQIKRGIFQGDSLSPLWFCLALNPLSNLLQNSRLGYSFSSRTQNSLISHLIYMDDLKLYAKKDKDMKTLIDITTEFSNDIQMQFGLDKCKTLHITKGKIQKGDYSINDHNTITALESNDIYKYLGYNQLKGLDHTNIKHILITEFKKRIYAICKTQLSGKNLVKAINTYAIPILTYSFGVIKWSKTDIENLERLIRTTLTKHNYLHCKSAIERLTIKRLHGGRGIININTLWQNQIKSLQKFFINKSNNSKIHKTIIDNDHNYTPLNLDQITDIQNDQNINQQMQQIDNWKRKVLHGRHPHDLEQAHIDSIGSNMFLKVGSLFPETEGFIIAIQDQVINTKNYKKYIIKDTTVTNDKCRRCHSQPETIQHITGACSNLTHSDYTHRHNQICNIIHQQLAHKCKFIKNIDTPYYKYAPETILENSTHKLYYDRAVLTDRTIHFNRPDIILQNKIHKITYLIDIAVPNTHNLQKTIAEKINKYEELKEEIVRIWKQKTVYTVPIVLSTTGVIPKHLHHSLNMLNLKSTTYITLQRAAILNTCRIVRKFLQIDEQNTNIPH

SEQ ID NO: 21242 - protein, 834 aa, Agrochola circellaris
MFYRNLHKPDTDTSNENNTDAPDRPTKEQLETYWSSIWEEQEQHNDKATWITEEETKWRAIAEMEFVEITEADITHLTGRLHNWKSPGIDKIHNFWYKKLTSLYKPIAKNLTEIILGQQNIPDFIATGITYMLPKSKNSPQPSQYRPITCLPTIYKILTSAITMKINSHIEHHNIMAEEQKGCRRGHMGCKEQLIIDSTIHKHASTKNRNLHCTYIDYKKAFDSVPHSWLIQILEIYRINSKIIDFLRNIMPLWKTTLQINCNHNNVTTRQISIKKGIYQGDSLSPLWFCLALNPLSHLLQRCRAGYCLKYTTEQTTVSHLIYMDDIKLYAQTEKDMKKLVEATAEFSLDINMRFGLDKCKTLHIIRGKIRPGNYVVNNTDTITAMEPTDLYKYLGYTQLKGLDHVRIKETLTTEYKRRVNAICKTQLSGKNLIKALNTFAIPILTYSFGVIKWTKTDTEQLERTTRTTLTKHNNLHPKSAIERLTIKRQNGGRGLIDIQHLWQKQVCRLKTFFHSKSRTSNIHKAIAQNDFNYTPLNLNEQPDTPQITSDDPQKQKIEDWKKKVLHGRHPHDLEQSHVNTVASNKFLKIGNLFPETEGFIIAIQDQIINTKNYRKFIIKDPSVTNDKCRKCHIQPETIQHITGACTTLTQTDYTHRHNQVANVIHQKLAVKYTLIQDTNTPYYNYTPQTILENDTHKLYYDRAILTDRTIHYNRPDITLQDKLNKVTYLIDIAVPNTHNIQKTISEKISKYAELKDEVIRIWRQQKVYVVPIVLSTTGVIPNHLLHSLKLLNLKESLYITLQKAAILNTCRIVRKFMQIDENEIGPHHNTFST

SEQ ID NO: 21243 - protein, 1314 aa, Noctua pronuba
METRSKRKRIGPLPGGDRRGTPGADAGCLSMRTVGGEELSRRAPTDKNTTAEIIDDGDRLTDRTDTPVEPYSPSTVSYTPSRRSSPSIPSSPSVSSPPIISLNTVTPTPTLNAARGVSTFLPASTKAGKARVRMKWSKEVNLFIMRTYLHITKLETDMTTYRQQLHALFTRQYPEITVSEQRVSDQRRIIVRNKLLSQEVIDQLKEEVRSQLLQEETVNYIDANNITQNLSEISHQEQPQSLSQSQIIYTQSQPYNQSRAYTQISHTSTQTESITLTLENDIETIVVLDQHLTTDIYIQEINDKFRTTITQYSGMDPAARPRLPKLKYTPNLFRLVNLFNESILTHFISDDTQLIDIHLLIYCTAVVISEELKFKITDHTRTRQNVAPAWQQRLENDIEKLRADIGRLTQYINGCRSNKLVKRVEVIFRNNATHTRHEQNNRKPEEFLDTLKQKLALKVHRLKRYKKAQQRKNDNAIFTTNEKIFYRNLHIPKYDRNSGNNTNTPNLPSKEQLESYWASIWEEQKQHNDKASWIADEEAKWRDIDGMEFVEVTESDIIHITTRLHNWKAPGIDKIHNFWYKKLTTLHKSLAKNLTDIVLGQQNIPEFITTGITYMLPKTKYTSEPSQYRPITCLPTIYKILTSAVTKKINSHIVHHNIIAEEQKGCRQGHMGCKEQLIIDSTIHKHATSKNRNLHCTYIDYKKAFDSVPHSWLIQILEIYRINPKIIHFLRHVMLQWKTTLQINSNNNNVTTRQISIKKGIYQGDSLSPLWFCLALNPLSHLLQSCGAGYCLKHSTDETTISHLIYMDDIKLYAKSEKEMKKLVDITAEFSQDINMQFGLEKCKTLHIVRGKVRPGDYELNESDTIAALEPTDLYKYLGYTQLKGLDHVKIKDTLTTEYKKRVNAVCKTQLSGKHLIKALNTFAIPVLTYSFEVIKWTKTDTDQLQRTTRTTLTKHNNLHPKSAIERLTIKREHGGRGLIDIQHLWRKQVSRLKLFFHTKSRTSNIHKAIVTNDLNYTPLNLSDQIETQNTTSDDPQTQKIEDWKKKVLHGRHPHDLEQSHINKLASNKWLKIGNLFPETEGFIIAIQDQIINTKNYRKYIIKDPTVTNDKCRKCHVHPETIQHITGACTTLTQTDYTHRHNQVANVIHQKLALKHTLIQNSNTPYYNYKPETTLENTTHKLYYDRAILTDRTIHYNRPDIILQDKINKVTYLIDIAVPNTHNIQKTITEKISKYAELKEEVTRIWRQEKVYVVPIVLSTTGVIPNHLIHSLKLLDLKETLYITLQKAAILNTCRIVRKFMQIEENEIGPHHNT

SEQ ID NO: 21244 - protein, 1309 aa, Noctua pronuba
METRSKKKRIGPLPGGDRRGTPGADAGCLSMRTVSGEELNRRAPTDKDTTAEIIDDGDRLTDRTDTPVEPYSPSTVSYTPSRRSSPSIPSSPTISSPPIISLSTVSPTPTLNAARGVSTFLPASTKAGKARIRMKWSKEVNTFIMRTYLYITKLETDFTTYRQQLHQLFTRRYPEITVSEQRISDQRRTIVRNKLLSVEEMDRMKVEVRTQLHLESVNDEDTNNIAVTENTIENTQQEQAQAYAQLEPYTQSQPYYQSQTYSQSTHTSTQTENVTIMLENDIEVLANIDQNPPTDTRIQEIHDKFKTALTQYSGMDPAARPKLPKLRYTPKLVQLVNCFNQNILTQYISEETQLIDVHTLVYCTALVISEDLNFKITEYIGNTRQPNANKPAWQLRLEKDIEKLRADCGRLTQYINNNRSNKVVKRVEQIFKNMAVHTRHENHNRKPEEFLDTLKQKLALKVHRLRRYKKAQERKNDNALFATNEKNFYRKLQKPQTDTDTPTTENNIELPTTEQLESFWAGIWEEQVHHKETSEWIQDEKTKWSSLEEMEFIELSESDISSVTARLHNWKSPGIDKIHNYWYKKLESLHKILAKNLTEIILGKQNLPEFIATGITYMLPKTHYSPQPSQYRPITCLPTIYKILTSAITTKINKHVEHHNIIAEEQKGCRRGHMGCKEQLVIDSIIHKHAATKNRNLHCTYIDHKKAFDSIPHSWLIQILNMYKINPKIIEFLQNIMTRWKTTLQLNYRDNAVTTRQIAIKKGIYQGDSLSPLWFCLALNPLSHLLQRCQAGYCLKQTTEITTISHLIYMDDIKLYAKTEKEMKKLIDITTEFSKDINMQFGLDKCKTVHIIRGKIKPGDYSINTNDIIVAMEPTDLYKYLGYRQLKGLDHTTIKQTLNTEYKRRVVAVCKTQLSGKHLIKALNTYAIPILTYSFGVIKWSKTDIQQIERTTRTTLTKHNNLHPKSAIERLTIKRQNGGRGLIDIHHLWQKQITRLKTFFNSKSHTSNIHKAIVMNDNSYTPLNLNEQTDPQNTNNEDPQKLKLEDWKKKVLHGRHPHDLEQPHIDTLASNKWLKIGSLFPETEGFIIAIQDQIINTKNYRKFIIKDPTMTNDKCRKCHSQPETIQHITGACTTLTQTDYTHRHNQLANVIHQNLALKHKLIQDSNTPYYKYVPQPVVENTTHKLFYDRGVLTDRTIHYNRPDIILQDKVNKVTYLIDIAVPNTHNLQKTIGDKISKYAELKEEVTRIWRQEKVYVVPIVVSTTGVIPNHLHHSLKLIDLKDSIYITLQKAAILNTCRIVRKFMQIDEN

SEQ ID NO: 21245 - protein, 773 aa, Ochropleura plecta
MEFVEVTEADITHITGRLHNWKSPGIDKVHNFWYKKLTSLYKPIAKNLTQIILGQQNAPEFMATGITYMLPKTKNSPEPSQYRPITCLPTIYKILTSAITTKINTHIEQHNIMAEEQKGCRRGHMGCKEQLIIDSTIHKHATSKNRNLHCTYIDYKKAFDSVPHSWLIQILKIYRINAKIIDFLSNIMSQWKTTLQINCNQNSIITRQILIKKGIYQGDSLSPLWFCLALNPLSHLLQRCQAGYRLKHTTEQTTISHLIYMDDIKLYAQTEKDMKKLVEVTADFSQDINMQFGLDKCKTLHIIRGKIRPGNYVVNNTDTITAMEPTDLYKYLGYTQLKGLDHVRIKETLTAEYKRRLNVVCKTQLSGKNLIKALNTFAIPILTYSFGVIKWTKTDTEQLERTTRTTLTKHNNLHPKSAIERLTIKRQNGGRGLIDIQHLWRKQVIGLRTFFHTKSQTSNIHQAIAQNDHNYTPLNLNEQLDTSHNTNEDPQTQKIEDWKKKVLHGRHPYDLEQTHVNKVASNKWLKIGNLFPETEGFIIAIQDQIINTKNYRKFIIKDPSVTNDKCRKCHTQSETIQHITGACTTLTQTDYTHRHNQVANVIHQRLAVQYTLIQDTNTPYYNYTPQATLENDTHKLYYDRAILTDRTIHYNRPDIILQDKINKITYLIDIAVPNTHNIQKTITEKISKYAELKEEVTRIWRQEKVYVVPIVLSTTGVIPNHLLHSLKLLSLKETLYITLQKAAILNTCRIVRKFMQIEENEIGPHHNTPHTST

SEQ ID NO: 21246 - protein, 1048 aa, Xestia xanthographa
MLENDIEVLANIDQNPPTDTPIQEINEKFKTALTQYSGMDPAARPKLPKLRYTPKLVRLDNCFNQNILNQYISEETQLIDVHTLIYCTALVISEELNFKITEYTGNTRQPNANKPAWQLRLEKDIEKLRADCGRLTQYINNNRSNKVVKRVEIIFKNMAVHTRHENHNRKPEEFLDTLKQKLALKVHRLRRYKKAQERKNDNALFATNEKNFYRKLQKPQTDTDTPTTENNVELPTTEQLETFWAGIWEDQVHHKETSQWIQDEETKWSSLEEMGFSEISESDVASVTARLYNWKSPGIDKIHNYWYKKLESLHTILAKNLTEIILGKQNIPEFIATGITYMLPKTQYSPQPSQYRPITCLPTIYKILTSAITTKINKHIEHHNIIAEEQKGCRRGHMGCKEQLVIDSIIHKHAATKNRNLHCTYIDYKKAFDSIPHSWLIQILQIYKINPKIIHFLQNIMSHWKTTLQLNYRHTAITTRRITIKKGIYQGDSLSPLWFCLALNPLSDLLRRCQAGYSFKHDTEETVISHLIYMDDIKLYARSEKEMEKLIGTTTEFSKDINMQFGLDKCKTVHIIRGKIKPGDYPINNIDTITALEPTDLYKYLGYKQLKGIDHTAIKHTLNTEFKRRVIAVCKTQLSGKNLIKALNTYAIPILTYSFGVIKWSKTDIQQMERTTRTTLTKHNNLHPKSAIERLTIKRQYGGRGLIDIHHLWQKQITGLRTFFHSKSHTSSIHKAIVKNDINYTPLNLHEPTDTQHINNEDPQQQKLEDWKKKVLHGRHPHDLEQSHVDRKASNKWLKIGSLFPETEGFIIAIQDQIINTKNYRKFIIKDPTITNDKCRKCHSQPETIQHITGACTTLTQTDYTHRHNQVAHIIHQNLALKHKLIQDTNTPYYKYVPERFLENTTHKLFYDRAILTDRTIHYNRPDIILQDKANKVTYLIDIAVPNTHNLQKTIGEKISKYAELKEEVTRIWRQEKVYVVPIVVSTTGVVPNHLHHSLQLLDLKDSIYITLQKAAILNTCRIVRKFMQIEDNASHNNHISSHTHTLR

SEQ ID NO: 21247 - protein, 1317 aa, Noctua fimbriata
METRSKKKRIGPLPGGDRRGAPGADAGCLSMRTVSGEELNRRAPTDKDTTAEIIDDGDRLTDRTDTPVEPYSPSTVSYTPSRRSSPSIPSSPTPLSPPIITLNTISPTPTLNAAWGVSTFLPASTKAGKARVRMKWSKEVNLFIMRTYLHITKLETDMTTYRQQLHALFTRQYPDITVSEQRISDQRRTIVRNKLLSQEVIDQLKEEVRTQLLHEETVNYTDTNNITQNLSEISHQEQPQSLSQSQIIYTQSQPYNQSQAYTQISHTSTQTESITLTLENDIETIVVPDQHLTTDIYIQEINDKFRTTITQYSGMDPAARPRLPKLKYTPNLFRLVNLFNESILTHFISDDTQLIDIHLLIYCTAVVISEELNFKITDHTRATRTRQNVAPAWQQRLEKGIEKLRADIGRLTQYINGCRSNKLVKRVEVIFRNNGTHTRHELNNRKPEEFLDTLKQKLALKVHRLKRYKKAQQRKNDNTIFTTNEKIFYRNLHNPKNDRNYENNTDTPNLPLKEQLETYWASIWEEQKQHNDKASWIVDEEEKWRDINVMEFVEVTESDIIHITTRLHNWKAPGIDKIHNFWYKKLTTLHKSIAKNLTDIILGQQNIPEFITTGITYMLPKTKHTSEPSQYRPITCLPTIYKILTSAVTKKINSHIIHHNIIAEEQKGCRQGHMGCKEQLIIDSTIHKHATSKNRNLHCTYIDYKKAFDSVPHSWLIQILEIYRVNPKIIDFMRHVMLQWKTTLQINSNNNNVTTRHISIKKGIYQGDSLSPLWFCLALNPLSHLLQRCGAGYCLKHSTDETTISNLIYMDDIKLYAKSEKDMKKLVDITAEFSKDINMQFGLEKCKTLHIVRGKVRPGDYAVNESDSITALEPTDLYKYLGYTQLKGLDHVKIKNTLTAEYKKRVNAVCKTQLSGKHLIKALNTFAIPVLTYSFGVIKWTKTDTEQLQRTTRTTLTKHNNLHPKSAIERLTIKREHGGRGLIDIQHLWRKQVSRLKLFFHTKSRTSNIHKAIVTNDLNYTPLNLSDQIETQNTTNDDQQIQKIEDWKRKVLHGRHPHDLEQSHINKLASNKWLKIGNLFPETEGFIIAIQDQIINTKNYRKYIIKDPTLTNDKCRKCHVHPETIQHITGACTTITQTDYTHRHNQVANVIHQKLALKHTLIQNTNTPYYNYKPETTLENTTHKLYYDRAILTDRTIHYNRPDIILQDKLNKITYLIDIAVPNTHNIQKTITEKISKYAELKEEVTRIWRQEKVYVVPIVLSTTGVIPNHLIHSLKLLDLKETLYITLQKAAILNTCRIVRKFMQIEENEIGPHHNT

SEQ ID NO: 21248 - protein, 1313 aa, Parnassius apollo
METRSKSKRIGPLPGGDRRGAPGADAGCHSMRSVSGEELNRRAPTHKDTTAELIDDGDRLTDRTDTPVEPYSPSTVSYTPSRPTSPSIPSTPTPPSPPITSLNTVSPTPTLSAAREVSTFLPASTKAGKARVRMKWSKEVNLFIMRTYLYITKLETDMTTYRQQLHAHFTRQYPEITVSEQRISDQRRTIVRNKLLSQEVIDQLKEEVRTQLIQEEATNSYVETNITQNTSENDRQVQPQLLSQSQLIYTQSQPCDHSQISHTSTQTETVILTLENDIETIVVPDQHLTTDTYIQEINEKFRTTITLYSGMDPAARPRLPKLKYTPNLFRLVNLFNETILTQYISDDTQLIDLHLLIYCTAIVISEELNFKITDNARTTRTRQNTEPAWQQRLEKDIEKLRANIGRLTQYINGCRSNKLVKKVEVIFRNNATHTRHEKSNTRPEEFLDTLKQKLALKVHRLKRYKKAQQRKKDNVRFATNEKLFYRNLHKPQTDIIDERNTHTPNLPTKEQLEAYWASIWEEQKQHNDKASWIIEEEAKWRDIDEMEFEEVTELDITLITARLHNWKSPGIDKIHNFWYKKLTSLHKPLARNLTDIITGQQNTPEFIATGITYMLPKTKNSPQPSQYRPITCLPTIYKILTSAITKKIQSHIEHHNIIAEEQKGCRQGHMGCKEQLIIDSTIHKHAISKNRNLHCTYIDYKKAFDSVPHSWLLKILEIYRINPKIIDFLRRIMLQWKTTLQINCNQNTVTTRQISITKGIYQGDSLSPLWFCLALNPLSHLLQSCGAGYCLKLNTDETTISHLIYMDDIKLYAKTDKDMKKLIDITTEFSSDINMNFGLDKCKTLHIVRGKVRPGDYVVNETEAITAMESTDLYKYLGYVQLKSLDHVRIKNSLTTEYKRRLNAVCKTQLSSKHLIKAINTYAIPILTYSFGVIKWSKTDAEQLERTTRTTLTKHNNLHPKSAIERLTIKREHGGRGLMDIQHLWRKQVSRLKSFFYTKSHTSNIHKAIVTNDINYTPLNLSNQIESQNTTSDNPQTHKIDEWKKKVLHGRHPHDLEQSHINKLASNKWLKIGNLFPETEGFIIAIQDQIINTKNYRKYIIKDPTVNNDKCRKCHTHPETIQHITGACTTLTQTDYTHRHNQVANVIHQKLALKHALIPDANTPYYNYRPKHTLENTTHKLFYDRGILTDRTIHYNRPDIILQDKINNITYLIDIAVPNTHNLQKTITEKICKYAELKDEVTRIWQQEKVYVVPIVLSTTGVIPNHLLRSLKLLQLKETLYITLQKAAILNTCRIVRKFMQIEENEIEPHQIT

SEQ ID NO: 21249 - protein, 1180 aa, Hyposmocoma kahamanoa
MKWSKDVNMFIMRTYFYITKLETNMTTYRPQLHELFVRQYPEVTVSEQRLSDQRRAIIRNKLLSQEILEQLKQETRVRLQEEDNNSDPNSGLLSQSITEFTQQLQSQSGAQLENNIQHQNNYSRGFTQISQTSTQTESVAFMLENDTETLVDEDQNPITDKLAQELHDKLTTVLTQYSGMDPAVRPKLPKLKYGPNLFRLVNLFNENILKQFITNDTQLTDIHTLIYCTAVVISEELNFKITEHTRNTRPRKDIKPPWQQRLEKDIEKLRADCGRLTQYINNNRSNKVVKRVEAIFRSNLTHTKHESNNKKPEEFLDTLKQKLAIKVHRLRRYKKSQQRRNDNTIFTTNEKLFYRNLQKPSNSTNEENNTNTNNASTPTKEQLETFWSGIWEDQVQHNDKATWITVEETNWRAIDEMEFEEITEFDITSITDRLHNWKSPGIDKIHNFWYKKLTSLHQIIAKNFTEIILGQQNIPDFITTGITYMLPKTKNSSHPSQYRPITCLPTLYKILTSAIAIKINSHIEHHSIMAEEQKGCRRGHMGCKEQLIIDSAIHKHATTKNRNLHCTYIDYKKAFDSVPHSWLLQILEIYKINTRIINFLRNIMSKWKTTLQVNSTNNTVTTRQISIKTGIYQGDSLSPLWFCLALNPLSHLLQRRRIGYCHKHAAEETVISHLIYMDDIKLYAQSEKDMKKLVETTAEFSKDINMQFGLDKCKTLHIIRGKVRPGNYVINNTDTITAMEPADLYKYLGYAQLKGLDHVRIKDTLTTEYKKRLNAICKTQLSGKHLIKAINTYAIPILTYSFGVIRWTKTDTAQLERITRTTLTKHNNLHPKSAIERLTIKRQEGGRGLIDIQHLWRKQVSRLKTFFYSKSAISKIHKAIVLNDHNYTPLNLSEQTDTENVNNDDPQKQKIEDWKKKVLHGRHPHDLEQTHINSIASNKWLKIGNLFPETEGFMIAIQDQIINTKNYRKFIIKDSSVINDKCRKCRIQPETIQHITGACTALAQTDYTHRHNQVANVIHQNLALKYALIHESITPYYKYTPQTILENTTHKLYYDRAILTDRTIHFNRPDITLQDKLNKITYLIDIAVPNTHNIQKTIIEKISKYAELKDELVRIWRQEKVYVIPIVLSTTGVIPNHLLHSLKLLGFKENLYITLQKSVILNTCRIVRKFMQMEENEVGP

SEQ ID NO: 21250 - protein, 1301 aa, Spodoptera frugiperda
METRSKKKRIGPLPGGDRRGTPGADAGCFSMRTVSGAELSRRAPTNKDTTADISDDGDTQSNRSNTPLEPYSPSTISYTPSRSSSPSIPSSPVSHTVSLTPALDVARGANAFLPASTKAGKPRVRMKWSKEVNIFIMRTYFYITKLETDMTIYRKVLHELFCRQYPDVNVSEQRISDQRRTIVRNKLLSPETIHQIKEEIRQQLEAESENSNNTTSSPQNIQTNDQQTLPFTQTQPLNTQSQPYNYTQTTHSSTQTDSITLTLENDIDTLTPVEQATVTEEYTQQICDKFKTSLTQYSGMDPTSRPRLPKLPYNRNLFRLVNLFNESIIARFISEEAQLTDVHTIIYCTALVISEELNFKITGETGNRRPRTSIKPPWQQRLEKGIEKLRADCGRLTQYINNNRSHKVVRKVEAIFKNTRIHTRHENDNRTPEEFLDTLKQKLALKVHRLRRYKKAQQRRNDNTIFTTNEKIFYRKLNTSHTNITDDQNTTPSKEQLETFWAGIWEESVNHNDRAAWVTEEETKWIGIDEMEFIEITESDIANVTARLHNWKSPGIDKVHNFWYKKLTILHKHIAKNLTEIVLGKQRIPEFIATGITYMLPKAKHSPQPSQYRPITCLPTIYKILTSAITIKINSHIERHKIMAEEQKGCRRGHMGCKEQLIIDSTIHKHATSKNRNLHCTYIDYKKAFDSVPHSWLIQILEIYKINNKIIDFLRNIMPHWKTTLLINTTNNNIITRQISIKKGIYQGDSLSPLWFCLALNPLSHLLQRCHAGYCLKHNSEETIVSHLVYMDDIKLYAKSEKEMKNLIDITATFSKDINMQFGLDKCKTLHIIRGKIRPGDYVVNDRDTITAMEQTDLYKYLGYTQLKGLDHVKIKNTLTAEYKRRLNAICKTQLSGKHLIKAINTFAVPVLTYSFGVIKWTKTDAEQLERTTRTTLTKHNNLHPKSAIERLTIKRQNGGRGLIDIYQLWQKQVHKLKSFFHTKSQTSDIHKAVVNNDFNYTPLNLNEPIDEVNPNEIDPQKEKIEAWKRKVLHGRHPHDLEQAHVNTIASNKWLKIGSLFPETEGFIIAIQDQIINTKNYRKFIIKDPTVTNDKCRKCHLQPETIQHITGACTTLTQTDYTHRHNQIVNVIHQKLALKYTLIQNTNTPYYKYTPETVLENSTHKLYYDRAILTDRTIHYNRPDITLQDKINKITYLIDIAVPNTHNIQKTITEKITKYAELKDEVTRIWKQNKVYVIPIVLSTTGVIPNHLLHSLKLLDLKETLYITLQKAAILNTCRIVRKFMQIEDNEINLQTTPTNT

SEQ ID NO: 21251 - protein, 1223 aa, Astraptes naxos
MRRSNRIKNKYSAQSGTVAEITSNPSSSPSSTHSLFQSPNSTPLSFEIKSNSVSRSTTVSPMSVDIEQLQNITLPVSDVARGANAFMPASTKAGKPRIRMKWTQDVNIFIMRTYYHITKLETDLTTYRKILHELFSRQYPDVKVSEQRVSDQRRMIIKNRYLAQEILNNLKEEVSKQLLEEQNINEINYENTQTDIEIDRNALEPQTQLQNNSSQPHAQRFVPTSHSSTQTEFITLLLENETETIADVAPPNDASFQDMYDKLQTAVTQYSGMDPTARPKLPRIKYTKHLIDLVHLFNQHILHRLISENVQLNDIHTLIYCTALVIAEELNYKIIHNITHTKSKDYTKPSWQIRLERDIESLRVDIGRLTQYINNNRSDRLVKKVQQIFNRITTHTKHESNNRKPEEFLDTLKQKLALKTHRLKRYKKTQQRRKDNIQFATNEKIFYRNLCKPKRGFTPNENIQTEIPTKEELEMYWSDIWEEKIRHNDKADWIAEEQRKWEVIEEMEFQEITEGDITNITARLHNWKAPGVDKIHNYWYKKLTTLHQPIAKALTDIILGKQNIPNFITIGITYMLPKTNNYTEPSQYRPITCLPTIYKILTSAITSKINTHIEHHNVLAEEQKGCRRGHMGCKEQLVIDSVIHKHATSKHRNLHCTYIDYKKAFDSVPHSWLIQILQIYRINPTIIDFLRNIMLHWKTTLHLYQGNKVITTRQIKINKGIYQGDSLSPLWFCLALNPLSNLLHNCQTGYLFNNRSEETKISHLIYMDDVKLYAKTHKDMQKLIDKTAQFSTDINMQFGLDKCKTLHIIKGKIQSGDYRVNNTDIISAMEPTDVYKYLGYNQSKGLQHTHIKQTLTTEFKRRIGAICKTHLSGKHITKAINTYSIPILTYSFGVIKWTKTDIEQLERIIRTTLTKHNHLHPKSAVERLNVRRQDGGRGVIDINYLWQKQISNLRHYFFTKSTTSNIHSAITHNDENHTPLNLADHTDQHTLNNRNPQLQKIEHWKNKVLHGRHPHDLEQTHVDKIASNKWLKIGNLFPETEGFIIAIQDQVINTKNYRKHIIKDPNIKNDKCRRCHTQPETIQHITGACTTLTQTDYTHRHNQVTNIIHQNLALKHNLIQNTNTPYYKYSPQTVIENTSHKLYYDRAILTDRTIHYNRPDIILQDKLNKITYLIDIAVPNTHNIQKTIVEKINKYVELKEEVTRIWKQNKVYVVPIVLSTTGV

SEQ ID NO: 21252 - protein, 1332 aa, Cecropterus confusis
MAKGNLVVSMRTLGTRGNPVLLTLTTVNAGLCRGRLLWSLASRGNKMRRSVRIKNKNSAQSGTVAEIVSNPSSPTSTTSSLSQSTNSTPLSFENRNNSISRSTTVSPMSVDVVQLQNVTLPALDVARGANAFLPASTKAGKPRVRMKWSQDVNIFIMRTYYHITKLETDMTTYRKTLHELFSIQYPDVNVSEQRVSDQRRMIVKNRYLTQEILDKLREEVSRQLHEDEHVNEVNDDNNQIHIEVDQNTLESQTHSQNTSFQSHILSQFNNQTFTPTLHSSTQTEFVTLLLENETNTIADFMPPDDNSFQDMYDKLQTAITQYSGMDPSARPKLPRIKYTKHLNDLVNLFNQHILYRLISKETQLNDIHTLIYCTALVIAEELNYKIIHNTTHKKPKDYTKPSWQIRLEKDIENLRVDIGRLTQFINNNRSDRLVKKVQHIFNRITKHTKHESNNRKPEEFLDTLKQKLALKTHRLKRYKKTQQRKIDNIQFATNEKLFYRNLCKPKIDFTTKKDNHTDIPTKEELETYWCNIWEENIRHNDNADWIREEQSKWEVIDEMQFEEITELDITNITARLHNWKAPGIDKIHNYWYKKLTILHQPLARALTEIILGKQHIPNFITIGITYMLPKTNNSTQPSQFRPITCLPTIYKILTSAITTKINKHIEHHNVLAEEQKGCRRGHMGCKEQLVIDAIIHKHATSKHRNLHCTYIDYKKAFDSIPHSWLIQILQIYRISPIIIEFLRNTMPLWKTSLHLNHGNKSITTRQINIHKGIYQGDSLSPLWFCLALNPLSNLLRNCQTGYRFNNSREETTISHLLYMDDIKLYAKTHKDMQKLVDTTAQFSKDINMQFGLDKCKTLHIIKGKIRPGDYRLNNNEVISAMESTDVYKYLGYNQLKGLLHTHIKHTLTTEFKRRIDAICKTHLSGKHLTKAINTYAIPILTYSFGIVKWTKTDIEQLERITRTTLTKHNQLHPKSAVERLHIKRQDGGRGIIDIHYLWQKQIYNLRQFFFMKSTTSNIHSAMTHNDKNLTPLNLSDHTDQHTFNNRNSQAQKIENWKNKVLHGRHPHDLEHTHVDKISSNKWLKVGNLFPETEGFMVAIQDQVINTKNYRKYIIKDPNVKNDKCRRCHTQPETIQHITGACINLTQTDYTHRHNQVTNIIHQNLALKHNLIQNTNTPYYKYTPQTVLENTSHKLYYDRAILTDRTIHYNRPDIILQDKLNKITYLIDIAVPNTHNIQKTIVEKINKYVDLKEEVARIWKQNKVYVVPIVLSTTGVIPYHLHQSIKLIGLKHSLYIPIQKAAILNTCRIVRKFMQIDEKEVSSQNVTQTIAPP

SEQ ID NO: 21253 - protein, 1317 aa, Noctua janthe
METRSKKKRIGPLPGGDRRGAPGADAGCLSMRTVSGEELNRRAPTDKDTTAEIIDDGDRLTDRTDTPVEPYSPSTVSYTPSRRSSPSIPSSPTPLSPPIISFNTVSPTPTLNATRGVSTFLPASTKAGKARVRMKWSKEVNTFIMRTYLYITKLETDMTTYRQQMHALFTRQYPDIAVSEQRIADQRRTIVRNKLLSQEVIDQLKEEIRTQLLQEETLNCIDTNNITQNVNEIYHQEQPQLLSQSQLIYSQSQPYNQSQAHTQISHTATQTESITLMLENYIETIAVPYQHLTTDTYIQEINDKFRTTITQYSGMDPAARPRLPKLKYTPNLFRLVNLFNESILTQFISDDTQLIDIHLLIYCTAVVISEELNFKITDHTGTPRTRQNLAPAWQQRLEKDIEKLRVDIGRLTQYIYGCRSNKLVKRVEVIFRNNLTHTRHEKNNRKSEEFLDTLKQKLALKVHRLRRYKKAQQRKKDNTTFATNEKMFYRNLHKPQTDTIDINNTNIPNLPTKEQLEEYWASIWEEPVQHNDKPSWIAEEEVKWRGVDETEFLEVAETDIAHITARLHNWKSPGIDKIHNFWYKKLTSLHKSLAKNLTDIILGQQNTPEFIATGITYMLPKTTNSPQPSQYRPITCLPTIYKILTSAITKKISSHIERHNIIAEEQKGCRQGHMGCKEQLIIDSTIHKHATSKNRNLHCTNIDYKKAFDSVPHSWLIQILEIYRINPKIIDFIRNIMLQWKTTLQINYNHNTVTTRQISIKKGIYQGDSLSPLWFCLALNPLSHLLQGCGAGYCLKHTTDETIISHLIYMDDIKLYAKTENDMKKLVDVTAEFSKDINMQFGLEKCKTLHIVRGKVRPGDYVVNDTDTISAMEQTDLYKYLGYAQLKGLDHTRIKNTLSNEYKRRVNAICKTQLSGKHLIKALNTFAIPVLTYSFGVIKWSKTDTEQLERTTRTTLTKHNNLHPKSAIERLTIKRQHGGRGLIDIQHLWRKQISRLKSFFHSKSRTSSIHKAIVINDLNYTPLNLSHQIETLNTNNDDPQQHKIEDWKKKVLHGRHPHDLEQSHINKLASNKWLKIGNLFPETEGFIIAIQDQIINTKNYRKYIIKDPTVTNDKCRKCHSQPETIQHITGACTTLTQTDYTHRHNQVANVIHQKLALKHTLIHNTSTPYYNYKPEATLENTTHKLYFDRAILTDKTIHYNRPDIILQDKINKVTYLIDIAVPNTHNIQKTITEKISKYAELKDEVTRIWRQEKVYVVPIVLSTTGVIPNHLLHSLKLLDLKESIYIILQKAAILNTCRIVRKFMQIEENEIGPHHNT

SEQ ID NO: 21254 - protein, 1184 aa, Noctua janthe
MKWSKEVNTFIMRTYLYITKLETDMTTYRQQMHALFTRQYPDIAVSEQRIADQRRIIVRNKLLSQEVIDQLKEEIRTQLLQEETLNCIDTNNITQNVNEIYHQEQPQLLSQSQLIYSQSQPYNQSQAHTQISHTATQTESITLMLENDIETIAVPYQHLTTDTYIQEINDKFRTTITQYSGMDPAARPRLPKLKYTPILFRLVNLFNESILTQFISDDTQLIDIHLLIYCTAVVISEELNFKITDHTGTPRTRQNLAPAWQQRLEKDIEKLRADIGRLTQYINGCRSNKLVKRVEVIFRNNLTHTRHEKNNRKSEEFLDTLKQKLALKVHRLRRYKKAQQRKKDNTTFATNEKMFYRNLHKPQTDTIDINNTNIPNLPTKEQLEEYWASIWEEPVQHNDKASWIAEEEVKWRGVDEMEFLEVAETDITHITARLHNWKSPGIDKIHNFWYKKLTSLHKSLAKNLTDIILGQQNTPEFIATGITYMLPKTKNSPLPSQYRPITCLPTIYKILTSAITKKISSHIERHNIIAEEQKGCRQGHMGCKEQLIIDSTIHKHATSKNRNLHCTYIDYKKAFDSVPHSWLIQILEIYRINPKIIDFIRNIMLQWKTTLQINYNHNTVTTRQISIKKGIYQGDSLSPLWFCLALNPLSHLLQGCGAGYCLKHTTDETIISHLIYMDDIKLYAKTENDMKKLVDVTAEFSKDINMQFGLEKCKTLHIVRGKVRPGDYVVNDTDTISAMEQTDLYKYLGYAQLKGLDHTRIKNTLSNEYKRRVNAICKTQLSGKHLIKALNTFAIPVLTYSFGVIKWSKTDTEQLERTTRTTLTKHNNLHPKSAIERLTIKRQHGGRGLIDIQHLWRKQISRLKSFFHSKSRTSSIHKAIVINDLNYTPLNLSHQIETLNTNNDDPQQHKIEDWKKKVLHGRHPHDLEQSHINKLASNKWLKIGNLFPETEGFIIAIQDQIINTKNYRKYIIKDPTVTNDKCRKCHSQPETIQHITGACTTLTQTDYTHRHNQVANVIHQKLALKHTLIHNTSTPYYNYKPEATLENTTHKLYFDRAILTDKTIHYNRPDIILQDKINKVTYLIDIAVPNTHNIQKTITEKISKYAELKDEVTRIWRQEKVYVVPIVLSTTGVIPNHLLHSLKLLDLKESIYIILQKAAILNTCRIVRKFMQIEENEIGPHHNT

SEQ ID NO: 21255 - protein, 1307 aa, Eilema depressum
METRSKRNRIGPLPGGDRRGTPGADAGCLSMRTVSGEELNRRAPTDKDTTAETADDGASLTDRTNTPAEPYSPSTISYTPSRISSPSIPSSVPSSPPSNIFYTDPPNPVLSVAQEVNTFLPASTKAGKPRKRMRWSKDVNTFIMRTYYTITKLETDMTTYRKQLHELFSQKYPTIIVTEQRVSDQRRTIVKNKLLNVDELNRLKEEVRVLLQEHSINTITQSQNTIENNLQQSPPLDTQTQSYSHSHPMQIDTQTSHIFTQTSHISTQTESMTLMIENDIETLTVTNQNHLAQAHIQKIQDKFNSTLLLYSGMDPSSRPKLPKLRYSPNLFRLVNLFNEDILQQFESSDTQLTDIHTLIYCTAVVISEELNFKITEHTRNTAPRHTIKPPWQQRLEHDIEKLRADCGRLTQYINNNRSNKVVKRVEAIFKTHNTHTRHENSNKKPEEFLDTLKQKLALKVHRLRRYKKAQQRKNDNTIFATNEKMFYRNLQKPQTDTLVENHTDIPTKENLETFWSNIWEEQAHHNDKANWIQEETTKWRSIEEMEFIEITEQDIRNTTARLHNWKSPGIDKIHNFWYKKLTTLHKSIAKNLTDIVLGKQNIPEFIATGITYMLPKTKYTSQPSQYRPITCLPTIYKILTSAITNKINSHIDTHNIIAEEQKGCRRGHMGCKEQLIIDSTIHKHATTKNRNLHCTYIDYQKAFDSIPHSWLIQVLEIYKINPTIIDFLRNIMSNWKTTLQLNNGLSTLITRQIQIRKGIYQGDSLSPLWFCLALNPLSHLLHQCQAGYNLKLNTEETYISHLIYMDDIKLYAKTEKQMKKLLDTTTEFSNDINMQFGLDKCKTVHIIKGKVKPGNYVVNDTDTIAAMEPTDLYKYLGYQQLKGLDHTMIKNTLKTEYHRRVSAVCKSQLSGTHLIKALNTFAIPILTYSFGVIKWSKTDITNLERTTRTTLTKHNNLHPKSATERLTIKRQNGGRGLIDIQNLWQKQITRLRTFFHTKSNTSNIHKAIILNDLNYTPLNLSDPENPHSTSNSDPQNQKIIDWKSKVLHGRHPHDLEQPHVNTLASNKWLKVGNLFPETEGFIIAIQDQIINTKNYRKYIIKDPTITNDRCRRCYTQSETIQHITGACTTLTQTDYTHRHNQVANIIHQKLALKYSLIQDTNTPYYKYTPQTILENNTHKIYYDRAILTDRTIHYNRPDIILQDKIKKVTYLIDIAVPNTHNLQKTIAEKISKYAELKEEVIRIWRQDNVFVVPLVLSTTGVIPNHLLHSLKLIDLPESLFINLQKAAILNTCRIVRKFMQLDENTPT

SEQ ID NO: 21256 - protein, 1305 aa, Laothoe populi
METRSKKKLRGPLPGGDRRGTPGADAGCFSIRSVSGEELSRRTPTGLPEIVTADIDQLDGLTDSRTNSRIEPYSPSTTSYVPSTRSSPSIPSSPTSNNFIDPPTSALDVAREVKTFLPASTKAGKPRVRMSWSKEVNMFIMRTYYYITKLETDMTIYRKHLHERFSQQYPDIKVTEQRVSDQRRAIERNKLLSPDILDKLKQEVNRQLQAELDETEDVDITNTINQNQIDLQVLTQYSQSLTCPETRTQIYNATNQTAHTSTQTETITCTLENDVELLVEPNLITDTFIQEMQEKLTTSLTLYSGLDPAVRPKLPKLRYSPKLAKLIQVFNCKILNQYLSEETQLIDIHTLIYCSAVVISEELGYRITEHTTRKNRLRHNNKPSWQHRLEKDIEKLRADCGRLTQYINNNRSRKVVKRVEEIFQTKMTHTRHENRNNKPEEYLDTMKQKLALKVNRLRRYKKALQRKQDNILFVTNEKTFYRNLRKPRTETEENNESTPTKENLETFWANIWEEQIQHNDKATWIKEEEKRWTAIEEMEFTEITELDIKFITTKLSNWKSPGIDKIHNYWFKKLTSLYRAIATNFTRIILGKQNIPPFIATGITYMLPKNKNSSNPSQYRPITCLPTIYKILTAVISHKINKHIEHHNIIAEEQKGCRRGHRGCKEQLVIDSTIHKHATTKNRNLHCTYIDYKKAFDSIPHSWLIQTLKIYKINNYIIEFLENIMSQWKTTLYLNNYCNTVMTRQINIRRGIYQGDSLSPLWFCLAMNPLSHQLHLCQAGYHLKDATTETIISHLIYMDDIKLYAKTDKDMRKLIETTSNFSKDISMQFGLDKCKTIHIIRGKIRPGDYVTGYSDTITAMEPSDLYKYLGYEQLKGLNHTNIKQTLFTEYQKRINVICKTQLSGKFLIKALNTYAIPILTYSFGIIKWSKTDIEKIERTTRTTLTKHCHLHPKSAIERVNIKRQDGGRGLIDIHNLWQKQLFNLYTFFHEKSLTSNLHRAIVINDHNFTPLNLHDRTNLENPINNDLLKQKLEDWKKKTIHGRHPHDLEQNHVDKIASNKWLSVGNLFPETEGFIIAIQDQVINTKNYRKYIIKDTTISNDKCRRCHTQPETIQHITGACTSLTQTDYTHRHNQITNIIHQTLATKYTLIPNTNTPYYKYNPETVLENQSYKLYYDRAILTDRTIHYNRPDITLQDKTNKITYLIDIAVPNTHNVQKTIIEKISKYADLKEEVARIWKQNKVYVVPIVLSTTGIIPKHLHHSLGLLNLNKSIYIKLQKAAILNTCRIVRKFMQIDENEIAQQHYT

SEQ ID NO: 21257 - protein, 1317 aa, Noctua pronuba
METRSKRKRIGPLPGGDRRGTPGADAGCLSMRTVGGEELSRRAPTDKNTTAEIIDDGDRLTDRTDTPVEPYSPSTVSYTPSRRSSPSIPSSPSVLSPPIISLNTVTPTPTLNAARGVSTFLPASTKAGKARVRMKWSKEVNLFIMRTYLHITKLETDMTTYRQQLHALFTRQYPEITVSEQRVSDQRRIIVRNKLLSQEVIDQLKEEVRTQLLQEETVNYIDANNITQNLSEISHQEQPQSLSQSQLIYSQSQPYNQSQAYTQISHTSTQTESITLMLENDIETIVVPDQHLTTDTYIQEINDKFRTTLTQYSGMDPAARPRLPKLKYTPNLFRLVNLFNESILTQFISDDTQLIDIHLLIYCTAVVISEELNFKITNHTGTPRTRQNLSPAWQQRLENDIEKLRADIGRLTQYINGCRSNKIVKRVEAIFRNNLTHTRHEKDNRKPEEFLDTLKQKLALKVHRLRRYKKAQQRKKDNATFATNEKMFYRNLHKPQTDTIDENNTNTPNLPTKEQLEEYWASIWEEPVQHNDKAAWIAEEEVKWRALDEMEFVEVAETDITHITARLHNWKSPGIDKIHNFWYKKLTSLHKSLAKNLTDIILGQQNTPEFIATGITYMLPKTKNSPQPSQYRPITCLPTIYKILTSAITKKISSHIEHHNIIAEEQKGCRQGHMGCKEQLIIDSTIHKHATTKNRNLHCTYIDYKKAFDSVPHSWLIQILEIYRINPKIIDFIRHIMLQWKTTLQITYNHNAVTTRQISIKKGIYQGDSLSPLWFCLALNPLSHLLQRCGAGYCLKHTTDETTISHLIYMDDIKLYAKTENDMKKLVDVTAEFSKDINMQFGLEKCKTLHIVRGKVRPGDYVLNDTDTISAMEQTDLYKYLGYAQLKGLDHTRIKNTLTNEYKRRVNAVCKTQLSGKHLIKALNTFAIPVLTYSFGVIKWSKTDTEQLERTTRTTLTKHNNLHPKSAIERLTIKRQHGGRGLIDIQHLWRKQVSRLKSFFHSKSRSSSIHKAIVINDLNYTPLNLSHQTETLNTTNDDPQQHKMEDWKRKVLHGRHPHDLEQSHINKLASNKWLKIGNLFPETEGFIIAIQDQIINTKNYRKYIIKDPTVTNDKCRKCHSQPETIQHITGACTTLTQTDYTHRHNQVANVIHQKLALKHTLIQNTSTPYYNYKPEVTLENTTHKIYYDRAILTDKTIHYNRPDIILQDKINKVTYLIDIAVPNTHNIQKTITEKISKYAELKDEVTRIWRQEKVYVVPIVLSTTGVIPNHLLHSLKLLDLKESIYIILQKAAILNTCRIVRKFMQIEENEIGPHYNT

SEQ ID NO: 21258 - protein, 1314 aa, Noctua pronuba
METRSKRKRIGPLPGGDRRGTPGADAGCLSMRTVGGEELSRRAPTDKNTTAEIIDDGDRLTDRTDTPVEPYSPSTVSYTPSRRSSPSIPSSPSVSSPPIISLNTFTPTPTLNAARGVSTFLPASTKAGKARVRMKWSKEVNLFIMRTYLHITKLETDMTTYRQQLHALFTRQYPEITVSEQRVSDQRRIIVRNKLLSQEVIDQLKEEVRSQLLQEETVNYIDANNITQNLSEISHQEQPQSLSQSQIIYTQSQPYNQSRAYTQISHTSTQTESITLTLENDIETIVVLDQHLTTDTYIQEINDKFRTTITQYSGMDPAARPRLPKLKYTPNLFRLVNLFNESILTHFISDDTQLIDIHLLIYCTAVVISEELKFKITDHTRTRQNVAPAWQQRLENDIEKLRADIGRLTQYINGCRSNKLVKRVEVIFRNNATHTRHEQNNRKPEEFLDTLKQKLALKVHRLKRYKKAQQRKNDNAIFTTNEKIFYRNLHIPKNDRNSGNNTNTPNLPSKEQLETYWASIWEEQKQHNDKASWIADEEAKWRDIDGMEFVEVTESDIIHITTRLHNWKAPGIDKIHNFWYKKLTTLHKSLAKNLTDIVLGQQNIPEFITTGITYMLPKTKYTSEPSQYRPITCLPTIYKILTSAVTKKINSHIVHHNIIAEEQKGCRQGHMGCKEQLIIDSTIHKHATSKNRNLHCTYIDYKKAFDSVPHSWLIQILEICRINPKIIHFLRHVMLQWKTTLQINSNNNNVTTRQISIKKGIYQGDSLSPLWFCLALNPLSHLLQSCGAGYCLKHCTDETTISHLIYMDDIKLYAKSEKEMKKLVDITAEFSQDINMQFGLEKCKTLHIVRGKVRPGDYELNESDTIAALEPTDLYKYLGYTQLKGLDHVKIKDTLTTEYKKRVNAVCKTQLSGKHLIKALNTFAIPVLTYSFGVIKWTKTDTEQLQRTTRTTLTKHNNLHPKSAIERLTIKREHGGRGLIDIQHLWRKQVSRLKLFFHTKSRTSNIHKAIVTNDLNYTPLNLSDQIETQNTTNDDPQTQKIEDWKKKVLHGRHPHDLEQSHINKLASNKWLKIGNLFPETEGFIIAIQDQIINTKNYRKYIIKDPTVTNDKCRKCHVHPETIQHITGACTTLTQTDYTHRHNQVANVIHQKLALKHTLTQNSNTPYYNYKPETTLENTTHKLYYDRAILTDRTIHYNRPDIILQDKINKVTYLIDIAVPNTHNIQKTITEKISKYAELKEEVTRIWRQDKVYVVPIVLSTTGVIPNHLIHSLKLLDLKETLYITLQKAAILNTCRIVRKFMQIEENEIGPHHNT

SEQ ID NO: 21259 - protein, 1326 aa, Thyatira batis
METRSKRIRIGPLPGGDRRGTPGADAGCFSMRTVSGEELNRRTPTDKDTTAENIDDGDRLTDRTNTPAEPYSPSTVSYTPSRTSSPSIPSSPPNRILNTVSPTPTLNVAREVNTFLPVSTKAGKPRVRMSWSKDVNIFIMRTYFRITRLETDLTTYRQQLHELFTQQYPGITVSEQRISDQRRIIVRNKLLSPEIIKQLKEETRLHLQEEQNNTDNIATSLNANETNTQHSQIELTTNTHCQYNYSLTNTQTSHTSTQTESITVMLENDIETIDIPDQNIISNEILQEINNKFRTALTQYSGMDPAARPKLPKLKYSPKLFRYVNLFNENILNQFTSDDTKLIDIHTLIYCTAVVISEELNFKITDHLINSRPKNKTQPPWQQRLEKDIEKLRADCGRLTQYINNNRSSNVVRRVEALFQSSLTHTRHENNNRRPEEFLDTLKQKLALKVHRLRRYNKAQQRKNDNALFAKNEKMFYRTLHKPHTDNVNTNNTNTNNTDTNNTNTNNTDTNNTTDIPTKEQLETFWSSIWEEQVQHNDKASWIIDEETKWKAIDEMEFVEITESDISNITARLHNWKSPGLDKIHNFWYKKLTTLHKALAKNLTEIILEKQNIPEFIATGITYMLPKTKNPLQPSQYRPITCLPTIYKILTSAITAKINTHIEHHKIMAEEQKGCRRGHMGCKEQLIIDSTIHKHATTKNRNLHCTYIDYKKAFDSVPHSWLLQILQIYKINPKIIAFLRNIMSQWKTSLQINTNHNTILTRQISIKKGIYQGDSLSPMWFCLALNPLSHLLQRCQAGYNFKHTINQTKVSHLIYMDDIKLYAQTEKDMKKLVVATSEFSKDINMQFGLDKCKTLHIIRGKVKPGNYNINNTDTITAMEPADLYKYLGYSQLKGLDHIRIKNTLTTEYKRRLNAICKSQLSGKHLIKALNTYAIPILTYSFGVIKWTKTDTEQLERTTRTTLTKHNNLHPKSAIERLTIKRQNGGRGLIDIQQLWRKQVSRLKTFFHTKSLTSNIHKAIVLNDLNYTPLNLIEQVDTQQTNNEDPQKQKMEDWKKKVLHGRHPHDLQQSHINTIASNKWLKIGNLFPETEGFMIAIQDQIINTKNYRKYIIKDPSVNNDKCRKCHTQPETIQHITGACTTLTQTDYTHRHNQIANIIHQKLALKYTLIQNTNTPYYNYTPQTILENTTHKLYYDRAILTDRTIHYNRPDITLRDKINKVTYLIDIAVPNTHNIQKTITEKLTKYLELKDEVTRIWRQEKVYIVPIVLSTTGVIPNHLLHSLKLIDLHESLYITLQKAAILNTCRIVRKFMQLEEGEIGPHSQNTHT

SEQ ID NO: 21260 - protein, 1317 aa, Xestia xanthographa
METRSKSKRIGPLPGGDRRGAPGADARCHSMRSVSGEELNRRAPTDKDTTAEIIDDGDRLTDRTDTPVEPYSPSTVSYTPSRRSSPSIPSSPTLSSPPILSLNTFSPTPTLNAARGVSTFFPASTKGGKTRVRMKWSKEVNLFIMRTYLYITKLETDMTTYRQQLHALFTRQYPDITVSEQRISDQRRTIVRNKLLSHEVIDQLKEEVQTQLLQEETLNSTDTNNTTQNVNEIGHQEQPQLFSQSQLISTQSQPYNQSQPSTQMSHASTQTESITLTLENDIETIVVPDQLLTTDTYIQEIHDKFRTTITQYSGMDPAARPRLPKLKYTPNLFRLVNLFNESILTQFISDDTQLIDIHLLIYCTAVVISEELNFKITEHTGTPRARQNLTPAWQQRLEKDIEKLRADIGRLTQYINGCRSNKLVKRVEAIFKNNLTHTRHEKNNRKPEEFLDTLKQKLALKVHRLRRYKKAQQRKKDNATFATNEKMFYRNLHNPQTDTIDENNTNTPNLPTKEQLEEYWASIWEDPVQHNDKAPWIAEEEVKWRAVDEMEFVEVAETDITHITAKLHNWKSPGIDKIHNFWYKKLTSLHKSLAKNLTDIILRQQNTPEFIATGITYMLPKTKNSPEPSQYRPITCLPTIYKILTSAITRKISSHIEQHNIIAEEQKGCRQGYMGCKEQLIIDSTIHKHATSKNRNLHCTYIDYKKAFDSVPHSWLIQILEIYRINPKIIDFIRHIMLQWKTTLQINYNHNAVTTRQISIKKGIYQGDSLSPLWFCLALNPLSHLLQGCGAGYCLKHTTDETTISHLIYMDDIKLYAKTENDMKKLVDVTADFSKDINMQFGLEKCKTLHIVRGKVRPGDYVVNDTDTISAMEQTDLYKYLGYAQLKGLDHTRIKNSLTSEYKRRVNAVCRTQLSGKHLIKALNTFAIPVLTYSFGVIKWSKTDTEQLERTTRTTLTKHNNLHPKSAVERLTIKRQHGGRGLIDIQHLWRKQISRLKSFFHSKSRTSNIHKAIVVNDLNYTPLNLSHQTETLNTNNDDPQQHKMEDWKKKVLHGRHPHDLQQTHINKLASNKWLKIGNIFPETEGFIIAIQDQIINTKNYRKYIIKDPTVTNDKCRKCHSQPETIQHITGACTTLTQTDYTHRHNQVANVIHQKLALKHTLIQNTSTPYYNYKPEATLENTTHKLYYDRAILTDKTIHYNRPDIILQDKINKVTYLIDIAVPNTHNIQKTITDKISKYAELKDEVTRIWRQEKVYVVPIVLSTTGVIPNHLLHSLKLLDLKESIYITLQKAAILNTCRIVRKFMQIEENEIVPHHNI

SEQ ID NO: 21261 - protein, 1285 aa, Heliconius numata
METRLKRKLRGPLPEGDRRGTPGADAGCFSMRTVSGLELNRRAPTDKYTTAEHTTLTNSPIEPYSPSSESYTPSIPSSPSSTHTVEHIPTLSVAREANAFLPASTKAGKPRVRMRWSSEVNIFIMRTYYQITKLETDFTIYRQRLHEIFSQKFPYINVSQQRVSDQMRTIIRNKLLPQELLNQIKTEVKSQLELDEIEMENTDSNQTQNLLTLPNTPTTQYEVRQQTQNTCLTQATQTYTQTETSTCLLENEIETLIVPTDVTEKYVQNLKEKLTTALNLFSGLDPTTRLNLPKLKYSQKLTELVKIFNSIILSNYNSEDTQLIDIHTLIYCTAVVIGEELGYKIIQKIDTEQRKKYKSKPPWQIRLEKSIQKLRADIGRLTQYISNNRSEKVVKRVMKIFRNTTLHTKHENNNKKVEEFLDTLKQKLALKSHRLKRYNKAQKRKDDNILFTTREKSFYRQLLKPDHICQDSNNESIPTKAQLVTYWSNIWEQESKHNENAEWILEEINKYKTIDEMNFTEITEAEIFKITTKLHNWKSPGVDKVHNFWYKKLTIFHKAIAKNLTEIIFKKQNIPNFMATGVTYMIPKGKFSPDPAQYRPITCLSTIYKILTSVLTSKITSHIEKYNIVAEEQKGCRRGHMGCKEQLIIDSTIHKHATAKNRNLHCTYIDYKKAFDSIPHSWLVKILEIYKINPTVIEFLNSIMSQWKTTLQLNHNNHSVKTRQIFIKKGIYQGDSLSPLWFCLALNPLSSMLKNSQVGYNFNSRIQNSVISHLIYMDDLKLYAKTNKDMKKLIDITAEFSNDIQMQFGLDKCKTLHITKGKIQPGDYSINENNIITALESQDIYKYLGYNQLKGLDHTNTKQILTAEYKKRIHAICKTQLSGKHLIKAINTYAIPILTYSFGVVKWSKTDIEHLERLIRTILTKHNYLHPKSAIERLTIKRPCGGRGLININTLWQNQLNTLRIFFINKSNNSIIHKTIKENDHNYTPLNLEEIVNAEISPKTDPQKEQIDNWKRKVLHGRHPHDLEQAHIDSIGSNMWLKVDSLFPETEGFIIAIQDQIINTKNYRKYIIKDTKITNDKCRRCHSQPETIQHITGACSNLTHSDYTHRHNQICNIIHQQLAHKYKLITNIDTPYYKYAPETILENSTHKLYYDRAVLTDRTIHFNRPDIILQNKADKITYLIDIAVPNTHNLQKTITEKINKYEELKDEITRIWKQKAVYIVPLVLSTTGVIPKHLHHSIKILNLKNTIYITLQRAAILNTCRLVRKFLQIDEDQNTNIPQLQ

SEQ ID NO: 21262 - protein, 1286 aa, Euphyes dion
METRSKSKRLGPLPGGNRRGTPGADAGCFSMRTVSGEDSSRRAPSGYPENATADQTQYNNRANSPISVNEPYSPSTALYIPSPMSSTDERIRGTPIPTLSVAQEANAFLPESTKAGKPRVRMSWSKEINMFIMRTYYYITKLETDMTVYRKQLHELFLRQYPDIKVTEQRIADQRRTIIRNKLLSQNIIDQIKQEVRERLQENLNQTNQLHSVSQAHTYPISQAPVRPFTQTSDTSTQTERETLVLENDIEILVDSSPPTDIYIEEIRNKLKLALISFSGMDPNIRPKLPKLIYSSKLTRMTELFNKHILPQFLSDDAKLTDVHTLIYCTAVVISEELNYNINEHISPIKTKCESKPPWQIRLERDIEKLRADCGRLTQYIKNNRSKKVVKRVEQIFKSRITHTRHENNNKTPEEFLDTLKQKLAIKVHRLRRYNKAQKRKTDNILFATNEKQFYRKMQSRQTNAISTGNKDNTDIPTKTQLELFWSNIWEEEAQYNEKADWVMEEEKRWNTIKEMELIEITEIDIANITAKLHNWKSPGLDKIHNYWFKKLTLLHKYIAKNLTDIVLGKQNIPAFIATGITYMIPKTEYSPQPSQYRPITCLPTIYKILTSAIAIKINDHIQHNEILAEEQKGCRQGHMGCKEQLIIDSTVHKHATAKNRNLHCTYIDYKKAFDCIPHSWLLKILQIYKINPTLIKFMRSIMTHWKTSLQVNYSNKIVTTRQIFIKRGIYQGDSLSPLWFCLAMNPLSHLLQKGQIGYSFKNTREKTTISHLIYMDDIKLYARTHNEMKKLIKTTVEFSNDIKMEFGFDKCKTLHIVRGKVQPGDYAIDHSYSITALESTDMYKYLGYKQLKGLDHTILKQSLTTEYKRRINVICNTQLSGQNTIKALNTYAIPVLTYSFGVIKWSKTDIEQIERTTRTTLTKHNYLHPKSALERLTIKRHKGGRGLIDIHHLWQKQIYHLRTFFHTKSRTSQIHKAISHNDHNFTPLNLSDQSNIEDPRSIDPQEQKIENWKKKALHGRHPYDLEQPHIDAIGSHKWLKFGNLFPETEGFIIAIQDQIINTKNYKKFIIKDPSITNDKCRKCHIQSETIQHITGACTTLTQTDYTHRHNQITNIIHQQLAHKHNLIQDRNTPYYKYTPPKVLENSLYKLYYDRAILTDKTIHYNRPDITLTDKTNKTTYLIDIAVPNTHNILKTITEKLSKYAELKEEVSRIWKQDKVYIVPIVLSTTGIIPKHLHHSLKQIGLKETLYVSLQKAAILNTCRIVRKFLQIEENSLTSHNTTNNN

SEQ ID NO: 21263 - protein, 1273 aa, Arctia plantaginis
MQNKTNKYNLRPLPGGRRDSIRNNNINNQTDRQTDNDNISLNSLTSLSVTEPYSPSTSSYRPTPVSFVDEDSHETPNPTLAVTQEVNAFLPASTKSGKPRVRMRWSKEVNLFIMRTYYQITKLETDMTTYRKQLHELFTRHYPDINVTEQRIADQRRTIVRNKLLTEETLHILKEEIRMQLQQNEHIYEYIENNSNPQLHNTQSVTTALPTQSQPHTITQSSHISTQPETITLTLENDIEIMQNVNPSSDNIQKIQEKFRTALALYSRMDPITRPKLPKLKYSRKLSELTHVFNHNILHQFLSEDTQLTDIHTLIYCTALVISEELNYKIIDHPRNILRKNSKPPWQIRLEKDIEQLRADCGRLTQYINNNRSNKIVKRVEQIFRRQCTHTRHENNNRKPEEYLDTLKQKLALKVHRLKRYKKAQLRKNDNMLFTLNEKSFYRNLSKPQTATTRPENIDIPTQTQLETFWSGIWEEPVQHNDKADWITEEENKWNSIEEMEFDCITEDDIAHVTGKLHNWKSPGIDKIHNYWYKKITLFHKPIAKNLTYIILGKQNIPEFIGMGITYMLPKTAHSPQPSQYRPITCLPTIYKILTSAIAHKINMHIEHNHIIAEEQKGCRRGHMGCKEQLIIDSTIHKHATTKNRNLHCTYIDYKKAFDSIPHSWLLKILHIYKINPKITDFMRDIMSHWKTTLHLNMNDRTVTTRQISIKKGIYQGDSLSPLWFCLALNPLSHLLQRCQAGYRLRNSTEETIISHLIYMDDIKLYAKSDKEMTKLLQNTTKFSKDINMEFGLDKCKTLHIIRGKIRPGDYAVDESSTIVAMESTDLYKYLGYKQLKGLDHTSIKQILATEYKSRTNTLCKTQLSAKNLIKALNTYAIPILTYSFGIIKWTKTDIEQIERTTRTTLTKHNNLHPKSAIERLTIKRENGGRGLIDIYHLWQKQVYNLKTFFRTKSHTSNIHKAITLNDYNFTPLNLNDHTGIHNPNNIDPQADKIENWKKKVLHGRHPHDLEQPHIDTIASNSWLKIGNLFPETEGFIIAIQDQIVNTKNYRKYIIKDATVTDDKCRKCHIQSETIQHITGACITLTQTDYTHRHNQITNIIHQKLALKHYLIQNTNTPYYNYTPQSVLESSSHKLYYDRAILTDRTIHYNRPDITLQDKINKTTYLIDIAVPNTHNLQKTITEKISKYTELKEEIIRIWRQEKVYIVPIVLSTTGVIPKHLHHSLKLINLNESVYFNLQKAAILNTCRTVRKFMDIEENGTAQHTQQPPSTST

SEQ ID NO: 21264 - protein, 1309 aa, Noctua pronuba
METRSKKKRIGPLPGGDRRGTPGADAGCLSMRTVSGEELNRRAPTDKDTTAEIIDDGDRLTDRTDTPVEPYSPSTVSYTPSRRSSPSIPSSPTISSPPIISLSTVSPTPTLNAARGVSTFLPASTKAGKARIRMKWSKEVNTFIMRTYLYITKLETDFTTYRQQLHQLFTRRYPEITVSEQRISDQRRTIVRNKLLSVEEMDRMKVEVRTQLHLESVNDEDTNNIAVTENTIENTQQEQAQAYAQLEPYTQSQPYYQSQTYSQSTHTSTQTENVTIMLENDIEVLANIDQNPPTDTRIQEIHDKFKTALTQYSGMDPAARPKLPKLRYTPKLVQLVNCFNQNILTQYISEETQLIDVHTLVYCTALVISEDLNFKITEYIGNTRQPNANKPAWQLRLEKDIEKLRADCGRLTQYINNNRSNKVVKRVEQIFKNMAVHTRHENHNRKPEEFLDTLKQKLALKVHRLRRYKKAQERKNDNALFATNEKNFYRKLQKPQTDTDTPTTENNIELPTTEQLESFWAGIWEEQVHHKETSEWIQDEKTKWSSLEEMEFIELSESDISSVTARLHNWKSPGIDKIHNYWYKKLESLHKILAKNLTEIILGKQNLPEFIATGITYMLPKTHYSPQPSQYRPITCLPTIYKILTSAITTKINKHVEHHNIIAEEQKGCRRGHMGCKEQLVIDSIIHKHAATKNRNLHCTYIDYKKAFDSIPHSWLIQILNMYKINPKIIEFLQNIMTRWKTTLQLNYRDNAVTTRQIAIKKGIYQGDSLSPLWFCLALNPLSHLLQRCQAGYCLKQTTEITTISHLIYMDDIKLYAKTEKEMKKLIDITTEFSKDINMQFGLDKCKTVHIIRGKIKPGDYSINTNDIIVAMEPTDLYKYLGYRQLKGLDHTTIKQTLNTEYKRRVVAVCKTQLSGKHLIKALNTYAIPILTYSFGVIKWSKTDIQQIERTTRTTLTKHNNLHPKSAIERLTIKRQNGGRGLIDIHHLWQKQITRLKTFFNSKSHTSNIHKAIVMNDNSYTPLNLNEQTDPQNTNNEDPQKLKLEDWKKKVLHGRHPHDLEQPHIDTLASNKWLKIGSLFPETEGFIIAIQDQIINTKNYRKFIIKDPTMTNDKCRKCHSQPETIQHITGACTTLTQTDYTHRHNQLANVIHQNLALKHKLIQDSNTPYYKYVPQPVVENTTHKLFYDRGVLTDRTIHYNRPDIILQDKVNKVTYLIDIAVPNTHNLQKTIGDKISKYAELKEEVTRIWRQEKVYVVPIVVSTTGVIPNHLHHSLKLIDLKDSIYITLQKAAILNTCRIVRKFMQIDEN

SEQ ID NO: 21265 - protein, 1040 aa, Ochropleura plecta
MILRPWLSKIIIQPQIHTSKKYMTNSEQPYHNTLVWIQQFDQSYLNFDIAPRLVNLFNENILNQFISDETQLIDIHTLIYCTAVVISEELNFKITQNTGNPRPKQNIKPAWQQRLEKDIEQLRADIGRLTQYINNNRSSKVVRRVEAIFRTHLVHTRHENNNRKPEEFLDTIKQKLALKVHRLRRYKKAQQRKNDNAIFATNEKIFYRNLNKPNTDTHYDTNTDTPTQPTKEQLETYWASIWEQQARHNDEAAWITEEETKWKAIDEMEFVEVTEADITHITGRLHNWKSPGIDKVHNFWFKKLTSLYKPIARNLTQIILGQQNAPEFIATGITYMLPKTKNSPQPSQYRPITCLPTIYKILTSAISTKINRHIEQHNIMAEEQKGCRRGHMGCKEQLIIDSTIHKHATTKNRNLHCTYIDYKKAFDSVPHSWLIQILKIYRVNSKIIDFLSNIMSQWKTTLQINCNQNSITTRQILIKNGIYQGDSLSPLWFCLALNPLSHLLQRCQAGYRLKHTTEQTTISHLIYMDDIKLYAQTEKDMKKLVEVTADFSQDINMQFGLDKCKTLHIIRGKIRPGNYVVNNTDTITAMEPSDLYKYLGYTQLKGLDHVRIKETLTAEYKRRLNVVCKTQLSGKNLIKALNTFAIPILTYSFGVIKWTKTDTEQLERTTRTTLTKHNNLHPKSAIERLTIKRQNGGRGLIDIQHLWRKQVCRLKTFFHTKSLTSNIHKAIVQNDHNYTPLNLNEQLDTSHNINEDPQTQKIDDWKKKVLHGRHPYDLEQTHVNKDASNKWLKIGNLFPETEGFIIAIQDQIINTKNYRKFIIKDPSVTNDKCRKCHTQPETIQHITGACTTLTQTDYTHRHNQVANVIHQRLAVQYTLIQDTNTPYYNYTPQATLENDTHKLYYDRAILTDRTIHYNRPDIILQDKINKITYLIDIAVPNTHNIQKTITEKISKYAELKEEVTRIWRQEKVYVVPIVLSTTGVIPNHLLHSLKLLSLKETLYITLQKAAILNTCRIVRKFMQIEENEIGPHHNTPHTST

SEQ ID NO: 21266 - protein, 1172 aa, Biston betularia
MRTYFYITKLETDMTTYRQQLHELFTQQYPEVKVSQQRISDQKRAIVRNKLLSQEIIQQLKEETRIHLQEEEINSNASPLTQNITENTQQIQSQPLVQLVPNTQTQAYNYSQAHTQKSHMFTQTESIMLMLENDIETLVAVNQNLTTDNYVQEIHEKFITTLAQYSGMDPAARPKLPKLRYSTNLFRLVNLFNENILQQFISDDSQLIDIHTLIYCTAVVICEELNFKITEHTRNTRPRHNNKPPWQQRLETDIEKLRADCGRLTQYINNNRSNKVVRRVEAIFQSSDTHTTHENRNKKPEEFLDTLKQKLALKVHRLRRYKKAQQRKNDNAIFATNEKMFYRNLYNTHTNTNNTDTNAADTPTKEHLETFWSGIWEEQVQHNDKATWITEEETKWRAINEMEFVEITESDITHITSRLHNWKSPGIDKIQNFWYKKLTSLHKSIAKNLTDIVLCKQNIPEFMATGITYMLPKTKNSPQPSQYRPITCLPTIYKILTSAITTKISYHIEHNNIMAEEQKGCRRGHMGCKEQLIIDSAIHKHATAKNRNLHCTYIDYKKAFDSVPHSWLLQILEIYRINPKIIDFLRNIMSQWKTTLQINSTNSTVTTRQIFIKKGIYQGDSLSPLWFCLALNPLSHLLQRCLAGYCFKHTTEQTTISHLIYMDDIKLYAQTQKDMKKLVEATAEFSKDINMQFGLDKCKTLHIIRGKIQPGNYIVNNTDTITAMEPADLYKYLGYAQLKGLDHVRIKGTLTTEYKRRLNAICKSQLSGKHLIKALNTYAIPILTYSFGVIKWTKTDTEQLERTTRTTLTKHNNLHPKSAIERLTIKRQNGGRGLIDIQHLWRKQVSRLKTFFHTKSITSNIHKAIVLNDLNYTPLNLNEQTNIQHTNNDDPQIQKIEEWKKKVLHGRHPHDLEQSHVNTLASNRWLKIGNLFPETEGFIIAIQDQIINTKNYRKYIIKDPSVTNDKCRKCHVQPETIQHITGACTTLTQTDYTHRHNQVANVIHQELALKYTLINDTNTPYYKYTPQTILENTTHKLYYDRAILTDRTIHYNRPDITLQDKINKVTYLIDIAVPNTHNIQKTITEKISKYAELKDEVTRIWRQEKVYVVPIVLSTTGVIPNHLLHSLKLLNLKETLYITLQKAAILNTCRIVRKFMQIEENDTGFHHNAPLT

SEQ ID NO: 21267 - protein, 1317 aa, Noctua fimbriata
METRSKKKRIGPLPGGDRRGAPGADAGCLSMRTVSGEELNRRAPTDKDTTAEIIDDGDRLTDRTDTPVEPYSPSTVSYTPSRRSSPSIPSSPTPLSPPIITLNTISPTPTLNAARGVSTFLPASTKAGKARVRMKWSKEVNLFIMRTYLHITKLETDMTTYRQQLHALFTRQYPDITVSEQRISDQRRTIVRNKLLSQEVIDQLKEEVRTQLLHEETVNYTDTNNITQNLSEISHQEQPQSLSQSQIIYTQSQPYNQSEAYTQISHTSTQTESITLTLENDIETIVVPDQHLTTDIYIQEINDKFRTTITQYSGMDPAARPRLPKLKYTPNLFRLVNLFNESILTHFISDDTQLIDIHLLIYCTAVVISEELNFKITDHTRATRTRQNVAPAWQQRLEKGIEKLRADIGRLTQYINGCRSNKLVKRVEVIFRNNATHTRHELNNRKPEEFLDTLKQKLALKVHRLKRYKKAQQRKNDNAIFTTNEKIFYRNLHNPKNDRNYENNTNTPNLPSKEQLETYWASIWEEQKQHNDKTSWIVDEEEKWRDIDVMEFVEVTESDIIHITTRLHNWKAPGIDKIHNFWYKKLTTLHKSIAKNLTDIILGQQNIPEFITTGITYMLPKTKYTSEPSQYRPITCLPTIYKILTSAVTKKINSHIIHHNIIAEEQKGCRQGHMGCKEQLIIDSTIHKHATSKNRNLHCTYIDYKKAFDSVPHSWLIQILEIYRVNPKIIDFMRHVMLQWKTTLQINSNNNNVTTRQISIKKGIYQGDSLSPLWFCLALNPLSHLLQRCGAGYCLKHSTDETTISHLIYMDDIKLYAKSEKDMKKLVDITAEFSKDINMQFGLEKCKTLHIVRGKVRPGDYAVNESDSITALEPSDLYKYLGYTQLKGLDHVKIKNTLTAEYKKRVNAVCKTQLSGKHLIKALNTFAIPVLTYSFGVIKWTKTDTEQLQRTTRTTLTKHNNLHPKSAIERLTIKREHGGRGLIDIQHLWRKQVSRLKLFFHTKSRTSNIHKAIVTNDLNYTPLNLSDQIETQNTTNDDQQIQKIEDWKRKVLHGRHPHDLEQSHINKLASNKWLKIGNLFPETEGFIIAIQDQIINTKNYRKYIIKDPTLTNDKCRKCHVHPETIQHITGACTTLTQTDYTHRHNQVANVIHQKLALKHTLIQNTNTPYYNYKPETTLENTTHKLYYDRAILTDRTIHYNRPDIILQDKLNKVTYLIDIAVPNTHNIQKTITEKISKYAELKEEVTRIWRQEKVYVVPIVLSTTGVIPNHLIHSLKLLDLKETLYITLQKAAILNTCRIVRKFMQIEENEIGPHHNT

SEQ ID NO: 21268 - protein, 1317 aa, Noctua fimbriata
METRSKKKRIGPLPGGDRRGAPGADAGCLSMRTVSGEELNRRAPTDKDITAEIIDDGDRLTDRTDTPVEPYSPSTVSYTPSRRSSPSIPSSPTPLSPPIITLNTISPTPTLNAARGVSTFLPASTKAGKARVRMKWSKEVNLFIMRTYLHITKLETDMTTYRQQLHALFTRQYPDITVSEQRISDQRRTIVRNKLLSQEVIDQLKEEVRTQLLHEETVNYTDTNNITQNLSEISHQEQPQSLSQSQIIYTQSAPYNQSQAYTQISHTSTQTESITLTLENDIDTLVVPDQHLTTDIYIQEINDKFRTTITQYSGMDPAARPKLPKLKYTPNLFRLVNLFNESILTHFISDDTQLIDIHLLIYCTAVVISEELNFKITDHTRTTRTRQNVAPAWQQRLEKGIEKLRADIGRLTQYINGCRSNKLVKRVEVIFRNNATHTRHEQNNRKPEEFLDTLKQKLALKVHRLKRYKKAQQRKNDNAIFTTNEKIFYRNLHNPKNDRNYENDTNTPNLPSKEQLETYWASIWEEQKQHNDKASWIVDEEVKWRDIDVMEFVEVTESDIIHITTRLHNWKAPGIDKIHNFWYKKLTTLHKSMAKNLTDIILGQQNIPEFITTGITYMLPKTKYTSVPSQYRPITCLPTIYKILTSAVTKKINSHIIHHNIIAEEQKGCRQGHMGCKEQLIIDSTIHKHATSKNRNLHCTYIDYKKAFDSVPHSWLIQILEIYRVNPKIIDFMRHVMLQWKTTLQINSNNNNVTTRQISIKKGIYQGDSLSPLWFCLALNPLSHLLQRCGAGYCLKHSTDETTISHLIYMDDIKLYAKSEKDMKKLVDITAEFSKDINMQFGLEKCKTLHIVRGKVRPGDYAVNESDSITALEPTDLYKYLGYTQLKGLDHVKIKNTLTAEYKKRVNAVCKTQLSGKHLIKALNTFAIPVLTYSFGVIKWTKTDTEQLQRTTRTTLTKHNNLHPKSAIERLTIKREHGGRGLIDIQHLWRKQVSRLKLFFHTKSRTSNIHKAIVTNDLNYTPLNLSDQIETQNTTNDDQQIQKIEDWKRKVLHGRHPHDLEQSHINKLASNKWLKIGNLFPETEGFIIAIQDQIINTKNYRKFIIKDPTLTNDKCRKCHVHPETIQHITGACTTLTQTDYTHRHNQVANVIHQKLALKHTLIQNTNTPYYNYKPETTLENTTNKLYYDRAILTDRTIHYNRPDIILQDKLNKVTYLIDIAVPNTHNIQKTITEKISKYAELKEEVTRIWRQEKVYVVPIVLSTTGVIPNHLIHSLKLLDLKETLYITLQKAAILNTCRIVRKFMQIEENEIGPHHNT

SEQ ID NO: 21269 - protein, 1309 aa, Mesoligia furuncula
METRSKRKRIGPLPGGDRRGALGADAECLSMRTVSGEELNRRAPTDKDATAEVIDDGDRLTNRTDTPVEAHSPSTVSYSPSRTSSPSIPSSSIPSSPPITSFNTVSPTPALNVAREVSTFLPASTKAGKTRVRMRWSKEVNLFIMRIYLYITKLETDMTTYRQQLHECFSRQYPEISVSEQQISDQRRTIVRNKLLSQVELDQLKEEIRIQLQQESENCADTNTIILTQNTNINILQEQPQSLTQLHPNSQSLTCNQSQAFTQTAHTSTQTESLTLTLENDIETLVVADQNLVTDTYIQEIQDKFKTTIAQYSGMDPAVRPKLPKHKNTGNLFRLVNLFNENILVQFISDDTQLIDIHLLIYCTVVVISEELNFKITDHTVTTRTKPFVKPAWQQRLEKDIEKLRADCGRLTHYINGIRSNKVVKRVETIFKNCSNHTRHESNNRKPEEFLDTLKQKLALKVHRLRRYMKAQQRKNDNATFAMNEKAFYRNIQKTHSDTRIENNTDALSKEQLEAYWSSIWEEQVQHNDKASWIAEEEAKWRAIDEMEFAEVSESDITHITARLHNWKSPGVDKIHNFWYKKLTSLHKSIAKNLTDIILGQQNTPEFIATGITYMLPKTKCSSQPSQYRPITCLPTIYKILTSAITKKISSHIEQHNIIAEEQKGCRQGHMGCKEQLIIDSTIHKHATSKNRNLHCTYIDYKKAFDSVPHSWLIQILEIYRINPKIINFMRHIMLQWKTTLQINSNHSNVTTRQISIKKGIYQGDSLSPLWFCLALNPLSHLLQACRAGYCLKHTTEETTISHLIYMDDIKLYGKTEKDMKRLVEITAAFSKDINMQFGLDKCKTLHIIRSKVRPGDYAVNDTDTITAMEPSDLYKYLGYTQLKGLDHVRIKNTLTTEYKRRLNAVCKTQLSGKHLIKALNTFAIPVLTYSFGVIKWTKTDTEKLERTTRTALTKHNNLHPKSAIERLTIKRQNGGRGLIDIQHLCRKQVSRLKTFFHTKSRTSNIHKAIVINDLNYTPLNLNDQIETQNTTNDDPQKQKIEEWKKKVLHGRHPHDLEQSHINQLASNKWLKIGNLFPETEGFIIAIQDQIINTKNYRKFIIKDPTITNDKCRRCHIQSETIQHITGACTTLTQTDYTHRHNQVANIIHQKLALKHSLIQNSCTPYYKYAPQTILENDTHKMYYDRAILTDRTIHYNIPDITLQDKIRKITYLIDIAVPNTHNLQKTISEKISKYAELKEEVTRIWSQEKVYVIPIVLSTTGVIPNHLLRNLKLIDLEESVYINLQKAAILNTCRIVRKFMQLEEENTP

SEQ ID NO: 21270 - protein, 1315 aa, Xestia c-nigrum
METRSKRKRIGPLPGGDRRGAPGADAGCHSMRTVSGEELNRRAPTDKDTTAEITDDGDRLTDRTDTPVEPYSPSTVSYTPSRRSTPSIPSSPTLSSPPIISLNTGTPTPTLTAARGLSTFLPASTKAGKARVRMKWSKEVNLFIMRTYLHITKLETDMTTYRQQLHSLFTRQYPEITVSEQRISDQRRIIVRNKLLSQEVIDQLKEEVRTQLLQEETVTDTNNITQNISEISNQEQPQSLNQSQILYSLSPYNQSQAYTQNISHTSTQTESITLTLENDIETIVTPDQHLTTDTYIQEIIDKFRTTITQYSGMDPAARPRLPKLKYTPNLFRLVNLFNETILTQYISDDTQLIDVHLLIYCTAVVISEELNFKITNHTGNPRTRPNIVPAWQQRLEKDIEKLRADIGRLTQYISGCRSNKLVKKVEIIFRNNLTHTRHEQNNRKPEEFLDTLKQKLALKVHRLKRYKKAQQRKNDNAIFTTNEKVFYRKLHIPKNDRNYENNTNTPNLPSKEQLETYWAGIWEEQKQHNDKASWIADEETKWRDIDEMEFVEVTESDITHITARLHNWKSPGIDKIHNFWYKKLTALHKSLAKNLTDIVLGKQNIPEFITTGITYMLPKTKYTSEPSQYRPITCLPTIYKILTSAITKKINSHIIHHNIIAEEQKGCRQGHMGCKEQLIIDSTIHKHATSKNRNLHCTYIDYRKAFDSVPHSWLIQILEIYRINPKIIDFIRHVMLQWKTTLQINSSNNNVTTRQISIKKGIYQGDSLSPLWFCLALNPLSHLLQSCGAGYCLKHSTDETTISHLIYMDDIKLYAKSEKDMKKLVDITAEFSKDINMQFGLEKCKTLHIVRGKVRPGDYAVNESDSITALEPTELYKYLGYTQLKGLDHVKIKETLTTEYKKRVNAVCKTQLSGKNLIKALNTFAIPVLTYSFGVIKWTKTDTEQLQRTTRTTLTKHNNLHPKSAIERLTIKREHGGRGLIDIQHLWRKQISRLKSFFHTKSHNSNIHKAIVTNDLNYTPLNLSDQIEAQNTTNEDPQTQKIEDWKRKVLHGRHPHDLEQSHINKLASNKWLKIGNLFPETEGFIIAIQDQIINTKNYRKYIIKDPTVTNDKCRKCHLHPETIQHITGACTTLTQTDYTHRHNQVANVIHQKLAIKHTLIQNTNTPYYNYKPEATLENTTHKLYYDRAILTDRTIHYNRPDLILQDKIKKVTYLIDIAVPNTHNIQKTITEKISKYAELKEEVTRIWRQEKVYIVPIVLSTTGVIPNHLIHSLKLLDLKETLYITLQKAAILNTCRMVRKFMQIEENEIGPYHNT

SEQ ID NO: 21271 - protein, 1318 aa, Xestia c-nigrum
METRSKRKRIGPLPGGDRRGAPGADAGCHSMRTVSGEELNRRAPTDKATTAEIIDDGDRLTDRTDTPVEPYSPSTVSYTPSRRSSPSIPSSPTLSSSPTISLNTVTPTPVLNAARGVSTFLPASTKAGKARVRMKWSKEVNLFIMRTYLHITKLETDLTTYRQQLHTLFTRQYPEITVSEQRISDQRRIIVRNKLLSQEVIDQLKEEVRTQLLQEETVTDTNNITQNISEISNQEQPQSLNQSQILYSLSPYNQSQAYTQNISHTSTQTESITLTLENDIETIVTPDQHLTTDTYIQEIIDKFRTTITQYSGMDPAARPRLPKLKYTPNLFRLINLFNETILTQYISDDTQLIDIHLLIYCTAVVISEELNFKITNHTGNPRTRPNIVPAWQQRLEKDIEKLRADIGRLTQYISGCRSNKLVKKVEVIFRNNLTHTRHEKNNRKPEEFLDTLKQKLALKVHRLKRYKKAQQRKNDNAIFTTNEKVFYRNLHIPKNDRNYENNTNTHTKVGLPSKEQLETYWAGIWEEQKQHNDKASWIANEETKWRGIDEMEFVEVTESDITHITARLHNWKSPGIDKIHNFWYKKLTALHKSLAKNLTDIVLGKQNISEFITTGITYMLPKTKYTSEPSQYRPITCLPTIYKILTSAITKKINSHIIHHNIIAEEQKGCRQGHMGCKEQLIIDSTIHKHATSKNRNLHCTYIDYRKAFDSVPHSWLIQILEIYRINPKIIDFMRHVMLQWKTTLQINSSNNNVTTRQISIKKGIYQGDSLSPLWFCLALNPLSHLLQSCGAGYCLKHSTDETTISHLIYMDDIKLYAKSEKDMKKLADITAEFSKDINMQFGLEKCKTLHIVRGKVRPGDYAVNESDSITALEPTELYKYLGYTQLKGLDHVKIKETLTTEYKKRVNAVCKTQLSGKHLIKALNTFAIPVLTYSFGVIKWTKTDTEQLQRTTRTTLTKHNNLHPKSAIERLTIKREHGGRGLIDIQHLWRKQISRLKSFFHTKSHNSNIHKAIVTNDLNYTPLNLSDQIEAQNTTNEDPQTQKIEDWKRKVLHGRHPHDLEQSHINKLASNKWLKIGNLFPETEGFIIAIQDQIINTKNYRKYIIKDPTVTNDKCRKCHLHPETIQHITGACTTLTQTDYTHRHNQVANVIHQKLAIKHTLIQNTNTPYYNYKPEATLENTTHKLYYDRAILTDRTIHYNRPDLILQDKIKKVTYLIDIAVPNTHNIQKTITEKISKYAELKEEVTRIWRQEKVYIVPIVLSTTGVIPNHLIHSLKLLDLKETLYITLQKAAILNTCRIVRKFMQIEENEIGPYHNT

SEQ ID NO: 21272 - protein, 1316 aa, Xestia c-nigrum
METRSKRKRIGPLPGGDRRGAPGADAGCHSMRTVSGEELNRRAPTDKATTAEIIDDGDRLTDRTDTPVEPYSPSTVSYTPSRQSSPSIPSSPTLSSSPTISLNTVTPTPVLNAARGVSTFLPASTKAGKARVRMKWSKEVNLFIMRTYLLITKLETDMTTYRQQLHTLFTRQYPEITVSEQRISDQRRIIVRNKLLSQEVIDQLREEVRTQLLPVETVNYIDTNSITQNITEISNQEQPQSLSQSQIIVSPSPYNQSQVFTQNISHTSTQTELITLTLENDIEAIVVPDQNLTTDTYIQEINDKFRTTITQYSGMDPAARPRLPKLKYTPNLFRLVNLFNETILTQFISDDTQLIDIHLLIYCTAVVISEELNFKITDHTRAPRSRPNIVPAWQQRLEKDVEKLRADIGRLTQYISGCRSNKLVKRVDIIFRNNSTHTRHEQNNRKPEEFLDTLKQKLALKVHRLKRYKKAQQRKNHNAIFTTNEKVFYRNLHVPKNDRNYENNTNTPTLPSKEQLETYWAGIWEEQKQHNDKASWIANEEMKWRDIDEMEFVEVTESDIIHITARLHNWKSPGIDKIHNFWYKKLTALHKTLAKNLTDIILGQQNLPEFITIGITYMLPKTKYTSEPSQYRPITCLPTIYKILTSVVTKKINSHIIQHNIIAEEQKGCRQGHMGCKEQLIIDSTIHKHATTKNRNLHCTYIDYKKAFDSVPHSWLIQILEIYRINPKIVDFMRHVMLQWKTTLQINSSNNNVTTRQISIKKGIYQGDSLSPLWFCLALNPLSHLLQRCGAGYCLKHSTDDTTISHLIYMDDIKLYAKSEKEMKKLVDITAEFSKDINMQFGLEKCKTLHIVRGKVRPGDYAVNESDSITALEPTDLYKYLGYTQLKGLDHVKIKDTLTTEYKKRVNAVCKTQLSGKHLIKALNTFAIPVLTYSFGVIKWTKTDTEQLQRITRTTLTKHNNLHPKSAIERLTIKRENGGRGLIDIQHLWRKQISRLKSFFHIKSRNSNIHKAIVTNDLNYTPLNLSDQIETHNTTNDDPQTQKIEDWKKKVLHGRHPHDLEQLHINKLASNKWLKIGNLFPETEGFIIAIQDQIINTKNYRKYIIKDPTVTNDKCRKCHVHPETIQHITGACTTLTQTDYTHRHNQVANVIHQKLALKHSLIQNTSTPYYNYKPETTLENTTHKLYYDRAILTDRTIHYNRPDIILQDKINKVAYLIDIAVPNTHNIQKTITEKISKYAELKEEVTRIWRQEKVYVVPIVLSSTGVIPNHLLHSLKLLDLNETLYITMQKAAILNTCRIVRKFMQIEESEIGPHHT

SEQ ID NO: 21273 - protein, 1285 aa, Cecropterus dorantes
MRRSNRIKNKHSAQSGTVAEIVSNPSSPTTSTRSLFQSTNSTPLSFENRNNSISSSTTVSPMSDVVQIENVILPASDVARGANAFLPASTKAGKPRVRMKWSQDVNIFIMRTYYYITKLETDMTTYRKTLHELFSIQYPDVNVSEQRVSDQRRMIIKNRYLTQEILDKLKEEVSRQLQEAEHVNEINDGNDQVHIEADQNTLESHTHLQNTSSQSHNLSQFNTHTFIPTSNSSTQTEFITLLLENETNTIADFVPPNDNSFQDIYDKLQTAITQYSGMDPTARPKLPRIKYSKQLNDLVNLFNQHILHRLISKETQLNDIHTLIYCTALVISEELKYKIIYNTTHEKPKDYTKPSWQIRLEKDIEHLRVDIGRLTQYINNNRSDRLVKKVQHIFNRITRHTKHESNNIKPEEFLDTLKQKLALKTHRLKRYKKAQQRRIDNIQFATNEKLFYRNLCKTKNNFRINKDNHTDIPTKEEIETYWSNIWEESTRHNDNADWIREEQTKWQVIDEMEFEKITELDITNITARLHNWKAPGIDRIHNYWYKKLTILHQPIARALTEIILGKQHIPNFITIGITYMLPKTNNSTQPSHYRPITCLPTIYKILTSAISTKINTHIEHHNVLAEEQKGCRRGHMGCKEQLVIDSIIHKHATSKHRNLHCTYIDYKKAFDSIPHSWLIKILQIYRISPIIINFLRNIMPLWKTSLHLNHGNKSISTRQININKGIYQGDSLSPLWFCLALNPLSNLLHNCQIGYRFNNSLEETTISHLIYMDDIKLYAKTHKDMEKLVDKTAQFSKDINMQFGLDKCKTLHIIKGKIKPGDYRLNNNEVISAIEPTDVYKYLGYNQLKGLLHTHIKHTLTTEFKTRIETICKTHLSGKHLTKAINTYAIPILTYSFGIIKWTKTDIEQLERVTRTTLTKHNQLHPKSAVERLNIKRQDGGRGIIDIHYLWQKQINNLRHFFFTKSTTSNIHSTITHHDENLTPLNLSEYTDQHTLIYRNPQVQKIENWKNKVLHGRHPHDLEHTHVDKIASNKWLKIGNLFPETEGFIIAIQDQVINTKNYRKHIIKDPNIKNDKCRRCHTQPETVQHITGACTNLTQTDYTHRHNQVTNIIHQNLALKHNLIQNTNTPYYRYSPQTVIENTSHKLYYDRAILTDRTIHYNRPDIILQDKLNRITYLIDIAVPNTHNIQKTIVEKINKYVDLKEEVTRIWKQNKVYVVPIVLSTTGVIPYHLHQSLKLIGLKHSLYIPLQKAAILNTCRIVRKFMQIDEKEVGSQNLTQTIVPP

SEQ ID NO: 21274 - protein, 1304 aa, Lobocla liliana
METRSKRKRIVPMPGGNRRGTPGTDAGCFSMRTVSGEELNRRAPTDKDTTAEIVDDGDRITHRSSPVEPYSPSTVSYTPSRSSSLSTPSSPRIISLSTVSPTPTLDATREVSTFLPASTKAGKPRVRMRWSKDVNIFIMRTYFHITKLETDMTTYRQQLHVLFTQQYPEVNVTEQRVSDQRRTIVRNKLLSQTIIDQIKEDVRKELLEETNLDNSADDNTVILPQTTTQTILQQQTQPHTLLQTQSQAYTQTSHTSTQTESITLTLENDIDTLVVADQNHLTEQYIQEIHDKFNTTLTQYSGMDPAYRPKLPKLKYTPTLYHLIHLFNQSILNQYISEDTQLIDIHTLIYCTALVISQELNYKITDNTGHSKSRNITKPPWQQRLEKDIEILRADCGRLTQYINNNRSNKVVKRVEVIFKNLTVHTRHENDNRKPEQFLDTLKQKLALKVHRLRRYKKAQERKNHNSLFVTNEKNFYRNLQKPQTDTTTETNIELPTTEQLETFWSGIWEEQVQHNDKAKWITDEETRWSLIEEMDFAEITESDIASITARLHNWKSPGIDKIHNYWYKKLQSLHKVIAKNLTDIVLGKQNIPEFITTGITYMLPKAQYSSQPSQYRPITCLPTIYKILTSVITKKINTHIEHHSIIAEEQKGCRRGHMGCKEQLVIDSIVHKHAATKNRNLHCTYIDYKKAFDSIPHSWLIQILHIYKINTKIIHFLHNIMTRWKTTLQLNYRNNIIKTRQIAIKKGIYQGDSLSPLWFCLALNPLSHILRSSQAGYCLKHTTEETIISHLIYMDDIKLYAKTEKEMKKLVGITAEVSKDINMQFGLDKCKTLHIIRGKIKPGNYAINTTDIITAMEPSDLYKYLGYRQLKGLDHTAIKLTLNTEYKRRIVAICKTQLSGKHLIKALNTYAIPILTYSFGVIKWSKTDIQQLERITRTTLTKHNHLHPKSAIERLTIKRQYGGRGLIDVHHLWQKQISRLKSFFHIKSRTSNIHKAIVLNDLNYSPLNLSEQTDMQHPDKDDPQKQKLEEWKKKVLHGRHPHDLEQPHIDKVASNIWLKIGNLFPETEGFIIAIQDQIINTKNYRKYIIKDPKLTSDRCRKCHSQPETIQHITGACTTLTQTDYTHRHNQIANVIHQKLALKHKLTQDTNTPYYKYTPQHVLENTTHKLYYDRAILTDRTVHYNRPDITLQDKVNKVTYLIDIAVPNTHNIQKTIIEKISKYAELKEEVTRIWRQEKVYVVPIVVSTTGVVPNHLHQSLKLIDLNKSTYIILQKAAILNTCRIVRKFMQIEENEITTHYIPPS

SEQ ID NO: 21275 - protein, 1269 aa, Arctia plantaginis
MQNKTNKYNLRPLPGGRRDSIRNNNINTHTDNDNISLNSLTSLSVTEPYSPSTSSYRPTPVSFVDEDSHETPNPTLAVTQEVNAFLPASTKSGKPRVRMRWSKEVNLFIMRTYYQITKLETDMTTYRKQLHELFTRHYPDINVTEQRIADQRRTIVRNKLLTEETLHILKEEIRMQLQQNEHIYEYIENNSNPQLHNTQSVTTALPTQSQPHTITQSSHISTQPETITLTLENDIEIMQNVNPSSDNIQKIQEKFRTALALYSRIDPITRPKLRKLKYSRKLSELTHVFNHNILHQFLSEDTQLTDIHTLIYCTALVISEELNYKIIDHPRNILRKNSKPPWQIRLEKDIEQLRADCGRLTQYINNNRSNKIVKRVEQIFRRQCTHTRHENNNRKPEEYLDTLKQKLALKVHRLKRYKKAQLRKNDNMLFTLNEKSFYRNLSKPQTATTRPENIDIPTQTQLETFWSGIWEEPVQHNDKADWITEEENKWNSIEEMEFDCITEDDIAHVTGKLHNWKSPGIDKIHNYWYKKITLFHKPIAKNLTYIILGKQNIPEFIGMGITYMLPKTAHSPQPSQYRPITCLPTIYKILTSAIAHKINMHIEHNHIIAEEQKGCRRGHMGCKEQLIIDSTIHKHATTKNRNLHCTYIDYKKAFDSIPHSWLLKILHIYKINPKITDFMRDIMSHWKTTLHLNMNDRTVTTRQISIKKGIYQGDSLSPLWFCLALNPLSHLLQRCQAGYRLRNSTEETIISHLIYMDDIKLYAKSDKEMTKLLQNTTKFSKDINMEFGLDKCKTLHIIRGQIRPGDYAVDESSTIAAMESTDLYKYLGYKQLKGLDHTSIKQILATEYKSRTNTLCKTQLSAKNLIKALNTYAIPILTYSFGIIKWTKTDIEQIERTTRTTLTKHNNLHPKSAIERLTIKRENGGRGLIDIYHLWQKQVYNLKTFFRTKSHTSNIHKAITLNDYNFTPLNLNDHTGIHNPNNIDPQADKIENWKKKVLHGRHPHDLEQPHIDTIASNSWLKIGNLFPETEGFIIAMQDQIVNTKNYRKYIIKDATVTDDKCRKCHIQSETIQHITGACITLTQTDYTHRHNQITNIIHQKLALKHHLIQNTNTPYYNYTPQSVLESSSHKLYYDRAILTDRTIHYNRPDITLQDKINKTTYLIDIAVPNTHNLQKTITEKISKYTELKEEIIRIWRQEKVYIVPIVLSTTGVIPKHLHHSLKLINLNESVYFNLQKAAILNTCRTVRKFMDIEENGTAQHTQQPPSTST

SEQ ID NO: 21276 - protein, 1314 aa, Eilema sororculum
METRSRRKRIGPLPGGDRRGTPGADAGCLSMRTVSGEELSRRAPTDKDTTAETTDDGANLTDRTNAPVEPYSPSTISYTPSRSRVSSPSIPSSVPLSPSNIFNSGPPNPVLSVAQEVNTFLPASTKAGKPRQRMRWSKDVNTFIMRTYYTITKLETDMTTYRKQLYELFSQKYPTVIVTEQRVSVQRRTIVKNKLLTVDELNRLKEEVRVLLQEHSTNTITQSQNTIENNLQQPPPLDAQLLLHTQTQSYSHSHPMHIDTQTSHIFTQTSHTSTQTESMTLMIENDIETLPVTNQNHLAQAHIQKIQDNFNSTLLLYSGMDPSARPKLPKLRYSPNLFRLVNLFDEDILQQFVSSDTQLTDIHTLIYCTAVVISEELNFKITEHTRNTAPRHTIKPPWQQRLEHDIEKLRADCGRLTQYINNNRSNKVVKRVEAIFKTHNSHTRHENSNKKPEEFLDTLKQKLALKVHRLRRYKKAQQRKNDNTIFATNEKMFYRNLQKPQTDTLIENHTEIPTKENLETFWSNIWEEQAHHNDKANWIQEETAKWRSIEEMEFIEFTEQDIRNTTARLHNWKAPGIDKIHNFWYKKLTSLHKSIAKNLTDIVLGKQNIPEFIATGITYMLPKTKHTSQPSQYRPITCLPTIYKILTSVITDKINSHIGTHNIIAEEQKGCRRGHMGCKEQLIIDSTIHKHATTKNRNLHCTYIDYQKAFDSIPHSWLIQVLEIYKINPTIIDFLRNIMASWKTTLQLNNGLSTLITRQIQIRKGIYQGDSLSPMWFCLALNPLSHLLHQCQAGYNLKLNTEETLISHLIYMDDIKLYAKTEKQMKKLLDTTTEFSNDINMQFGLDKCKTVHIIKGKVKPGNYVVNDVDTIAAMEPTDLYKYLGYQQLKGLDHTMIKNTLKTEYQRRVSAVCKSQLSGKHLIKALNTFAIPILTYSFGVIKWSKTDIANLERTTRTTLTKHNNLHPKSATERLTIKRQNGGRGLIDIQNLWQKQITRLRTFFHTKSNTSNIHKAILLNDLNYTPLNLSDPENPHNTSNSDPQNQKIIDWKSKVLHGRHPHDLEQPHINTLASNKWLKVGNLFPETEGFIIAIQDQIINTKNYRKYIIKDPTITNDRCRRCYTQSETIQHITGACITLTQTDYTHRHNQVANIIHQKLALKYSLIQDTNTPYYKYTPQTILENNTHKIYYDRAILTDRTIHYNRPDIILQDKIKKVTYLIDIAVPNTHNLQKTIAEKISKYAELKEEVIRIWRQHNVFVVPLVLSTTGVIPNHLLHSLKLIDLPESLYINLQKAAILNTCRIVRKFMQLDENTPT

SEQ ID NO: 21277 - protein, 1318 aa, Agrochola circellaris
METRSKRKRIGPLPGGDRRGAPGADAGCLSMRTVSGEELNRRAPTDKDATAEADDGDRLTNRTDTPVEPYSPSTVSYAPSRTSSPSIPSSPIPSSPPIPSFNTVTSTPALNVAREVSTFLPASTKAGKSRVRMRWSKEVNLFIMRTYLYITKLETDMTTYRQQLHELFTRQYPEITVTEQRISDQRRAIVRNKLLSKEIIDQLKDEVRTQLLEESENIEGAITIALTQNAIEHNPQEQPQPYTQPQPILQSQPYFQSHAYSQTTHTSTQTESITIMLENEIETLVDNNQNQSTDTRSQEIHDKFKTALTQYSGMDQATRPKLPKLRYTPKLFHLVNLFNQNILNQYISEETQLIDVHTLIYCTALVISEELNFKITEYTGNTRQRNVNKPAWQQRLEKDIEKLRADCSRLTHYINNNRSNKVVKRVETIFKNMSTHTRHENDNRKPEEFLDTLKQKLALKVHRLRRYKKAQERKNDNSLFASNEKNFYRKLQTPQTDTETPTAENNIELPTAEQLETFWSSLWEEQVQHNAQSDWISDEETKWSSLEEMEFVELTESDIGSITARLHNWKSPGIDKIHNYWYKKLDSLHKVLAKNLTEIILGKQNLPEFIATGITYMLPKKQYSPQPSQYRPITCLPTIYKILTSAITTKINKHIENHNIVAEEQKGCRRGHMGCKEQLVIDSIIHKHAATKNRNLHCTYIDYKKAFDSIPHSWLIQILQIYKINSKIIDFLQNIMSRWKTTLQLNYRHNTITTQQISIKKGIYQGDSLSPLWFCLALNPLSHLLHRCQAGYSLKHSTEETVISHLIYMDDIKLYAKSEKEMKKLIDITTEFSKDINMQFGLDKCKTIHIIRGKIKPGDYPVNNTDTITAMEQTDLYKYLGYNQLKGIDHTAIKHTLNTEYKRRVIAVCKTQLSGKHLIKALNTYAIPILTYSFGVIKWSKTDIQQIERSTRTTLTKHNNLHPKSAIERLTIKRQYGGRGLIDVHNLWQKQIAKLRTFFHSKSHTSNIHKAVIMNDIRYTPLNLHEQIDTQYTSNNDPHKQKIEDWKKKVLHGRHPHDLEQSHIDAIASNKWLKIGNLFPETEGFIIAIQDQIINTKNYRKFIIKDPTITNDKCRKCHSQPETIQHITGACTTLTQTDYTHRHNQVANVIHQKLALKYKLIQDTNTPYYKYIPQIILENTTHKLYYDRAILTDRTVHYNRPDITLQDKVNKVTYLIDIAVPNTHNLQKTIGEKISKYAELKEEVTRIWRQEKVFVVPIVVSTTGVIPNHLHHSLKLIDLKDSIYITLQKAAILNTCRIVRKFMQIEENEITPHNINFT

SEQ ID NO: 21278 - protein, 1318 aa, Hydraecia micacea
METRSKRKRLGPLPGGDRRGALGADAECLSMRTVSGEELSRRAPTDKDATADIIDDGDRLTDRTNTPVEPYSPSTVSYTPSRPSTPCVPSSPSISSSPPITSFHSAQPTSTLNVTREVSTFLPASTKAGKARVRMRWSKEVNLFIMRTYLYITKLETDLTTYRKQLHELFTRKYPEITVTEQRISDQRRIIVRNKLLSQDVINQLKEEVRTQLQGESENTEGEITIALTQNTTAYNEQEQPCSQTEPITQSQPYFQSQAYSQTTHTSTQTESITVMLENEIETLADININQSTDTHIQEIHDKFKTALTQYSGMDPAARPRLPKLRYTPKLSQLVHLFNQNILQPYISEETRLIDIHTLIYCTALVISEELNFKITEYTGNSRQKNINKPAWQQRLEKDIEKLRADCGRLTQYINNNRSNKVVKRVEAIFKNMATHTRHENDNRKSEEFLDTLKQKLALKVHRLRRYKKAQERKNDNSLFATNEKNFYRNLQTAQTDTNTRTTENNVELPTTEQLETFWSGIWEEQVQHNKNSNWIIDEETKWSSLEEMEFVELTESDITCVTARLHNWKSPGIDKIHNYWYKKLESLHKVLAKNLTQIILGKQNIPEFIATGITYMLPKAQYSPQPSQYRPITCLPTIYKILTAAITRKINKHIEHHNIIAEEQKGCRRGHMGCKEQLVIDSIIHKHAATKHRNLHCTYIDYKKAFDSIPHSWLIQILQIYKINSKIIDFLQDIMARWRTTLQLNYQNNAITTRQISIKKGIYQGDSLSPLWFCLALNPLSDLLHRSQAGYSLKHATEETIISHLIYMDDIKLYSKSEKEMKKLIDITTEFSKDINMQFGLDKCKTVHIIRGKIKPGDYPINNTDTITAMEPTDLYKYLGYKQLKGLDHSTIKYTLNSEYKRRVVAVCKTQLSGKHLIKALNTYAIPILTYSFGVIKWSKTDIQQIERTTRTTLTKHNNLHPKSAIERLTIKRQYGGRGLIDVHHLWQKQIAKLRTFFHSKSHTSNIHKAVVMNDISYTPLNLHEQIDIQHTGDEDPHKQKLEDWKKKVLHGRHPHDLEQSHIDTIASNKWLKIGNLFPETEGFIIAIQDQIINTKNYRKFIIKDATIINDKCRKCHSQPETIQHITGACTTLTQTDYTHRHNQVANVIHQKLALKYKLIQDTNTPYYKYVPQTVLESTTHKLYYDRAILTDRTVHYNRPDITLKDKVNNITYLIDIAVPNTHNLQKTIGEKISKYAELKDEVTRIWRQEKVYVVPIVVSTTGVIPNHLHHSLKLIDLKDSIYITLQKAAILNTCRIVRKFLQIEENEISPPNNNSS

SEQ ID NO: 21279 - protein, 1303 aa, Eupsilia transversa
METRSKRKRIGPLPGGDRRGAPGADAGCHSMRTVSGEELNRRAPTDKDATAEISDDGDRLTDRINTPVEPYSPSTVSYTPSRASSLSIPSSPIPSSPPITSLNSIQPTPTLNVAREASSFLPASTKAGKARVRMRWSKEVNLFIMRTYFYITKLETDMTTYRQQLHELFSQQYPEITVSEQRISDQRRAIVRNKLLSQEIIEQLKEETRIKLQETENNTGANDILLSQNITEIAEQPHTQVESYTQSQPYNQTQAYTQTSHTSTQTESITLTLENDIETLTVPDQNLTTDIYIQEIHDKFRTTLAQYSGMDPTVRPKLPKLRYSPNLFRLVNLFNENILNQFISDDTQLIDIHTLIYCTAVVVSEELNFKITQHTGNTRQKQNIKPAWQQRLEKDIAKLRADCSRLTQYINNIRSSKVVRRVEAIFRSSPMHTRHENNNRKPEEFLDTLKQKLALKVHRLRRYKKAQQRKNDNAIFATNEKMFYRNLHKLDTDTNDENNTDAPSQPTKEQLETYWGSIWEEQEQHKDKATWITEEETKWRAIDEMEFVEITEADITHLTGRLHNWKSPGIDKIHNFWYKKLTSLYKPIAKNLTEIILGQQNIPDFIATGITYMLPKTKNSPQPSQYRPITCLPTIYKILTSAITTKINSHIEHHNIMAEEQKGCRRGHMGCKEQLIIDSTIHKHAATKNRNLHCTYIDYKKAFDSVPHSWLIHILEIYRINSKIIDFLRNIMPLWKTTLQLNCNQNNVTTRQIFIKKGIYQGDSLSPLWFCLALNPLSHLLQRCRAGYCFKHTTEQTTVSHLIYMDDIKLYAQTEKDMKKLVEATAEFSLDINMQFGLDKCKTLHIIRGKIRPGNYVVNNTDTITAMESTDLYKYLGYTQLKGLDHVRIKETLTAEYKRRLNAICKTQLSGKNLIKALNTFAIPILTYSFGVIKWTKTDTEQLERTTRTTLTKHNKLHPKSAIERLTIKRQNGGRGLIDIQHLWRKQVSRLKIFFHSKSRTSNIHKAIAQNDFNYTPLNLNEQPDTPEITSDDPQTQKIEDWKKKVLHGRHPHDLEKSHVNKVASNKFLKIGNLFPETEGFIIAIQDQIINTKNYRKFIIKDPSVTNDKCRKCHIQSETIQHITGACITLTQTDYTHRHNQVANVIHQKLALKYTLIQDTKTPYYNYTPQTILENDTHKLYYDRAILTDRTIHYNRPDITLRDKINKVTYLIDIAVPNTHNIQKTITEKISKYAELKDEVARIWRQEKVYVVPIVLSTTGVIPNHLLHSLKLLNLKETLYIYHPTKSCNFKYMSNRQKVHANR

SEQ ID NO: 21280 - protein, 1317 aa, Noctua pronuba
METRSKRKRIGPLPGGDRRGTPGADAGCLSMRTVGGEELSRRAPTDKNTTAEIIDDGDRLTDRTDTPVEPYSPSTVSYTPSRRSSPSIPSSPSVLSPPIISLNTVTPTPTLNAARGVSTFLPASTKAGKARVRMKWSKEVNLFIMRTYLHITKLETDMTTYRQQLHALFTRQYPEITVSEQRVSDQRRIIVRNKLLSQEVIDQLKEEVRTQLLQEETVNYIDANNITQNLSEISHQEQPQSLSQSQLIYSQSQPYNQSQAYTQTSHTSTQTESITFMLENDIETIVVPDQQLTTDTYIQEINDKFRTTLTQYSGMDPAARPRLPKLKYTPNLFRLVNLFNESILTQFISDDTQLIDIHLLIYCTAVVISEELNFKITNHTGTPRTRQNLSPAWQQRLENDIEKLRADIGRLTQYINGCRSNKIVKRVEAILRNNLTHTRHEKDNRKPEEFLDTLKQKLALKVHRLRRYKKAQQRKKDNATFATNEKMFYRNLHKPQTDTNDENNTNTPNLPTKEQLEEYWASIWEEPVQHNDKAAWIAEEEVKWRALDEMEFVEVAETDITHITARLHNWKSPGIDKIHNFWYKKLTSLHKSLAKNLTDIILGQQNTPEFIATGITYMLPKTKNSPQPSQYRPITCIPTIYKILTSAITKKISSHIEHHNIIAEEQKGCRQGHMGCKEQLIIDSTIHKHATTKNRNLHCTYIDYKKAFDSVPHSWLIQILEIYRINPKIIDFIRHIMLQWKTTLQITYNHNAVTTRQISIKKGIYQGDSLSPLWFCLALNPLSHLLQRCGAGYCLKHTTDQTTISHLIYMDDIKLYAKTENDMKKLVDVTAEFSKDINMQFGLEKCKTLHIVRGKVRPGDYVLNDTDTISAMEQTDLYKYLGYAQLKGLDHTRIKNTLTNEYKRRVNAVCKTQLSGKHLIKALNTFAIPVLTYSFGVIKWSKTDTEQLERTTRTTLTKHNNLHPKSAIERLTIKRQYGRRGLIDIQHLWRKQVSRLKSFFHSKSRSSSIHKAIVINDLNYTPLNLSHQTETLNTTNDDPQQHKMEDWKRKVLHGRHPHDLEQSHINKLASNKWLKIGNLFPETEGFIIAIQDQIINTKNYRKYIIKDPTVTNDKCRKCHSQPETIQHITGACKTLTQTDYTHRHNQVANVIHQKLALKHTLIQNTSTPYYNYKPEVTLENTTHKIYYDRAILTDKTIHYNRPDIILQDKINKVTYLIDIAVPNTHNIQKTITEKISKYAELKDEVTRIWRQEKVYVVPIVLSTTGVIPNHLLHSLKLLDLKESIYIILQKAAILNTCRIVRKFMQIEENEIGPHHNT

SEQ ID NO: 21281 - protein, 1316 aa, Mimas tiliae
METRSKKKLRGPLPGGDRRGTPGADAGCYSIRTVSGKELNRRTPAGSPESVTADIDLPDRLTDSRTDSPIEPYSPSTVSYILSTDSSPSIPRSPPSNSYRDPSIPALDVAREVTAFLPASTKAGKPRVRMSWSKDVNLFIMRTYYYITKLETDMTIYRKQLHERFSRQYPDIKVTEQRVSDQRRAIERNKLLSQDTLDQLKEEVRKQLENEINNLDDGDDINLIDRDQNHLQPLSQLCTTHSNAQSIPLDPTSRVQHTHNLSYSQITQTSQISTQTESVTLTVENDIETLMEPNFITDTYTQELFEKFTTSLTLYSGLDPVARPKLPKLRYSPKLTKLTQIFNQNILTKFLSQDTKLIDIHTLIYCTAIVISEELGYKITESIRIQSRSRLNRKPPWQHRLETDIEKLRADCGRLTQYINKNRSKKVVKRVEEIFKSKTTHTRHENKNKTPEEFLDTLKQNLALKVHRLKRYKKAQQRKNDNILFTTNEKTFYRNLKKPRINAYNTENTQNIESPTKEQLETFWANLWEETIEHNNYADWIKEEENRWSTVGEMEFTEITESDIKCITNRLHNWKSPGVDKIHNFWFKKLTSLHKLIAKNITEIILNKQNIPHFIATGITYMLPKGEISSEPSQYRPITCLPTLYKIITAVISFKINTHVEHHNIIAEEQKGCRRGHMGCKEQLVIDSTIHKHATTKNRNLHCTYIDYKKAFDSIPHSWLIKVLEIYKINNSLIKFLQNIMTHWKTTLHLNDHNNSITTRPISIKKGIYQGDSLSPLWFCLALNPLSHILQRCRAGYHLKDNTQETIISHLIYMDDIKLYAKTEKDMKKLIDATSNFSKDINMQFGLDKCRTLHIIRGKIRPGDYTVNNNDIITAMEPADLYKYLGYKQLKGLDHTNIKHTLFTEYQRRINLLSKTQLSAKHLIKAFNTYAIPILTYSFGIIKWTKTDIDKIERITRTTLTKHNHHHPKSAIERLTIKRQEGGRGLIDIYNLWQKQLYNLKTFFYSKSHISNIHKAITHNDYNFTPLNLHEQTDQQNLLSSDPQKQKIEDWKKKVLHGRHPHDLEQPHIDAIASNKWLNIGNLFPETEGFMLAIQDQVINTKNYRKYIIKDPTVTNDKCRRCHTQSETIQHITGACTSLTQTDYTHRHNQVANIIHQSLARKYTLIPNTNTPYYKYTPETILENSSYKLYFDRAILTDRTIHYNRPDITLQDKTNKITYLIDIAVPNTHNIHKTIIEKINKYTELREEVARIWRQQKVFVVPIVLSTTGVIPKDLRTSLDLLNLNNSIYISLQKEAILNTCRIVRKFLQVSDSGMI

SEQ ID NO: 21282 - protein, 1304 aa, Euproctis similis
MEMYLRNRRIGPLPGGDRRGTSGADAGCDSIRSVGGEELNRRAPSGSPEDTTANPTDYRQTDNDNISVNSLISDPVEPYSPSSNSFIPTPVSSLGSDSSRTHSPVLNVAQEVNTFIPASTKAGKPRVRMRWSKEVNTFIMRTYYHITKLETDMTIYRKRLHELFSRQYPEITVTEQRISDQRRAIIRNKFLSQETLEQLKDEVQITLSKDENCATNRNLDPFTNTQIDDNLDNEYITSPTATTHSQSQPYPVLQTINTSTQTETITLTLENDIEILVDNNNETLDTYTGELETKFRTALTKYSGIKPAARPKLPKLKYSIQLTKLTNLFNQHILHTYLNKDTQLTDIHTLIYCTAVVISEELSYKISHNYQNFKTRDNRKPAWQLRLEKDIEKIRADCGRLTQYINNNRSKKVVKRIEQIFKNHLTHTRHESENKNPAEYLDTLKQKLAVKVNRLKRYKKALQRKEENALFGSNEKYFYRNLKTSQIHNSPLTNIEIPSKTDLEHFWSGIWEEKIEHNDKADWILEEAKQWDTIEEMPFEKITENDIKSVTLKLHNWKSAGIDKVHNFWYKKLTVLHKSIARILTDIILGRNNIPEFLTIGITYMIPKNKYSAQPSQYRPITCLPTIYKILTSVIAQKINKHAEKNNIIAEEQKGCRRGHMGCKEQLLIDSVIHRNASTKNRNLHCIYIDYKKAFDSIPHSWLLKILQIYKINPKLIQFMRNIMPHWKTTLQLNYQETTIKTREIKINKGIYQGDALSPLWFCLTLNPLSHLLHRCRVGYCLKHPTEQRNISHLIYMDDIKLYTQSKKDMNKLLKVTTEFSKDINMQFGFDKCKTLNIIRGKIQPGDCDVDDDNIIAAMEPTDFYKYLGYNQTKGLNHTVIKENILNEYKNRVNKLCKTQLSAKNLFKAINTYAIPVLTYSFGVIKWSKTNIEHLERVTRTTLTKHNHLHPKSAIERLTIKREMGGRGLIDISQLWQKQIQNLRNFFHTKSQASIIHKVITHNDLNYTPLNLSDFQNTHYNFNTDHQIYQIENWKKKTLHGRHPHDLEQNHVDQIASNKWLKIGSLFPETEGFMIAIQDQIINTKNYRKYIIKDSSVTDDKCRKCYSQPETIQHITGACVTLTQTDYTHRHNQIVNIIHQNLALKHNLIPNSLTAYYNYRPQTVLENTTHKLYYDRAILTDKTIHYNRPDVVLQDKLNKTTYMIDISVPNTHNLQKVISEKISKYAELKEEIARIWRQDKVYVVPIVLSTTGIIPKHLHSSVKLLGLKESLYIILQKAAILNTCRIVRKFMALDENSSHIAPST

SEQ ID NO: 21283 - protein, 1193 aa, Xestia xanthographa
MKWSKEVNTFIMRTYLHITKLETDMTTYRQQLHELFTRRYPEIAVSEQRISDQRRAIVRNKLLSLEEIDRLKIEVRTQLHLESTNDEDTNSIVLTQNTIENTQQEQPQSYAQSEPYTQSQPYYHLSSQSYSQITHTSTQTENVTIMLENDIEVIANINQNPPTDTRIREIHDKFKTALTQYSGMGGSARPKLPKLRYSPKLAQLVNIFNQNILTQYISEETQLIDLHTLIYCTALVISEELNFKITEYTGNTRQSNVNKPAWQQRLEKDIEKLRAGCGRLTQYINNNRSNKVVKRVEIIFKNMAVHTRHENHNIKPEEFLDTLKQKLALKVHRLRRYKKAQERKNDNALFATNEKNFYRKLQKPQTNTDTPTTENNIELPTTEQLETFWAGIWEEQVRHKETSEWIQDEETKWSLLEEMEFIELSESDIASVTARLHNWKSPGIDKIHNYWYKKLESLHKILAKNLTEIILGKQSIPEFIATGITYMLPKTQYSPQPSQYRPITCLPTIYKILTSAITAKINKHVEYHNIIAEEQKGCRRGHMGCKEQLVIDSIIHKHAAAKNRNLHCTYIDYKKAFDSIPHSWLIQILHIYKINPKIIEFLQNIMSKWKTTLQLNYRNSTVTTRQIAIKKGIYQGDSLSPLWFCLALNPLSHLLQRCPAGYCLKQVTEEITISHLIYIVDIKLYAKTEKEMKKLIEITTEFSRDINMQFGLDKCKTVHIIKGKIKPGDYAINTTDTITAMEPTDLYKYLGYKQLKGLDHTTIKQTLNTEYKRRVIAVCQTQLSGKHLIKALNTYAIPILTYSFGVIKWSKTDIQQIERTTRTTLTKHNNLHPKSAIERLTIKRQYGGRGLIDIHNLWQKQITRLKTFFHSKSRTSNIHKAIVMIDNSYTPLSLNEQTDTQNTNNEDPHKQKLEDWKKKVLHGRHPHDLEQPHIDTLASNKWLKIGSLFPETEGFIIAIQDQIINTKNYRKYIIKDPTITNDKCRKCHSQPETIQHITGACTTLTQTDYTHRHNQVANIIYQNLALKHKLIQDSNTPYYKYVPQPILENTTHKLFYDRGILTDRTIHYNRPDIMLQDKVNKVTYLIDIAVPNTHNLQKTIGEKISKYAELKEEVTRIWRQEKVRSTYVVPIVVSTTGVIPNHLYHSLKLIDLKDSIYITPQKAAILNTCRIVRKFMQIDENEISHNSHTHTLR

SEQ ID NO: 21284 - protein, 1328 aa, Xestia xanthographa
METRSKRKRIGPLPGGDRRGAPGADARCHSMRSVSGLELNRRAPTDKDTTAEIIDDGDRLTDRTDTPVEPYSPSTVSYTPSRRTSPSIPSSPTISSPPIISLNTVSPTPTLNAARGVSTFLPASTKAGKARVRMKWSKEVNTFIMRTYLHITKLETDMTTYRQQLHELFTRQYPEIAVSEQRISDQRRTIVRNKLLSLEEIDRIKAEVRTQLHVESVNNEDTNNIAVTQNTIEITQQEQPQAYAQPESYTQSQPYYQSQAYSQITHTSTQTENVTIMLENDIEVLANIDQNPPTDTRIQEINEKFKTALTQYSGMDPAARPKLPKLRYTPKLVRLVNCFNQNILNQYISEETQLIDVHTLIYCTALVISEELNFKITEYTGNTRQPNANKPAWQLRLEKDIEKLRADCGRLTQYINNNRSNKVVKRVEIIFKNMAVHTRHENHNRKPEEFLDTLKQKLALKVHRLRRYKKAQERKNDNALFATNEKNFYRKLQKPQTDTDTPTTENNVELPTTEQLETFWAGIWEDQVHHKETSQWIQDEETKWSSLEEMGFSEISESDVASVTARLHNWKSPGIDKIHNYWYKKLESLHTILAKNLTEIILGKQNIPEFIATGITYMLPKTQYSPQPSQYRPITCLPTIYKILTSAITTKINKHIEHHNIIAEEQKGCRRGHMGCKEQLVIDSIIHKHAATKNRNLHCTYIDYKKAFDSIPHSWLIQILQIYKINPKIIHFLQNIMSHWKTTLQLNYRHTAITTRRITIKKGIYQGDSLSPLWFCLALNPLSDLLRRCQAGYSFKHDTKETVISHLIYMDNIKLYARSEKEMEKLIGTTTEFSKDINMQFGLDKCKTVHIIRGKIKPGDYPINNIDTITALEPTDLYKYLGYKQLKGIDHTAIKHTLNTEFKRRVIAVCKTQLSGKNLIKALNTYAIPILTYSFGVIKWSKTDIQQIERTTRTTLTKHNNLHPKSAIERLTIKRQYGGRGLIDIHHLWQKQITGLRTFFHSKSHTSSIHKAIVKNDINYTPLNLHEPTDTQHINNEDPQQQKLEDWKKKVLHGRHPHDLEQSHVDRKASNKWLKIGSLFPETEGFIIAIQDQIINTKNYRKFIIKDPTITNDKCRKCHSQPETIQHITGACTTLTQTDYTHRHNQVANIIHQNLALKYKLIQDTNTPYYKYVPERFLENTTHKLFYDRAILTDRTIHYNRPDIILQDKANKVTYLIDIAVPNTHNLQKTIGEKISKYAELKEEVTKIWRQEKVYVVPIVVSTTGVVPNHLHHSLQLLDLKDSIYITLQKAAILNTCRIVRKFMQIEDNASHNNHISSHTHTRYVDLA

SEQ ID NO: 21285 - protein, 1313 aa, Mesoligia furuncula
METRSKRKRIGPLPGGDRRGALGADAECLSMRTVSGEELNRRAPTDKDATAEVIDDGDRLTNRTDTPVEAYSPSTVSYSPSRTSSPSIPSSSIPSSPPITSFNTVSPTPALNVAREVSTFLPASTKAGKTRVRMRWSKEVNLFIMRTYLYITKLETDMTTYRQQLHECFSRQYPEISVSEQRISDQRRTIVRNKLLSQVELDQLKEEIRIQLQQESENCADTNTIIPTQNTNINILQEQPQSLTQLHPNSQSLTCNQSQAFTQAFTQTAHTSTQTESLTLTLENDIETLVVADQNLVTDTYIQEIQDKFKTTIAQYSGMDPAVRPKLPKHKYTRNLFRLLNLFNENILVQFISDDTQLIDIHLLIYCTAVVISEELNFKITDHTVTTRTKPFVKPAWQQRLEKDIEKLRADCGRLTHYINGIRSNKVVKRVETIFKNYSNHTRHESNNRKPEEFSDTLKQKLALKVHRLRRYMKAQQRKNDNATFAMNEKAFYRNIQKTHSDTRIENNTDALSKEQLEAYWSSIWEEQVQHNDKASWIAEEEAKWRAIDEMEFAEVSESDITHITARLHNWKSPGVDKIHNFWYKKLTSLHKSIAKNLTDIILGQQNTPEFIATGITYMLPKTKCSSQPSQYRPITCLPTIYKILTSAITKKISSHIEQHNIIAEEQKGCRQGHMGCKEQLIIDSTIHKHATSKNRNLHCTYIDYKKAFDSVPHSWLIQILEIYRINPKIINFMRHIMLQWKTTLQINSNHSNVTTRQISIKKGIYQGDSLSPLWFCLALNPLSHLLQACRAGYCLKHTTEETTISHLINMDDIKLYGKTEKDMKKLVEITAAFSKDINMQFGLDKCKTLHIIRGKVQPGDYAVNDTDTITAMEPSDLYKYLGYTQLKGLDHVRIKNTLTTEYKRRLNAVCKTQLSGKHLIKALNTFAIPVLTYSFGVIKWTKTDTEKLERTTRTALTKHNNLHPKSAIERLTIKRQNGGRGLIDIQHLCRKQVRRLKTFFHTKSRTSNIHKAIVINDLNYTPLNLNDQIETQNTTNDDPQKQKIEEWKKKVLHGRHPHDLEQSHINQLASNKWLKIGNLFPETEGFIIAIQDQIINTKNYRKFIIKDPTITNDKCRRCHIQSETIQHITGACTTLTQTDYTHRHNQVANIIHQKLALKHSLIQNSCTPYYKCTPQTILENDTHKMYYDRAILTDRTIHYNRPDITLQDKIRKITYLIDIAVPNTHNLQKTISEKISKYAELKEEVTRIWSQEKVYVIPIVLSTTGVIPNHLLRNLKLIDLEESVYINLQKAAILNTCRIVRKFMQLEEENTP

SEQ ID NO: 21286 - protein, 1324 aa, Mesoligia furuncula
METRSKRKRIGPLPGGDRRGALGADAECLSMRTVSGEELNRRAPTDKDATADIIDDGDRLTDRINTPVEPYSPSTVSYTPSRPSTPSIPSSPSIPSSPPITSFNSVQPNSTLNVTREVSTFLPASTKAGKARVRMRWSKEVNLFIMRTYLYITKLETDLTTYRKQLHELFTRQYPEITVTEQRISDQRRIIVRNKLLSQDIINQLKEEVRTRLQGESENTAGAISIALTQNTTAYNQQEQPCSQTEPIIQSQPITQSQPYFQSQAYSETTHTSTQTESITIMLENEIETLADISINQSTDTHIQEIHDKFKTALTQYSGMDPAARPRLPKLRYTPKLSQLVHLFNQNILQQYISEETHLIDIHTLIYCTALVISEELNFKITEYTGNSRQRNINKPAWQQRLEKDIEKLRADCGRLTQYINNNRSNKVVKRVDAIFKNMATHTRHENDNRKPEEFLDTLKQKLALKVHRLRRYKNAQERKHDNSLFATSEKNFYRNLQTAQTNTNTMTTENNIELPTAEQLETFWSGIWEEQVQHNNNSDWITDEETKWSSLEEMEFVELTESDITCVTARLHNWKSPGIDKIHNFWYKKLESLHKVLAKNLTQIILGKQNIPEFLATGITYMLPKAQYSSQPSQYRPITCLPTIYKILTSAITTKINKHIENHNIIAEEQKGCRRGHMGCKEQLVIDSIIHKHANTKHRNLHCTYIDYKKAFDSIPHSWLIQILQIYKINSKIIDFLQDIMARWRTTLQLNYRNNAITTRQISIKKGIYQGDSLSPLWFCLALNPLSDLLHRSQAGYSMKHTTEETIISHLIYMDDIKLYSKSEKEMKKLIDITTEFSKDINMQFGLDKCKTVHIIRGKIKPGDYPINNTDTITAMEPTDLYKYLGYKQLKGLDHSTIKYTLNSEYKRRVVAVCKTQLSGKHLIKALNTYAIPILTYSFGVVKWSKTDIQQIERTTRTTLTKHNNLHPKSAIERLTIKRQYGGRGLIDVQHLWQKQIAKLRSFFHSKSQTSNIHKAVVMNDISYTPLNLHDQIDTQHTSHEDPHKQKVEDWKKKVLHGRHPHDLEQSHIDKIASNKWLKIGNLFPETEGFIIAIQDQIINTKNYRKFIIKDPTITNDKCRKCHSQPETIQHITGACTTLTQTDYTHRHNQVANVIHQKLALKYKLVQDTNTPYYKYVPQTVLENTTHKLYYDRAILTDRTVHYNRPDITLQDKVNKVTYLIDIAVPNTHNLQKTIGEKISKYVELKEEVSRIWRQEKVYVVPIVVSTTGVIPNHLHHSLKQIDLKDSIYITLQKAAILNTCRIVRKFMQIDENEISPHNINSS

SEQ ID NO: 21287 - protein, 1309 aa, Hemaris fuciformis
METRSKKKLRGPLPGGDRRGTPGADAGCYSMQTVSGEELSRRAPTGSPESITAANLTDRQTDSRSNSPSEPYSPSTKSYTPSICSSSSRSPPSLTNKIREPSIPALDAAREVNRPFLPMSTKAGKPRVRMSWSRDVNLFIMRTYYYITKLETDMTIYRKHLHEHFSQRYPDVIVSEQRLSDQRRAIVRNNLLPQDVLDQLKTDVRKQLEEESMINDDTEVICRNQSPLPHPHTSNSNTPHLSLIQIQPITQENQNQCSQITHTSTQTENVILTLENDIDNMPEPNISTDIHIQTIQDKFTATLTLYSGLDPTLRPKLPKLKYTSKLTSLINIFNQSILNNCISKTTKLLDIHTIIYCTAYVIAEELDFKINEQRVGRIKPGKNNKPPWQYRLEKDIEKLRADCGRLTQYINNNRSKKVIKKVEEIFKKYTTHTRHENNNKKPEEFLDTLKQKLAVKAQRLKRYKKAQERRKDNVLFAKNEKMFYRQLRNPHTNIKTNIHNENNISTPKKEALEAFWAKVWEEQIQHNDEANWIKEEENMWSEVDEMEFTEVTEADIKLITNRLHNWKSPGIDKIHNFWYKKLTSLHKAIAQNFTDIILRKQSFPHFLATGITYMLPKDKFSPDPSNYRPITCLPTIYKILTSVITSKINKHVENHNIIAEEQKGCRRGHMGCKEQLVIDSTIHKHASTKSRNLHCTYIDYKKAFDSIPHSWLIQILKIYKINSVIIEFLQNIMLNWKTTLHLYNVNDPIITRQLSIRKGIFQGDSLSPLGFCLALNPLSHILQRSRAGYHLKHNSEETNISHLIYMDDVKLYSKNEKDMNKLIEATLNFSKDINMHFSLDKCKTVHIIRGKIRPGDYTLNNSDLITAMEPTDLYKYLGYKQLKGIDHKNIKHSLSGEYRRRVNAICKTQLSAKNLIKALNTYAIPILTYSFGVIKWSKTNIEQIERLTRTTLTKHKYLHPKSAVERTTIKREAGGRGLIDIYNLWQKQIYNLKLFFREKSRTSNIHNAICQNDNNFTPLNLCEPPNPPNPNNIDRQQQKIEDWKKKVLHGRHPHDLEQPHIDKIGSNKWLKIGGLFPETEGFLIAIQDQVINTKNYRKFIIKDPTMINDKCRRCHTQPETIQHITGACICLTQTDYTHRHNQISNIIHQTLALKYNLIQSSKTPYYKYTPKTILENALYKLYYDRAILTDRTIHYNRPDITLQDKRNKTTYLIDIAVPNTHNIQKTIAEKNNKYTDLKNEVIRIWKQEKVYVVPIVLSTTGVIPKHLHHSLKLLNLNKSLYITLQKAAILNTCRIVRKFMEIDETVSHP

SEQ ID NO: 21288 - protein, 1301 aa, Pararge aegeria
METRSKRKRIGPLPGGNRRGAPGADAGCLSMRTVSGEELNRRAPTDKNTTAEVIDDDDRLTDRTNTPIEPYSPSTISYTPSSRTSSPSLPSSPPIAILNANPSIQTLNVAREASTFLPASTKAGKARVRMKWSREVNIFIMRNYLYITKLETDLTTYRQRLHELFKEQYPSIIVSEQRISDQRRAIVRNKLLPQDIIDQLKIEIRRQLEEESKSNTDTNTAALTQTRSQNIQQIQPLQPNTQQQTYNQLQPYSQTSHTATQTETIILTIENDVEHLDNTDRNTISEKYVQEILNKFKTAITQYSGMDPAARPKLPKLKHSPNLFRLVNIFNESILYQFMSIDTQLIDIHTVIYCTALVISEELNFKITEYTENSRSRHNNKPPWQQRLEKDIEKLRADCGRLTQYINNNRSNKVVKRVEAIFKSNFIHTRHENSNTKPEEFLDTFKQKLALKVHRLRRYKKAQQRKKDNAIFATNEKMFYRNLNKPHTDRISDEKIETPTIEHLENFWSGIWEQQVEHNNEAAWITEEDFKWRGIDEMEFKEFTESDITIITARLHNWKSPGIDKIHNFWYKKLTSLHKIIAKVFTDIVLGRQNIPEFIATGITYMLPKTKYTTQPSQYRPITCLPTIYKILTSAITTKINLHVERHNIIAEEQIGCRRGHMGCKEQLVIDSTIHKHATAKNRNLHCTYIDYQKAFDSIPHSWLIKVLEIYKVNPKIIIFLRSIMSHWKTTLQLSNRLNTLVSRQIYIRKGIYQGDSLSPLWFCLALNPLSDLLHKCRAGYSFKHNSKETIISHLIYMDDIKLYAKSENEMKNLINITTEFSQDINMKFGIDKCKAVHIIKGKIKSGDYIINENDTISSMETTDLYKYLGYKQLKGIDYTAVKQTLNTEYRRRINAICKTQLSGKHLIKALNTFAIPILTYSFGVIKWSKTDTEQIERITRTTLTKHNNHHPKSAVERLTIKRQNGGRGLIDIYHLWQKQISRLRTFFHSKSLTSDIHKAITIMDLNYTPLNLNEKIDTQNTSITDPQKQKLENWKKKVVHGRHRHDLEQPHINTVASNKWLKIGNLFPETEGFIIAIQDQIINTKNYRKYIIKDSNITSDKCRRCHIQSETIQHITGACTTLTQTDYTHRHNQVANIIHQKLAFKHMLTQNTNTPYYKYTPQTILENTTYKLYYDRAILTDKTIHYNRPDIILQDKLRKTTYLIDIAVPNTHNIQKTVSEKICKYTELKEEITRIWKQAKVYVVPIVISTTGVIPKSLLHSLKIIGLEESLYIGLQKAAILNTCRIVRKFLQVDESIGLT

SEQ ID NO: 21289 - protein, 1317 aa, Noctua fimbriata
METRSKKKRIGPLPGGDRRGAPEADAGCLSMRTVSGEELNRRAPTDKDTTAEIIDDGDRLTDRTDTPVEPYSPSTVSYTPSRRSSPSIPSSPTLLSPPIITLNTISPTPTLNAARGVSTFLPASTKAGKARVRMKWSKEVNLFIMRTYLHITKLETDMTTYRQQLHALFTRQYPDITVSEQRISDQRRTIVRNKLLSQEVIDQLKEEVRTQLLHEETVNYTDTNNITQNLSEISHQEQPQSLSQSQIIYTQSQPYNQSQAYTQISHTSTQTESITLTLENDIETIVVPDQHLTTDIYIQEINDKFRTTITQYSGMDPAARPRLPKLKYTPNLFRLVNLFNESILTQFISDDTQLIDIHLLIYCTAVVISEELNFKITDHTRATRTRQNVAPAWQQRLEKGIEKLRADIGRLTQYINGCRSNKLVKRVEVIFRNNATHTRHEQNNRKPEEFLDTLKQKLALKVHRLKRYKKAQQRKNDNAIFTTNEKIFYRNLHNPKNDRNYENNTNTPNLPSKEQLETYWASIWEEQKQHNDKASWIVDEEEKWRDIDVMEFVEVTESDIIHITTRLHNWKAPGIDKIHNFWYKKLTILHKSIAKNLTDIILGQQNIPEFITTGITYMLPKTKYTSEPSQYRPITCLPTIYKILTSAVTKKINSHIIHHNIIAEEQKGCRQGHMGCKEQLIIDSTIHKHATSKNRNLHCTYIDYKKAFDSVPHSWLIQILEIYRVNPKIIDFMRHVMLQWKTTLQINSNNNNVTTRQISIKKGIYQGDSLSPLWFCLALNPLSHLLQRCGAGYCLKHSTDETTISHLIYMDDIKLYAKSEKDMKKLVDITAEFSKDINMQFGLEKCKTLHIVRGKVRPGDYAVNESDSITALEPTDLYKYLGYTQLKGLDHVKIKNTLTAEYKKRVNAICKTQLSGKHLIKALNTFAIPVLTYSFGVIKWTKTDTEQLQRTTRTTLTKHNNLHPKSAIERLTIKREHGGRGLIDIQHLWQKQVSRLKLFFHTKARNSNIHKAIVANDLNYTPLNLSDQIETQNTTNDDQQIQKIEDWKRKVLHGRHPHDLEQSHINKLASNKWLKIGNLFPETEGFIIAIQDHIINTKNYRKYIIKDPTLTNDKCRKCHVHPETIQHITGACTTLTQTDYTHRHNQVANVIHQKLALKHTLIQNTNTPYYNYKPETTLENTTHKLYYDRAILTDRTIHYNRPDIILQDKLNKVTYLIDIAVPNTHNIQKTITEKISKYAELKEEVTRIWRQEKVYVVPIVLSTTGVIPNHLIHSLKLLDLKETLYITLQKAAILNTCRIVRKFMQVEENEIGPHHNT

SEQ ID NO: 21290 - protein, 1309 aa, Omphaloscelis lunosa
METRSKSKRIGPLPGGDRRGTLGADAECLSMRTVSGEELNRRTPTDKDVTAEIIDDGDGLTNRTNTPVEPYSPSTVSYTPSRPSSPSIPSSPPITCLNSIPPTPTLNVAREVSSFLPASTKAGKARVRMRWSKEVNLFIMRTYFYITKLETDMTTYRQQLHELFTRQYPEITVSEQRISDQRRVIVRNKLLSPQIIEQLKEETRIQLQEAENITNDNAIPLLQNLTAIDEQPHTQVEPYTQSQPYNQSQAYTQTPHTSTQTESITLTLENDIETLTVADQNLTTDMYIQEIHDKFRTTLAQYSGMDPTVRPKLPKLRYSPNLFRLVNLFNENILNQFVSDDTQLIDIHTLIYCTAVVVSEELNFKITQHTGNTRPKQNIKPAWQQRLEKDIEKLRADCSRLTQYINNIRSNKVVRRVEAIFRNSFTHTRHENNNRKPEEFLDTLKQKLALKVHRLRRYKKAQQRKNDNAIFASNEKMFYRNLHKPDTDTNHENNTDAPDQPTKEQLETYWSSLWEEQKQHNNKATWITEEETKWRAIDEMEFVEITEADITHLTGRLHNWKSPGIDKIHNFWYKKLTSLYKPIAKNLTEIILGQQNIPDFIATGITYMLPKTKKSPQPSQYRPITCLPTIYKILTSAITTKINSHIEHHNIMAEEQKGCRRGHMGCKEQLIIDSTIHKHATIKNRNLHCTYIDYKKAFDSVPHSWLIQILEIYRINSKIIDFLRNIMPLWKTTLQINCNQYNVTTRQIAIKKGIYQGDSLSPLWFCLALNPLSHLLQRCRAGYCLKHTTEQTTISHLIYMDDIKLYAQTEKDMKKLVEATAEFSLDINMQFGLDKCKTLHIIRGKIRPGNYVVHSTDTITAMGPTDLYKYLGCTQLKGLDHVRIKESLTAEYKRRLSAICKTQLSSKNLIKALNTFAIPVLTYSFGVIKWTKTDTEHLERITRTTLTKHNNLHPKSAIERLTIKRQNGGRGLIDIQHLWRKQVCRLKTFFHSKSRTSNIHKAIAQNDFNYTPLNLIEHRDTTQITSDDPQKQKIEDWKKKVLHGRHPHDLEQSHVNKLASNKFLKIGNLFPETEGFIIAIQDQIINTKNYRKFIIKDPSVINDKCRKCHIQPETIQHITGACTTLTQTDYTHRHNQVANVIHQKLAVKYTLIQDTNTPYYNYAPQIILENDTHKLYFDRAILTDKTIHYNRPDITLQDKINKVTYLIDIAVPNTHNIQKTISEKICKYAELKDEVTRIWRQQKVYVVPIVLSTTGVIPNHLLHSLKLLNLKETLYITLQKAAILNTCRIVRKFMQIDENEIGPHNTSST

SEQ ID NO: 21291 - protein, 1273 aa, Arctia plantaginis
MQNKTNKYNLRPLPGGRRDSIRNHNINNQTDRQTDNDNISLNSLTSLSVTEPYSPSTSSYRPTPVSFVDEDSHETPNPTLAVTQEVNAFLPASTKSGKPRVRMRWSKEVNLFIMRTYYQITKLETDMTTYRKQLHELFTRHYPDINVTEQRIADQRRTIVRNKLLTEETLHILKEEIRMQLQQNEHIYEYIENNSNPQLHNTQSVTTALPTQSQPHTITQSSQISTQSETITLTLDNDIEIMQNVNPSSDNIQKIQEKFRTALALYSRMDPITRPKLPKLKYSRKLSELTHVFNHNILHQFLSEDTQLTDIHTLIYCTALVISEELNYKIIDHPRNILRKNSKPPWQIRLEKDIEQLRADCGRLTQYINNNRSNKIVKRVEQIFRRQSTHTRHENNNRKPEEYLDTLKQKLALKVHRLKRYKKAQQRKNDNMLFTLNEKSFYRNLSKPQTATTRPENIDIPTQTQLETFWSGIWEEPVQHNDKADWITEEENKWNSIEEMEFDCITEDDIAHVTGKLHNWKSPGIDKIHNYWYKKITSFHKPIAKNLTYIILGKQNIPEFIGMGITYMLPKTAHSPQPSQYRPITCLPTIYKILTSAIAHKINMHIEHNHIIAEEQKGCRRGHMGCKEQLIIDSTIHKHATTKNRNLHCTYIDYKKAFDSIPHSWLIKILHIYKINPKITDFMRDIMSHWKTTLHLNMNDRTVTTRQISIKKGIYQGDSLSPLWFCLALNPLSHLLQRCQAGYRLRNSTEETIISHLIYMDDIKLYAKSDKEMTKLLQNTTKFSKDINMEFGLDKCKTLHIIRGKIRPGDYAVDESSTIAAMESTDLYKYLGYKQLKGLDHTSIKQILVTEFKSRTNTLCKTQLSAKNLIKALNTYAIPILTYSFGIIKWTKTDIEQIERTTRTTLTKHNNLHPKSAIERLTIKRENGGRGLIDIYHLWQKQVYNLKTFFRTKSHTSNIHKAITLNDYNFTPLNLNDHTGIHNPNNIDPQADKIENWKKKVLHGRHPHDLEQPHIDTIASNSWLKIGNLFPETEGFIIAIQDQIVNTKNYRKYIIKDATVTDDKCRKCHIQSETIQHITGACITLTQTDYTHRHNQITNIIHQKLALKHHLIQNTNTPYYNYTPQSVLESSSHKLYYDRAILTDRTIHYNRPDITLQDKINKTTYLIDIAVPNTHNLQKTITEKISKYTELKEEIIRIWRQEKVYIVPIVLSTTGVIPKHLHHSLKLINLNESVYFNLQKAAILNTCRTVRKFMDIEENGTAQHTQQPPSTST

SEQ ID NO: 21292 - protein, 1313 aa, Eilema depressum
METRSKRNRIGPLPGGDRRGTPGADAGCLSMRTVSGEELNRRAPTDKDTTAETADDGASLTDRTNTPAEPYSPSTISYTPSRISSPSIPSSVPSSPPSNIFYTDPPNPVLSVAQEVNTFLPASTKAGKPRKRMRWSKDVNTFIMRTYYTITKLETDMTTYRKQLHELFSQKYPTTIVTEQRVSDQRRTIVKNKLLNVDELNRLKEEVRVLLQEHSINTITQSQNTIENNLQQSPPLDTQLLLHTQTQSYSHSHPMQIDTQTSHIFTQTSHISTQTESMTLMIENDIETLTVTNQNHLAQAHIQKIQDKFNSTLLLYSGMDPSSRPKLPKLRYSPNLFRLVKLFNEDILQQFESSDTQLTDIHTLIYCTAVVISEELNFKITEHTRNTAPRHTIKPPWQQRLEHDIEKLRADCGRLTQYINNNRSNKVVKRVEAIFKTHNTHTRHENSNKKPEEFLDTLKQKLALKVHRLRRYKKAQQRKNDNTIFATNEKMFYRNLQKPQTDTLVENHTDIPTKENLETFWSNIWEEQAHHNDKANWIQEETTKWRSIEEMEFIEITEQDIRNTTARLHNWKSPGIDKIHNFWYKKLTTLHKSIAKNLTDIVLGKQNIPEFIATGITYMLPKTKYTSQPSQYRPITCLPTIYKILTSAITNKINSHIDTHNIIAEEQKGCRRGHMGCKEQLIIDSTIHKHATTKNRNLHCTYIDYQKAFDSIPHSWLIQVLEIYKINPTIIDFLRNIMSCWKTTLQLNNGLSTLITRQIQIRKGIYQGDSLSPLWFCLALNPLSHLLHQCQAGYNLKLNTEETYISHLIYMDDIKLYAKTEKQMKKLLDTTTEFSNDINMQFGLDKCKTVHIIKGKVKPGNYVVNDTDTIAAMEPTDLYKYLGYQQLKGLDHTMIKNTLKTEYQRRVSAVCKSQLSGKHLIKALNTFAIPILTYSFGVIKWSKTDITNLERTTRTTLTKHNNLHPKSATERLTIKRQNGGRGLIDIQNLWQKQITRLRTFFHTKSNTSNIHKAIILNDLNYTPLNLSDPENPHSTSNSDPQNQKIIDWKSKVLHGRHPHDLEQPHVNTLASNKWLKVGNLFPETEGFIIAIQDQIINTKNYRKYIIKDPTITNDRCRRCYTQSETIQHITGACTTLTQTDYTHRHNQVANIIHQKLALKYSLIQDTNTPYYKYTPQTILENNTHKIYYDRAILTDRTIHYNRPDIILQDKIKKVTYLIDIAVPNTHNIQKTIAEKISKYAELKEEVIRIWRQDNVFVVPLVLSTTGVIPNHLLHSLKLIDLPESLFINLQKAAILNTCRIVRKFMQLDENTPT

SEQ ID NO: 21293 - protein, 1311 aa, Biston betularia
METRSKRKRIGPLPGGDRRGTSGADAGCFSMRTVSGEELNRRTPTDKDITAETSDDVGRLTDRTNTPVEPYSPSTISYTPSRQSSPSIPSSPPRTSLNSVSPIPALNVARGANAFLPTSTKAGKARVRMRWSKDVNIFIMRTYFYITKLETDMTTYRQQLHELFTQQYPEVKVSQQRISDQKRAIVRNKLLSQEIIQQLKEETRIHLQEEEINSNASPLTQNITENTQQIQSQPLVQLVPNTQTQAYNYSQAHTQKSHMSTQTESIMLMLENDIETLVAVNQNLTTDNYVQEIHEKFITTLAQYSGMDPAARPKLPKLRYSTNLFRLVNLFNENILQQFISDDSQLIDIHTLIYCTAVVICEELNFKITEHTRNTRPRHNNKPPWQQRLETDIEKLRADCGRLTQYINNNRSNKVVRRVEAIFQSSDTHTTHENRNKKPEEFLDTLKQKLALKVHRLRRYKKAQQRKNDNAIFATNEKMFYRNLYNTHTNTNNTDTNAADTPTKEHLETFWSGIWEEQVQHNDKATWITEEETKWRAINEMEFVEITESDITHITSRLHNWKSPGIDKIQNFWYKKLTSLHKPIAKNLTDIVLCKQNIPEFMATGITYMLPKTKNSPQPSQYRPITCLPTIYKILTSAITTKISYHIEHNNIMAEEQKGCRRGHMGCKEQLIIDSAIHKHATAKNRNLHCTYIDYKKAFDSVPHSWLLQILEIYRINPKIIDFLRNIMSQWKTTLQINSTNSTVTTRQIFIKKGIYQGDSLSPLWFCLALNPLSHLLQRCLAGYCFKHTTEQTTISHLIYMDDIKLYAQTQKDMKKLVEATAEFSKDINMQFGLDKCKTLHIIRGKIQPGNYIVNNTDTITAMEPADLYKYLGYAQLKGLDHVRIKGTLTTEYKRRLNAICKSQLSGKHLIKALNTYAIPILTYSFGVIKWTKTDTEQLERTTRTTLTKHNNLHPKSAIERLTIKRQNGGRGLIDIQHLWRKQVSRLKTFFHTKSITSNIHKAIVLNDLNYTPLNLNEQTNIQHTNNDDPQIQKIEEWKKKVLHGRHPHDLEQSHVNTLASNRWLKIGNLFPETEGFIIAIQDQIINTKNYRKYIIKDPSVTNDKCRKCHVQPETIQHITGACTTLTQTDYTHRHNQVANVIHQKLALKYTLINDTNTPYYKYTPQTILENTTHKLYYDRAILTDRTIHYNRPDITLQDKINKVTYLIDIAVPNTHNIQKTITEKISKYAELKDEVTRIWRQEKVYVVPIVLSTTGVIPNHLLHSLKLLNLKETLYITLQKAAILNTCRIVRKFMQIEENDTGFHHNAPLT

SEQ ID NO: 21294 - protein, 834 aa, Cosmia trapezina
MFYRNLHKPDTDTNDENITDAPDQPTKEQLETYWSSIWEEQKQHNDKATWITEEETKWGVIDEMEFTEITEADITHLTGRLHNWKSPGIDKIHNFWYKKLTSLHKPIAKNLTEIILGQQNIPDFIATGITYMLLKTKTSPQPSQYRPITCLPTIYKILTSTITTKINSHIELHNIMAEEQKGCRRGHMGCKEQLIIDSTIHKHATTKNRNLHCTYIDYKKAFDSVPHTWLIQILEIYRVNSKIIDFLRKIMPLWKTTLQINCNQNNVTTRQIAIKKGIYQGDSLSPLWFCLALNPLSHLLQRCRAGYCLKHTTKQTIVSHLIYMDDIKLYAQTEKDMKKLVEATAEFSLDINMQFGLDKCKTLHIIRGNVRPGSYVVNNTDTITAMEPTDLYKYLGYTQLKGLDHVRIKETLTAEYKRRLSAICKTQLSSKNLIKALNTFAIPILTYSFGVIKWTKTDTEQLERTTRTTLTKHNNLHPKSAIERLTIKRQNGGRGLIDIQHLWRKQVCRLKTFFHSKSRTSNIHKAIAQNDFNYTPLNLNEQTDTPQITSDDPQKQKIEDWKKKVLHGRHPHDLEQSHVNKVASNKFLKIGNLFPETEGFIIAIQDQIINTKNYRKFIIKDPSVTNDKCRKCHIQPETIQHITGACTTLTQTDYTHRHNQVANVIHQKLAVKYTLIQNTNTPYYNYTPQTILENDTHKLYYDRAILTDRTIHYNRPDITLVDKINKVTHLIDIAIPNTHNIQKTISEKISKYAELKDEVTRIWRQQKVYVVPIVLSTTGVIPNHLLHSLKLLNLKETLYITLQKAAILNTCRIVRKFMQIDENEVGPHNNTSST

SEQ ID NO: 21295 - protein, 1320 aa, Mesoligia furuncula
METRSKRKRIGPLPGGDRRGALGADAECLSMRTVSGEELNRRAPTDKDTTADIVDDGDRLTDRINTPVEPYSPSTVSYIPSRPSKPSIPSSPCIPSSPPITSSNSVQPNSTLNVTREVSTFLPASTKAGKTRVRMRWSKEVNLFIMRTYLYITKLETDLTTYRKQLHELFTRQYPEITVTEQRISDQRRIIVRNKLLSQDIINQLKEEVRTQLQGESENTAGALTQNITAYNQQEQPCSQIEPIIQSQPITQSQPYFQSQAYSETTHTSTQTESITIMLENEIETLADININQSTDTHIQEIHDKFKTALTQYSGMDPAARPRLPKLRYTPKLSQLVHLFNQNILQQYISEETHLIDIHTLIYCTALVISEELNFKITEYTGNPRQRNINKPAWQQRLEKDIEKLRADCGRLTQYINNNRSNKVVKRVDAIFKNMATHTRHENDNRKPEEFLDTLKQKLALKVHRLRRYKKAQERKRDNSLFATNEKNFYRNLQTAQTDTNTLTAENNIELPTAEQLETFWSGIWEEQVQHNNNSDWITDEVTKWSSLEEMEFVELTESDITCVTARLHNWKSPGIDKIHNYWYKKLESLHKVLAKNLTQIILGKQNIPEFIAIGITYMLPKAQYSPQPSQYRPITCLPTIYKILTSAITTKINKHIENHNIIAEEQKGCRRGHMGCKEQLVIDSIIHKHANTKHRNLHCTYIDYKKAFDSIPHSWLIQILQIYKINSKIIDFLQDIMARWRTTLQLNYRNNAITTRQISIKKGIYQGDSLSPLWFCLALNPLSDLLHRSQAGYAIKHTTEETIISHLIYMDDIKLYSKSEKEMKKLIDITTEFSKDINMQFGLDKCKTVHIIRGKIKPGDYPINNTDTITAMEPTDLYKYLGYRQLKGIDHSTIKYTLNSEYKRRVIAVCKTQLSGKHLIKALNTYAIPILTYSFGVIKWSKTDIQQIERTTRTILTKHNNLHPKSAIERLTIKRQCGGRGLIDVHRLWQKQIAKLRTFFHSKSHTSNIHKAVVMNDISYTPLNLHDQIDIQHTSNEDPHKQKIEDWKKKVLHGRHPHDLEQSHIDTIASNKWLKIGNLFPETEGFIIAIQDQIINTKNYRKFIIKDPTITNDKCRKCHSQPETIQHITGACTTLTQTDYTHRHNQVANVIHQKLALKYKLIQDTNTPYYKYVPQTVLESTTHKLYYDRAILTDKTVHYNRPDITLQDKVNKVTYLIDIAVPNTHNVQKTISEKISKYADLKEEVSRIWRQEKVYVVPIVVSTTGVIPNHLHHSLKQIDLNDSIYITLQKAAILNTCRIVRKFMQIDENEITPHKINSS

SEQ ID NO: 21296 - protein, 1332 aa, Cecropterus dorantes
MAKGNLVVSMRTLGTGGNPVLLTLTTVNAGLCRGRRLKSLAPRGNKMRRSNRIKNKHSAQSKTVAETISHPSSPPSSTQSLFQSPNSSPLSFENRSNPVSRSTTISPISLDIEQTQNITLPASAVAREANAFLPASTKAGKPRIRMKWSQDVNIFIMRTYYHITKLETDMTTYRKTLHELFSNQYPDIIVSEQRVSDQRRMIIKNRYLTQEILDKLKEEVARQLREEENINEVDNGDNHVHVEVNRNILESQTHSQNNSSQSYNLSQSNTQTFIPTSHSSTQTEFITLLLETETEAIADLVPPNDTTFQDMYDKLQTAVTQYSGLDPTARPKLPRIKYTKHLHNLVHIFNQHILHRLISNEMHLNDIHTLIYCTALVIAEALNYKITHNTTHKKPKDYTKPSWQIRLERDIENLRVDIGRLTQYINNNRSDKLVKKVQHIFNRLATHTKHENNNRKPEEFLDTLKQKLALKTHRLKRYKKTQQRKNDNTLFTTNEKLFYRNLCKPKIDFTTKKDNYIKLPSKEELETYWANIWEKNTEHNYKADWITEEQAKWEVIDEMKFERITELDITNATARLHNWKAPGVDKIHNFWYKKLTTLHQPLAKSLTQIILGKQNIPNFITIGITYMLPKTNNSTQPSQYRPITCLPTIYKILTSTITAKINTHIEHYNILAEEQKGCRRGHRGCKEQLVIDSIIHKHATSKHRNLHCTYIDYKKAFDSIPHSWLIKILQIYRIHPIIIDFLRNIMPLWKTTLHLNHGNKSILTRQINIKKGIYQGDSLSPLWFCLALNPLSNLLHNCQTGYRFNNSPEETTFSHLIYMDDIKLYAKTHKDMQKLIDKTTQFSEDINMQFGLDKCKTLHIIKGKVQSGDYRVNDTDVISAMDPTDVYKYLGYNQLKGLIHTHIKHDLTTEFKRRIDAICKTYLSGKHHTKAINTYAIPILTYSFGVIKWSKTDIEQLERITRTTLTRHNHLHPKSAVERLNIRRQDGGRGIIDINYLWQKQINNLRHFFFIKSSTSKFHSVLTHNDKNFTPLNLSDHTNQHTPDDGNPQLQRIEHWKSKVLHGRHPHDLEHTHVDKIASNKWLKVGNLFPETEGFMIAIQDQVINTKNYRKHIIKDPNVKNDKCRRCHTQPETIQHITGACINLTQTDYTHRHNQVTNIIHQNLALKHNLIQNTNTPYYKYTPLTVIENPSHKLYYDRAILTDRTIHYNRPDIILQDKFNKITYLIDIAVPNTHNVQKTIVEKINKYVDLKEEVTRIWKQNKVYVVPIVLSTTGVIPYHLHQSIKIIGLNHSIYIPLQKAAILNTCRIVRKFMQIDEKEVGSQNLNQSIVPP

SEQ ID NO: 21297 - protein, 1172 aa, Noctua janthe
MNFLFVDTQRLISGSSSADDDDPEITVSEQRISDQRRTIVRNKLLSQEEIDKLKVEVRTQLHLESVIDEDTNNIAVTQNTIENIQQEQPQSYDQSEPYTQSQPYYYLSSQAYSQITHTSTQTENVTIMLENDIEVLANINQNPPTDTRIREIHDKFKTALTQYSGMDPAARPKLPKLRYTPKLAQLVHVFNQNILTQYISEDTQLTDVHTLIYCTALVISEELNFKITEYTGNARQSNVNKPAWQQRLEKDIEKLRADCGRLTQYINNNRSNKVVKRVEVIFKNMAVHTRHENHNRRPEEFLDTLKQKLALKVHRLRRYKKAQERKNDNALFATNEKNFYRKLQKPQTDTDTPTTENNIELPTTTQLETFWAGIWEEQIHHKETSEWIQDEETKWSSLEEMEFIELSESDITSVTARLHNWKSPGIDKIHNYWYKKLESLHKILAKNLTEIILGKQNIPEFIATGITYMLPKTHYSSQPSQYRPITCLPTIYKILTSAITTKINKHVEHHNIIAEEQKGCRRGHMGCKEQLVIDSIIHKHAATKNRNLHCTYIDYKKAFDSIPHSWLIQILHIYKINPQIIEFLRNIMSRWKTTLQLNYRNNAVTTRQIAIKKGIYQGDSLSPLWFCLALNPLSHLLQRCQAGYCLKQTTEETTISHLIYMDDIKLYSKTEKEMKKLIDITTEFSKDINMQFGLDKCKTVHIIRGKIKPGDYAINTTDTITAMEPTDLYKYLGYRQLKGLDHTTIKQTLNTEYKRRVVAVCKTQLSGKHLIKALNTYAIPILTYSFGVIKWSKTDIQQIERTTRTTLTKHNNLHPKSAIERLTIKRQNGGRGLIDIHHLWQKQISRLKTFFNSKSHTSNIHKAIVMNDNSYTPLNLNEQTDTQNTNNEDPQKQKLEDWKKKVLHGRHPHDLEQPHIDTLASNKWLKIGSLFPETEGFIIAIQDQIINTKNYRKFIIKDPTMTNDKCRKCHTQPETIQHITGACTTLTQTDYTHRHNQVANIIHQNLARKHKLIQDSNTPYYKYVAQPVVENTTHKLFYDRGILTDRTIHYNRPDIILQDKVNKVTYLIDIAVPNTHNLQKTIGDKISKYAELKEEVTRIWRQEKVYVVPIVVSTTGVIPNHLHHSLKLLDLKDSIYITLQKAAILNTCRIVRKFMQIDENEISHNSHTHTLR

SEQ ID NO: 21298 - protein, 1005 aa, Hydraecia micacea
MDPAARPRLPKLRYTPKLSQLVHLFNQNILQPYISEETRLIDIHTLIYCTALVISEELNFKITEYTGNSRQKNINKPAWQQRLEKDIEKLRADCGRLTQYINNNRSNKVVKRVEAIFKNMATHTRHENDNRKSEEFLDTLKQKLALKVHRLRRYKKAQERKNDNSLFATNEKNFYRNLQTAQTDTNTRTTENNVELPTTEQLETFWSGIWEEQVQHNKNSNWIIDEETKWSSLEEMEFVELTESDITCVTARLHNWKSPGIDKIHNYWYKKLESLHKVLAKNLTQIILGKQNIPEFIATGITYMLPKAQYSPQPSQYRPITCLPTIYKILTAAITRKINKHIEHHNIIAEEQKGCRRGHMGCKEQLVIDSIIHKHAATKHRNLHCTYIDYKKAFDSIPHSWLIQILQIYKINSKIIDFLQDIMARWRTTLQLNYQNNAITTRQISIKKGIYQGDSLSPLWFCLALNPLSDLLHRSQAGYSLKHATEETIISHLIYMDDIKLYSKSEKEMKKLIDITTEFSKDINMQFGLDKCKTVHIIRGKIKPGDYPINNTDTITAMEPTDLYKYLGYKQLKGLDHSTIKYTLNSEYKRRVVAVCKTQLSGKHLIKALNTYAIPILTYSFGVIKWSKTDIQQIERTTRTTLTKHNNLHPKSAIERLTIKRQYGGRGLIDVHHLWQKQIAKLRTFFHSKSHTSNIHKAVVMNDISYTPLNLHEQIDIQHTGDEDPHKQKLEDWKKKVLHGRHPHDLEQSHIDTIASNKWLKIGNLFPETEGFIIAIQDQIINTKNYRKFIIKDPTIINDKCRKCHSQPETIQHITGACTTLTQTDYTHRHNQVANVIHQKLALKYKLIQDTNTPYYKYVPQTVLESTTHKLYYDRAILTDRTVHYNRPDITLKDKVNNITYLIDIAVPNTHNLQKTIGEKISKYAELKDEVTRIWRQEKVYVVPIVVSTTGVIPNHLHHSLKLIDLKDSIYITLQKAAILNTCRIVRKFLQIEENEISPPNNNSS

SEQ ID NO: 21299 - protein, 1323 aa, Thyatira batis
METRSKRIRIGPLPGGDRRGTPGADAGCFSMRTVSGEELNRRAPTDKDTTAENIDDGDRLTDRTNTPAEPYSPSTVSYTPSRTSSPSIPSSPPNRILNTVSPTPTLNVAREVNTFLPVSTKAGKPRVRMSWSKDVNIFIMRTYFRITRLETDLTTYRQQLHELFTQQYPGVTVSEQRISDQRRIIVRNKLLSPEIIKQLKEETRLHLQEELNNTDNIATSLNANETNTQHSQIELTTNTHCQFNYTLTNTQTSHTSTQTESITVMLENEIETIDIPDQNIISNEILQEINNKFRTTLTQYSGMDPAARPKLPKLKYSPKLFRYVNLFNENILNQFASDDTKLIDIHTLIYCTAVVISEELNFKITEHSINSRPKHKTQPSWQQRLERDIEKLRADCGRLTQYINNNSSSNVVRRVEAIFQSSLTHTRHENINRKPEEFLDTLKQKLALKVHRLRRYNKAQQRKNDDALFATNEKLFYRNLHKPHLDNVDTNDTDTNNTDTNTNNTNTNNTTDTPTKEQLETFWSSIWEEQVQHNDKATWITDEETKWKAIDEMEFVEITESDISNITARLHNWKSPGLDKIHNFWYKKLTTLHKALAKNLTEIILEKQNIPEFIATGITYMLPKTKNPLQPSQYRPITCLPTIYKILTSAITEKINTHIEHHKIMAEEQKGCRRGHMGCKEQLIIDSTIHKHATTKNRNLHCTYIDYKKAFDSVPHSWLLQILQIYKINPKIIAFLRNIMSQWKTSLQINTNHNTILTRQISIKKGIYQGDSLSPMWFCLALNPLSHLLQRCEAGYNFKHTINQTKVSHLIYMDDIKLYAQTEKDMKKLVLATSEFSKDINMQFGLDKCKTLHIIRGKVKPGNYNINNTDTIRAMEPADLYKYLGYSQLKGLDHIRIKNTLTTEYKRRLNAICKSQLSGKHLIKALNTYAIPILTYSFGVIKWTKTDTEQLERTTRTTLTKHNNLHPKSAIERLTIKRQNGGRGLIDIQQLWRKQVSRLKTFFHTKSLTSNIHKAIVLNDLNYTPLNLIEQVDTQHTNNEDPQKQKMEDWKKKVLHGRHPHDLQQSHINTIASNKWLKIGNLFPETEGFMIAIQDQIINTKNYRKYIIKDPSVNNDKCRKCHTQPETIQHITGACTTLTQTDYTHRHNQIANIIHQKLALKYTLIQNTNTPYYNYTPQTILENTTHKLYYDRAILTDRTIHYNRPDITLRDKINKVTYLIDIAVPNTHNIQKTITEKLTKYLELKDEVTRIWRQEKVYIVPIVLSTTGVIPNHLLHSLKLIDLHESLYITLQKAAILNTCRIVRKFMQLEEGEIGPHSQNTHT

SEQ ID NO: 21300 - protein, 1319 aa, Thyatira batis
METRSKRIRIGPLPGGDRRGTPGADAGCFSMRTVSGEELNRRAPTDKDTTAENIDDGDRLTDRTNTPAEPYSPSTVSYTPSRTSSPSIPSSPPNRILNTVSPTPTLNVAREVNTFLPVSTKAGKPRVRMSWSKDVNIFIMRTYFRITRLETDLTTYRQQLHELFTQQYPGITVSEQRISDQRRIIVRNKFLSPEIIKQLKDETRLHLQEEQNNTDNIATSLNANETNTQHSQIELTTNTHCQYNYTLTNTQTSHTSTQTESITVMLENDIETIDIPDQNIIPNEILQEINNKFRTTLTQYSGMEPAARPKLPKLKYSPKLFRYVNLFNENILNQFASDDTKLIDIHTLIYCTAVVISEELNFKITEHSINSRPKHKTQPPWQQRLERDIEKLRADCGRLTQYINNNRSSNVVRRVETIFQSSLTHTRHENINRKPEEFLDTLKQKLALKVHRLRRYNKAQQRKNDNALFATNEKLFYRNLHKPHLDNVDTNDTDTNNTDTNTNNNTTDTPTKEQLETFWSSIWEEQVQHNDKATWIIDEETKWKAIDEMEFVEITESDISNITARLHNWKSPGLDKIHNFWYKKLTTLHKALAKNLTEIILEKQNIPEFIATGITYMLPKTKNPLQPSQYRPITCLPTIYKILTSAITAKINTHIEHHKIMAEEQKGCRRGHMGCKEQLIIDSTIHKHATTKNRNLHCTYIDYKKAFDSVPHSWLLQILQIYKINPKIIAFLRNIMSQWKTSLQINTNHNTILTRQISIKKGIYQGDSLSPMWFCLALNPLSHLLQRCQAGYNFKHTINQTKVSHLIYMDDIKLYAQTEKDMKKLVVATSEFSKDINMQFGLDKCKTLHIIRGKVKPGNYNINNTDTITAMEPADLYKYLGYSQLKGLDHIRIKNTLTTEYKRRLNAICKSQLSGKHLIKALNTYAIPILTYSFGVIKWTKTDTEQLERTTRTTLTKHNNLHPKSAIERLTIKRQNGGRGLIDIQQLWRKQVSRLKTFFHTKSLTSNIHKAIVLNDLNYTPLNLIEQVDTQHTNNEDPQKQKMEDWKKKVLHGRHPHDLQQSHINTIASNKWLKIGNLFPETEGFMIAIQDQIINTKNYRKYIIKDPSVNNDKCRKCHTQPETIQHITGACTTLTQTDYTHRHNQIANIIHQKLALKYTLIQNTNTPYYNYTPQSILENTTHKLYYDRAILTDRTIHYNRPDITLRDKINKVTYLIDIAVPNTHNIQKTITEKLTKYLELKDEVTRIWRQEKVYIVPIVLSTTGVIPNHLLHSLKLIDLHESLYITLQKAAILNTCRIVRKFMQLEEGEIGPHSQNTHN

SEQ ID NO: 21301 - protein, 1321 aa, Cosmia trapezina
METRSKRKRIGPLPGGDRRGTPGADAGCLSMRTVSGEELNRRAPTDKDATADIIDDGDRLTDRTNTPVEPYSPSTVSYTPSRPSSPFIPSSPSIPSSPPITSLNSVQPIPTLNVAREVSTFLPASTKVGKARVRMRWSKEVNLFIMRTYLYITKLETDLTTYRKQLHELFTRQYPEITVTEQRISDQRRIIVRNKLLSQDVIDQLKEEVRTQLQGESENTAGAITITLTQNTTAYNQQEQPQPCSQSEPISQSQPYFQSQAYSHTTHTSTQTESITIMLENEIETLADININQFTDTRIQEIHDKFKTALTQYSGMDPAARPKLPKLRYTPKLSQLVHLFNQNILQQYISDDTHLIDVHTLIYCTALVISEELNFKITEYTGNPRQRNANKPAWQQRLEKDIEKLRADCSRLTQFINNNRSKKVVKRVEVIFKNMATHTRHENDNRKPEEFLDTLKQKLALKVHRLRRYKKAQERKNDNSLFATNEKNFYRNLQKPQTDTNTPTTENNVELPTAEQLETFWSGIWEEHVQHKEKSDWITDEETKWSSLEEMEFVELTESDITCITARLHNWKSPGIDKIHNYWYKKLESLHKVLAKNLTEIILGKQNIPEFIATGITYMLPKAQYSSQPSQYRPITCLPTIYKILTSAITTKINKHVENHNIIAEEQKGCRSGHMGCKEQLVIDSIIHKHATTKNRNLHCTYIDYKKAFDSIPHSWLIQILQIYKINSKIIDFLQNIMSRWRTTLQLNYQHNAITTRQISIKKGIYQGDSLSPLWFCLALNPLSNLLHRSQAGYSLKHSTEETIISHLIYMDDIKLYSKSEKDMKKLIDITTEFSKDINMQFGLDKCKTVHIIRGKIKPGDYPINNTDTITAMEPTDLYKYLGYRQLKGLDHSAIKCTLNSEYKRRVVAVCKTQLCGKHLIKALNTYAIPILTYSFGVIKWSKTDIQQIERTTRTTLTKHNNLHPKSAIERLTIKRQNGGRGLIDVHHLWQKQIGKLKTLFNSKSHTSNIHKAVVMNDISYTPLNLHEQIDTQHTSNEDPHKQKLEDWKKKVLHGRHPHDLEQSHIDTIASNKWLKIGNLFPETEGFIIAIQDQIINTKNYRKFIIKDPTITNDKCRKCHSQPETIQHITGACTTLTQTDYTHRHNQVANIIHQKLALKYNLIQDTNTPYYKYIPQTVLESTTHKLYYDRAILTDRTVHYNRPDITLKDKVNKVTYLIDIAVPNTHNLQKTIGEKISKYAELKEEVTRIWRQEKVYIVPIVVSTTGVIPNHLHHSLKLIDLKDSIYITLQKAAILNTCRIVRKFMQIEENEISPHNINSSS

SEQ ID NO: 21302 - protein, 1324 aa, Mesoligia furuncula
METRSKRKRIGPLPGGDRRGALGADAECLSMRTVSGEELNRRAPTDKDATADIIDDGDRLTDRINTPVEPYSPSTVSYTPSRPSTPSIPSSPSIPSSPPITSFNSVQPNSTLNVTREVSTFLPASTKAGKARVRMRWSKEVNLFIMRTYLYITKLETDLTTYRKQLHELFTRQYPEITVTEQRISDQRRIIVRNKLLSQDIINQLKEEVRTQLQGESENTAGAISIALTQNTTAYNQQEQPCSQTEPIIQSQPITQSQPYFQSQAYSETTHTSTQTESITIMLENEIETLADISINQSTDTHIQEIHDKFKTALTQYSGMDPAARPRLPKLRYTPKLSQLVHLFNQNILQQYISEETHLIDIHTLIYCTALVISEELNFKITEYTGNSRQRNINKPAWQQRLEKDIEKLRADCGRLTQYINNNRSNKVVKRVDAIFKNMATHTRHENDNRKPEEFLDTLKQKLALKVHRLRRYKKAQERKHDNSLFATSEKNFYRNLQTAQTNTNTMTTENNIELPTAEQLETFWSGIWEEQVQHNNNSDWITDEETKWSSLEEMEFVELTESDITCVTARLHNWKSPGIDKIHNFWYKKLESLHKVLAKNLTQIILGKQNIPEFLATGITYMLPKAQYSSQPSQYRPITCLPTIYKILTSAITTKINKHIENHNIIAEEQKGCRRGHMGCKEQLVIDSIIHKHANTKHRNLHCTYIDYKKAFDSIPHSWLIQILQIYKINSKIIDFLQDIMARWRTTLQLNYRNNAITTRQISIKKGIYQGDSLSPLWFCLALNPLSDLLHRSQAGYSMKHTTEETIISHLIYMDDIKLYSKSEKEMKKLIDITTEFSKDINMQFGLDKCKTVHIIRGKIKPGDYPINNTDTITAMEPTDLYKYLGYKQLKGLDHSTIKYTLNSEYKRRVVAVCKTQLSGKHLIKALNTYAIPILTYSFGVVKWSKTDIQQIERTTRTTLTKHNNLHPKSAIERLTIKRQYGGRGLIDVHHLWQKQIAKLRTFFHSKSQTSNIHKAVVMNDISYTPLNLHDQIDTQHTSHEDPHKQKVEDWKKKVLHGRHPHDLEQSHIDTIASNKWLKIGNLFPETEGFIIAIQDQIINTKNYRKFIIKDPTITNDKCRKCHSQPETIQHITGACTTLTQTDYTHRHNQVANVIHQKLALKYKLVQDTNTPYYKYVPQTVLENTTHKLYYDRAILTDRTVHYNRPDITLQDKVNKVTYLIDIAVPNTHNLQKTIGEKISKYVELKEEVSRIWRQEKVYVVPIVVSTTGVIPNHLHHSLKQIDLKDSIYITLQKAAILNTCRIVRKFMQIDENEISPHNINSS

SEQ ID NO: 21303 - protein, 1005 aa, Mesoligia furuncula
MDPAARPRLPKLRYTPKLSQLVHLFNQNILQQYISEETHLIDIHTLIYCTALVISEELNFKITEYTGNPRQRNINKPAWQQRLEKDIEKLRADCGRLTQYINNNRSNKVVKRVDAIFKNMATHTRHENDNRKPEEFLDTLKQKLALKVHRLRRYKKAQERKHDNSLFATNEKNFYRNLQTAQTDTNTLTTENNIELPTAEQLETFWSGIWEEQVQHNNNSDWITDEETKWSSLEEMEFVELTESDITCVTARLHNWKSPGIDKIHNYWYKKLESLHKVLAKNLTQIILGKQNIPEFIATGITYMLPKAQYSPQPSQYRPITCLPTIYKILTSAITTKINKHIENHNIIAEEQKGCRRGHMGCKEQLVIDSIIHKHANTKHRNLHCTYIDYKKAFDSIPHSWLIQILQIYKINSKIIDFLQDIMARWRTTLQLNYRNNAITTRQISIKKGIYHGDSLSPLWFCLALNPLSDLLHRSQAGYTIKHTTEETIISHLIYMDDIKLYSKSEKEMKKLIDITTEFSKDINMQFGLDKCKTVHIIRGKIKPGDYPINNTDTITAMEPTDLYKYLGYRQLKGIDHSTIKYTLNSEYKRRVIAVCKTQLSGKHLIKALNTYAIPILTYSFGVIKWSKTDIQQIERKTRTILTKHNNLHPKSAIERLTIKRQCGGRGLIDVHRLWQKQIAKLRTFFHSKSHTSNIHKAVVMNDISYTPLNLHDQIDIQHTSNEDPHKQKIEDWKKKVLHGRHPHDLEQSHIDTIASNKWLKIGNLFPETEGFIIAIQDQIINTKNYRKFIIKDPAITNDKCRKCHSQPETIQHITGACTTLTQTDYTHRHNQVANVIHQKLALKYKLIQDTNTPYYKYVPQTVLESTTHKLYYDRAILTDKTVHYNRPDITLQDKVNKVTYLIDIAVPNTHNVQKTISEKISKYADLKEEVSRIWRQEKVYVVPIVVSTTGVIPNHLHHSLKQIDLNDSIYITLQNAAILNTCRIVRKFMQIDENEITPHNINSS

SEQ ID NO: 21304 - protein, 1309 aa, Hemaris fuciformis
METRSKKKLRGPLPGGDRRGTPGADAGCYSMQTVSGEELSRRAPTGSPESITAANLTDRQTDSRSNSPSEPYSPSTKSYTPSICSSSSRSPPSLTNKIREPSIPDLDAAREVNRPFLPMSTKAGKPRVRMSWSRDVNLFIMRTYYYITKLETDMTIYRKHLHEHFSQRYPDVTVSEQRLSDQRRAIVRNNLLPQEVLDQLKTDVRKQLEEESMINDDTEVICRNQSPLPHPHTSNSNTPHLSLIQIQPITQENQNQCSQITHTSTQTETVILTLENEIDNMPEPNIPTDIHIQTIQDKFTATLTLYSGLDPTLRPKLPKLKYTSKLTSLINIFNQSILNNFISETTKLLDIHTIIYCTAYVIAEELDFKINEQRVGHIKPGKNNKPPWQYRLEKDIEKIRADCGRLTQYINNNRSKKVIKKVEEIFKKYTTHTRHENNNKKPEEFLDTLKQKLAVKAQRLKRYKKAQERRKDNVLFAKNEKMFYRQLRNPHTNIKTNIHNENNISTPKKEALEAFWAKVWEEQIQHNDEANWIKEEENMWSEVEEMEFTEVTEADIKLITNRLHNWKSPGIDKIHNFWYKKLTSLHKAIAQNFTDIILRKQALPHFLATGITYMLPKDKFSPDPSNYRPITCLPTIYKILTSVITSKINTHVENHNIIAEEQKRCRRGHMGCKEQLVIDSTIHKHASTKSRNLHCTYIDYKKAFDSIPHSWLIQILKIYKINSVIIEFLQNIMLNWKTTLHLYNVNDPIITRQISIRKGIFQGDSLSPLWFCLALNPLSHILQRSRAGYHLKHNSEETNISHLIYMDDVKLYSKNEKDMNKLIEATLKFSKDINMHFSLDKCKTVHIIRGKIRPGDYTLNNTDLITAMEPTDLYKYLGYKQLKGIDHKNIKHTLSGEYRRRVNAICKTQLSAKNLIKALNTYAIPILTYSFGVIKWSKSNIEQIERLTRTTLTKHKYLHPKSAVERTTIKREAGGRGLIDIYNLWQKQIYNLKLFFREKSRTSNIHNAICQNDNNFTPLNLCEPPNPPNPNNIDRQQQKIEDWKKKVLHGRHPHDLEQPHIDKIGSNKWLKIGGLFPETEGFLIAIQDQVINTKNYRKFIIKDPTMINDKCRRCHTQPETIQHITGACICLTQTDYTHRHNQISNIIHQTLALKYNLIQSSKTPYYKYTPETILENALYKLYYDRAILTDRTIHYNRPDITLQDKRNKTTYLIDIAVPNTHNIQKTIAEKNNKYTDLKNEVIRIWKQEKVYVVPIVLSTTGVIPKHLHHSLKLLNLNKSLYITLQKAAILNTCRIVRKFMEIDETVSHS

SEQ ID NO: 21305 - protein, 1318 aa, Agrochola circellaris
METRSKRKRIGPLPGGDRRGAPGADAGCLSMRTVSGEELNRRAPTDKDATAEADDGDRLTNRTDTPVEPYSPSTVSYAPSRTSSPSIPSSPIPSSPPIPSFNTVTSTPALNVAREVSTFLPASTKAGKSRVRMRWSKEVNLFIMRTYLYITKLETDMTTYRQQLHELFTRQYPEITVTEQRISDQRRAIVRNKLLSKEIIDQLKDEVRTQLLEESENIEGAITIALTQNAIEHNPQEQPQPYTQPQPILQSQPYFQSHAYSQTTHTSTQTESITIMLENEIETLVDNNQNQSTDTRSQEIHDKFKTALTQYSGMDPATRPKLPKLRYTPKLFHLVNLFNQNILNQYISEETQLIDVHTLIYCTALVISEELNFKITEFTGNTRQRNVNKPAWQQRLEKDIEKLRADCSRLTHYINNNRSNKVVKRVETIFKNMSNHTRHENDNRKPEEFLDTLKQKLALKVHRLRRYKKAQERKNDNSLFASNEKNFYRKLQTPQTDTETPTAENNIELPTAKQLETFWSSLWEEQVQHNAQSDWISDEETKWSSLEEMEFVELTESDIGSITARLHNWKSPGIDKIHNYWYKKLDSLHKVLAKNLTEIILGKQNIPEFIATGITYMLPKKQYSPQPSQYRPITCLPTIYKILTSAITTKINKHIENHNIVAEEQKGCRRGHMGCKEQLVIDSIIHKHAATKNRNLHCTYIDYKKAFDSIPHSWLIQILQIYKINSKIIDFLQNIMSRWKTTLQLNYRHNTITTQQISIKKGIYQGDSLSPLWFCLALNPLSHLLHRCQAGYSLKHSTEETVISHLIYMDDIKLYAKSEKEMKKLIDITTEFSKDINMQFGLDKCKTIHIIRGKIKPGDYPVNNTDTITAMEQTDLYKYLGYNQLKGIDHTAIKHTLNTEYKRRVIAVCKTQLSGKHLIKALNTYAIPILTYSFGVIKWSKTDIQQIERSTRTTLTKHNNLHPKSAIERLTIKRQYGGRGLIDVHNLWQKQIAKLRTFFHSKSHTSNIHKAVIMNDIRYTPLNLHEQIDTQDTSNNDPHKQKIEDWKKKVLHGRHPHDLEQSHIDAIASNKWLKIGNLFPETEGFIIAIQDQIINTKNYRKFIIKDPTITNDKCRKCHSQPETIQHITGACTTLTQTDYTHRHNQVANVIHQKLALKYKLIQDTNTPYYKYIPQIILENTTHKLYYDRAILTDRTVHYNRPDITLQDKVNKVTYLIDIAVPNTHNLQKTIGEKISKYAELKEEVTRIWRQEKVFVVPIVVSTTGVIPNHLHHSLKLIDLKDSIYITLQKAAILNTCRIVRKFMQIEENEITPHNINFT

SEQ ID NO: 21306 - protein, 1309 aa, Hydraecia micacea
METRSKRKRIGPLPGGDRRGTLGADAECFSMRTVSGEELNRRAPTDKDATAEVIDDGDRLTNRTDTPVEPYSPSTVSYAPSRTSSPSIPSSPIPSSSPIASFNTVSSTPALNVAREVSTFLPASTKAGKRRVRMRWSKEVNLFIMRTYLYITKLETDMTTYRQQLHERFSRQYPEISVSEQRISDQRRTIVRNKLLSQVELDQLKEEVSTQLQQESENYADTNTIILTQNTNINILQEQPQSFTQLHPNSQSLTYNQSQAYTQTTHTSTQTESLTLTLENDIETLVDADQNLATDTYIQEIQDKFRTTITQYSGMDPAVRPKLPKLKYTRNLFRLVNLFNKNILVPFISDDTQLIDIHLLIYCTAVVISEELNFKITDHTVTTRTNRIVKPAWQQRLEKDVEKLRADCGRLTQYINGIRSNKVVKRVETIFKNYSNHTRHESNNRKHEEFLDTLKQKLALKVHRLRRYMKAQQRKNDNATFAMNEKAFYRNIQKTHSDTTIENNTDAPSKEQLESYWSSIWEEQVQHNDKASWIAEEEAKWRAIDEMDFEEVAESDITHITARLHNWKSPGVDKIHNFWYKKLTSLHKSIAKNLTDIILGQQNTPEFIATGITYMLPKTKSSSQPSQYRPITCLPTIYKILTSAITKKISSHIENHNIIAEEQKGCRQGHMGCKEQLIIDSTIHKHATSKNRNLHCTYIDYKKAFDSVPHSWLIQILEIYRINPKIINFMRHIMLQWKTTLQINSNHSTVTTRQISIKKGIYQGDSLSPLWFCLALNPLSHLLQACRAGYCLKHNTEETTISHLIYMDDIKLYGKTEKDMKKLVEITAEFSKDINMQFGLDKCKTLHIIRGKVRPGDYAVNDTDTITAMEPSDLYKYLGYTQLKGLDHIRIKNTLTTEYKRRLNAVCKTQLSGKHLIKALNTFAIPVLTYSFGVIKWTKTDTEKLERTTRTTLTKHNNLHPKSAIERLTIKRQNGGRGLIDIQHLCRKQVSCLKTFFHTKSRTSNIHKAIVINDLNYTPLNLSDQIETQNTTNDDPQKQKIEEWKKKVLHGRHPHDLEQSHINQLASNKWLKIGNLFPETEGFIIAIQDQIINTKNYRKFIIKDPTITNDKCRKCHIQSETIQHITGTCTTLTQTDYTHRHNQVANIIHQKLALKHSLIQNSCTPYYKYTPQTILENDTHKMYYDRAILTDRTIHYNRPDITLQDKIRKITYLIDIAVPNTHNLQKTISEKISKYAELKEEVTRIWRQEKVYVIPIVLSTTGVIPNHLLRSLKLIDLEESVYINLQKAAILNTCRIVRKFMQLEEENTP

SEQ ID NO: 21307 - protein, 1182 aa, Eupsilia transversa
MRWSKEVNLFIMRTYFYITKLETDMTTYRQQLHELFSQQYPEITVSEQRISDQRRAIVRNKLLSQEIIEQLKEETRIKLQETENNTGANAILLSQNITEIAEQPHTQVESYTQSQSYNQTQAYTQTSHTSTQTESITLTLENDIETLTVPDQNLTTDIYIQEIHDKFRTTLAQYSGMDPTVRPKLPKLRYSPNLFRLVNLFNENILNQFISDDTQLIDIHTLIYCTAVVVSEELNFKITQHTGNTRPKQNIKPAWQQRLEKDIEKLRADCSRLTQYINNIRSSKVVRRVEAIFRSSPTHTRHENNNRKPEEFLDTLKQKLSLKVHRLRRYKKAQQRKNDNAIFATNEKMFYRNLHKLDTDTNDENNTDAANQPTKEQLETYWGNIWEEQQQHKDKATWITEEETKWRAIDEMEFVEITEADITHLTGRLHNWKSPGIDKIHNFWYKKLTSLYKPIAKNLTEIILGQQNIPDFIATGITYMLPKTKNSPQPSQYRPITCLPTIYKILTSAITTKINSHIEHHNIMAEEQKGCRRGHMGCKEQLIIDSTIHKHAATKNRNLHCTYIDYKKAFDSVPHSWLIHILEIYRINSKIIDFLRNIMPLWKTTLQLNCNQNNVTTRQIFIKKGIYQGDSLSPLWFCLALNPLSHLLQRCRAGYCLKHTIEQTTVSHLIYMDDIKLYAQTEKDMKKLVEATAEFSLDINMQFGLDKCKTLHIIRGKIRPGNYVVNNTDTITAMESTDLYKYLGYTQLKGLDHVRIKETLTAEYKRRLNAICKTQLSGKNLIKALNTFAIPILTYSFGVIKWTKTDTEQLERTTRTTLTKHNKLHPKSAIERLTIKRQNGGRGLIDIQHLWRKQVSRLKTFFHSKSRTSNIHKAIAQNDFNYTPLNLNEQPDTPEITCDDPQTQKIEDWKKKVLHGRHPHDLEQSHVNKVASNKFLKIGNLFPETEGFIIAIQDQIINTKNYRKFIIKDPSVTNDKCRKCHIQSETIQHITGACITLTQTDYTHRHNQVANVIHQKLALKYTLIQDTNTPYYNYTPQTILENDTHKLYYDRAILTDRTIHYNRPDITLRDKINKVTYLIDIAVPNTHNIQKTITEKISKYAELKDEVARIWRQEKVYVVPIVLSTTGVIPNHLLHSLKLLNLKETLYITLQKAAILNTCRIVRKFMQIDENEIGPHHNTSVT

SEQ ID NO: 21308 - protein, 1317 aa, Noctua pronuba
METRSKRKRIGPLPGGDRRGAPGADAGCHSMRTVSGEELNRRAPTDKDTTAEIIDDGDRLTDRTDTPVEPFSPSTVSYTPSRRSSPSIPSSPTLLSPPIFTLNTVPPTPTLNAARGVSTFLPASTKAGKARVRMKWSKEVNLFIMRTYLYITKLETDMTTYRQQLHSLFTRQYPDITVSEQRISDQRRTIVRNKLLSQEVIDQLKEEVRTQLQQEETLNYTDTNNITQNVNEIYHQEQPQLLSQSQLIYSQSQPYNQSQAYTQISHTSTQTESITLTLENDIETIVVPDQHLTTDAYIQEINDKFRTTITQYSGMDPAARPRLPKLKYTPNLFRLVNLFNESILTQFITDDTQLIDIHLLIYCTAVVISEELNFKITNHTGTPRTRQNLIPAWQQRLENDIEKLRADIGRLTQYINGCRSNKLVKRVEAIFRNNLTHTRHEKNNRKPEEFLDTLKQKLALKVHRLRRYKKAQQRKKDNTTFATNEKMFYRNLHKPQTDTIDENNKNTPNIPTKEQLEEYWASIWEEPVQHNDKASWIAQEEVKWRAVDEMEFVEVAETDITHITARLHNWKSPGIDKIHNFWYKKLTSLHKPLAKNLTDIILRQQNTPEFIATGITYMLPKTKNSPQPSQYRPITCLPTIYKILTSAITKKISSHIEHHNIIAEEQKGCRQGHMGCKEQLIIDSTIHKHATTKNRNLHCTYIDYKKAFDSVPHSWLIQILEIYRINPKIIDFIRHIMLQWKTTLQINYNHSAVTTRQISIKKGIYQGDSLSPLWFCLALNPLSHLLQGCGAGYCLKHTTDETTISHLIYMDDIKLYAKTENDMKKLVDVTAEFSKDINMQFGLEKCKTLHIVRGKVRPGDYVVNDTDTISAMEQTDLYKYLGYAQLKGLDHTRIKNTLTNEYKRRVNAVCKTQLSGKHLIKALNTFAIPVLTYSFGVIKWSKTDTEQLERTTRTTLTKHNNLHPKSAIERLTIKRQHGGRGLIDIQHLWRKQVSRLKSFFHSKSRSSSIHKAIVINDLNYTPLNLSHQTETLNTTNDDPQQHKMEDWKRKVLHGRHPHDLEQSHINKLASNKWLKIGNLFPETEGFIIAIQDQIINTKNYRKYIIKDPTVTNDKCRKCHSQPETIQHITGACTTLTQTDYTHRHNQVANVIHQKLALKHTLIQNTSTPYYNYKPEVTLENTTHKIYYDRAILTDKTIHYNRPDIILQDKINKVTYLIDIAVPNTHNIQKTITEKISKYAELKDEVTRIWRQEKVYVVPIVLSTTGVIPNHLLHSLKLLDLKESIYIILQKAAILNTCRIVRKFMQIEENEIGPHHNT

SEQ ID NO: 21309 - protein, 1280 aa, Autographa pulchrina
METRSKKKRIGPLPGGYRRGTPGADAGCLSMRSVSGEELSRRAPIDKDTTAETSDEIDRLTDGTISPVEPFSPSTIFYTPSLASSPAVSNSDILPTPTLDVAREVNTFLPASTKAGKQRVRMRWSKEVNLFIMRTYYYITKLETDMTIYRKVLHELFSQKYPEISVSEQRVSDQRRTIVRNKLLSQAELDRLKNEVRAQLEECANEIPLVQENTEDLSIPLPNSTQLNLNTQTLTQNYLTSHIGTQTESLILTIENDINTFVEPDPLPDPCTEDILEKLKTALVLYSGMDPVSRPKLPKLKYSPKLMQLVVLFNNSILSNFVSEDTQLVDLNTLIYCTALVISEELNYKVTEYAGNTRPKHNNKPAWQIRLERDIEKLRADCGRLTQYINNNRSNKVIKRVEAIFKSRITHTRHENDNRKPEEFLDTLKQKLALKVHRLKRYKKAQQRKNDNIVFSTNEKMFYRNLSKPQSESIAQDNDELPTKESLENFWSGIWEQQVQYNDNAEWIRQEEAKWIAIEEMGFADITETDILNITVKLHNWKSPGVDKIHNYWYKKLVTLHKILAKNLTDVILGRQIIPDFLATGVTYMLPKGKHSAEPSQYRPITCLPTVYKILTSVITSKINKHIEHHNIIAEEQKGCRRNHMGCKEQLIIDSTIHKHASTKNRNLHCTYIDYQKAFDSIPHAWLVKILEIYKINFKIIEFLSSIMTRWKTTLQLNYNRNTIISRQISIRKGIYQGDSLSPLWFCLALNPLSSMQHRNRVGYCLKHSTREVIISHLIYMDDIKLYSKSEQDMKKLIDTTTLFSNDINMQFGLDKCKTLHIIRGKIKPGDYPVNVTDCITAMEPTDLYKYLGYKQLKGLDHTSIKGTLDTEYRRRVNALCKSHLAGKHLIKAINTYAIPILTYSFGVIKWTKTDIEQIERTTRTTLTKHNNLHPKSAIERLTIKRQDGGRGLIDIHHLWQKQINRLKSFFLTKSNTSDVHKAIAQNDDNYTPLNLNDQTEIPNICNDEPQKQKMETWKKKVLHGRHPHDLEQPHVDTTASNKWLKVGNLFPETEGFILAIQDQIINTKNYRKYIIKDPKVINDKCRKCHTQPETIQHITGACTSLTQTDYTHRHNQVVNIIHQQLALKYKLIENNKTPYYKYTPQTVLENGTHKLYYDRAILTDKTIHYNRPDITLQDKESKTTYLIDIAVPNTHNLQKTIAEKISKYAELKEEVARIWRQDKVVVVPIVLSSTGVIPNNLHNSLKVIALNKSIYITLQKAAILNTCRIVRKFLSLEDN

SEQ ID NO: 21310 - protein, 993 aa, Autographa pulchrina
MDPVSRPKLPKLKYSPKLLQLVLLFNNSILSNFVSEDTQLVDLNTLIYCTALVISEELNYKVTEYAGNTRPKHNNKPAWQVRLERDIEKLRADCGRLTQYINNNRSNKVIKRVEAIFKSRIMHTRHETDNRKPEEFLDTLKQKLALKVHRLKRYKKAQQRKNDNIIFNSNEKMFYRNLLKPQSESIAQDNVEMPTKESLENFWSGIWEEQVQYNDNAEWIRQEETKWIAIEEMGFAEITETDILNITVRLHNWKSPGVDKIHNYWYKKLVILHKILAKNLTDVIIGRQIIPDFLATGVTYMLPKGKHSAEPSQYRPITCLPTLYKILTSALTSKINKHIEHHNIIAEEQKGCRRNHMGCKEQLIIDSTIHKHASTKNRNLHCTYIDYQKAFDSIPHSWLIKVLQIYKVNFKIIQFLSSIMNRWKTTLQLNCNRTSVTSRQISIRKGIYQGDSLSPLWFCLALNPLSSMLHRNRVGYCFKHSAQEVIISHLIYMDDIKLYSKSEHDMKKLLDTTTLFSNDINMQFGLDKCKTLHIVRGKIKPGDYPVNSIECITAMEPTDLYKYLGYKQLKGLDHTSIKSTLDTEYKRRVNTLCKSHLAGKHLIKAINTYAIPILTYSFGVIKWTKTDIEQIERTTRTTLTKHNNLHPKSAIERLTIKRQDGGRGLIDIHHLWQKQISRLKSFFLTKSNTSDIHKAIAQNDDNYTPLNLNDQTETLNISSSDPQKQKMETWKKKVLHGRHPHDLEQPHVDKIASNKWLKVGNLFPETEGFILAIQDQIINTKNYRKYIIKDPTVTNDKCRKCHTQPETIQHITGACTSLTQTDYTHRHNQVVNIIHQQLALKYKLIENNKTPYYKYTPQTVLENGTHKLYYDRAILTDKTIHYNRPDITLQDKENKTTYLIDIAVPNTHNLQKTMAEKISKYAELKEEVARIWRQDKVVVVPIVLSSTGVIPNNLHNSLKVIELNESTYITLQKAAILNTCRIVRKFLSLEDNN

SEQ ID NO: 21311 - protein, 1317 aa, Cosmia trapezina
METRSKRKRLGPLPGGDRRGTPGADAGCLSMRTVSGEELNRRAPTDKDATAEIIDDGDRLTDRTNTPIEPFSPSTISYTPSRPSSPSLPSSPIALSHHISSLNSIPPTPTLNVAREVSSFLPASTKAGKARVRMRWSKEVNLFIMRTYFYVTKLETDMTTYRQQLHELFTRHYPEITVSEQRISDQRRAIVRNKLLSHEIIEQLKEETRIQLQEAENNTGANAIPLSQNITETAEQSHAQPHTQVEPYTQSQSYNQSQAYTQTSHTSTQTESITLTLENDIETLTVADQYLTTDVYIQEIHDKFRTTLAQYSGMDPVVRPKLPKLRYSPNLFRLVNLFNENILNQFISDDTQLIDIHTLVYCTAVVVSEELNFKITQHTGNTRPKQNIKPAWQQRLEKDIEKLRADCSRLTQYINNIRSNKVVRRVEAIFRNNVTHTRHENNNRKPEEFLDTLKQKLSLKVHRLRRYKKAQQRKNDNALFATNEKMFYRNLHKPDTDTNDENITDAPDQPTKEQLETYWSSIWEEQKQHNDKATWITEEETKWGAIDEMEFTEITEADITHLTGRLHNWKSPGIDKIHNFWYKKLTSLHKPIAKNLTEIILGQQNIPDFIATGITYMLPKTKTSPQPSQYRPITCLPTIYKILTSTITTKINSHIELHNIMAEEQKGCRRGHMGCKEQLIIDSTIHKHATTKNRNLHCTYIDYKKAFDSVPHTWLIQILEIYRVNSKIIDFLRKIMPLWKTTLQINCNQNNVTTRQIAIKKGIYQGDSLSPLWFCLALNPLSHLLQRCRAGYCLKHTTEQTIVSHLIYMDDIKLYAQTEKDMKKLVEATAEFSLDINMQFGLDKCKTLHIIRGNVRPGSYVVNNTDTITAMEPTDLYKYLGYTQLKGLDHVRIKETLSAEYKRRLSAICKTQLSSKNLIKALNTFAIPILTYSFGVIKWTKTDTEQLERTTRTTLTKHNNLHPKSAIERLTIKRQNGGRGLIDIQHLWRKQVCRLKTFFHSKSRTSNIHKAIAQNDFNYTPLNLNEQTDTPQITSDDPQKQKIEDWKKKVLHGRHPHDLEQSHVNKVASNKFLKIGNLFPETEGFIIAIQDQIINTKNYRKFIIKDPSVTNDKCRKCHIQPETIQHITGACTTLTQTDYTHRHNQVANVIHQKLAVKYTLIQNTNTPYYNYTPQTILENDTHKLYYDRAILTDRTIHYNRPDITLVDKINKVTHLIDIAIPNTHNIQKTISEKISKYAELKDEVTRIWRQQKVYVVPIVLSTTGVIPNHLLHSLKLLNLKETLYITLQKAAILNTCRIVRKFMQIDENEVGPHNNTS

SEQ ID NO: 21312 - protein, 1317 aa, Noctua fimbriata
METRSKKKRIGPLPGGDRRGAPGADAGCLSMRTVSGEELNRRAPTDKDTTAEIIDDGDRLTDRTDTPVEPYSPSTVSYTPSRRSSPSIPSSPTPLSPPIITLNTISPTPTLNAARGVSTLLPASTKAGKARVRMKWSKEVNLFIMRTYLHITKLETDMTTYRQQLHALFTRQYPDITVSEQRISDQRRTIVRNKLLSQEVIDQLKEEVRTQLLHEETVNYTDTNNITQNLSEISHQEQPQSLSQSQIIYTQSQPYNQSQAYTQISHTSTQTESITLTLENDIETIVVPDQYLTTDIYIQEIKDKFRTTITQYSGMDPAARPRLPKLKYTPNLFRLVNLFNESILTHFISDDTQLIDIHLLIYCTAVVISEELNFKITDHTRATRTRQNVAPAWQQRLEKGIEKLRSDIGRLTQYINGCRSNKLVKRVEVIFRNNGTHTRHELNNRKPEEFLDTLKQKLALKVHRLKRYKKAQQRKNDNAIFTTNEKIFYRNLHNPKNDRNYENNTNTPNLPSKEQLETYWASIWEEQKQHNDKASWIVDEEEKWRDINVMEFVEVTESDIIHITTRLHNWKAPGIDKIYNFWYKKLTTLHKSIAKNLTDIILGQQNIPEFITTGITYMLPKTKHTPEPSQYRPITCLPTIYKILTSAVTKKINSHIIHHNIIAEEQKGCRQGHMGCKEQLIIDSTIHKHATSKNRNLHCTYIDYKKAFDSVPHSWLIQILEIYRVNPKIIDFMRHVMLQWKTTLQINSNNNNVTTRQISIKKGIYQGDSLSPLWFCLALNPLSHLLQRCGAGYCLKHSTDETTISHLIYMDDIKLYAKSEKDMKKLVDITAEFSKDINMQFGLEKCKTLHIVRGKVRPGDYAVNKSDSITALEPTDLYKYLGYTQLKGLDHVKIKNTLTAEYKKRVNAVCKTQLSGKHLIKALNTFAIPVLTYSFGVIKWTKTDTEQLQRTTRTTLTKHNNLHPKSAIERLTIKREHGGRGLIDIQHLWRKQVSRLKLFFHTKSRTSNIHKAIVTNDLNYTPLNLSDQIETQNTTNDDQQIQKIEDWKRKVLHGRHPHDLEQSHINKLASNKWLKIGNLFPETEGFIIAIQDQIINTKNYRKYIIKDPTLTNDKCRKCHVHPETIQHITGACTTLTQTDYTHRHNQVANVIHQKLALKHTLIQNTNTPYYNYKPETTLENTTHKLYYDRAILTDRTIHYNRPDIILQDKLNKITYLIDIAVPNTHNIQKTITEKISKYAELKEEVTRIWRQEKVYVVPIVLSTTGVIPNHLIHSLKLLDLKETLYITLQKAAILNTCRIVRKFMQIEENEIGPHHNT

SEQ ID NO: 21313 - protein, 1317 aa, Noctua fimbriata
METRSKKKRIGPLPGGDRRGAPGADAGCLSMRTVSGEELNRRAPTDKDTTAEIIDDGDRLTDRTDTPVEPYSPSTVSYTPSRRSSPSIPSSPTPLSPPIITLNTISPTPTLNAARGVSTFLPASTKAGKARVRMKWSKEVNLFIMRTYLHITKLETDMTTHRQQLHALFTRQYPDITVSEQRISDQRRTIVRNKLLSQEVIDQLKEEVRTQLLHEETVNYTDTNNITQNLSEISHQEQPQSLSQSQIIYTQSQPYNQSQAYTQISHTSTQTESITLTLENDIETIVVPDQHLTTDIYIQEINDKFRTTITQYSGMDPAARPRLPKLKYTPNLFRLVNLFNESILTQFISDDTQLIDIHLLIYCTAVVISEELNFKITDHTRATRTRQNVAPAWQQRLEKGIEKLRADIGRLTQYINGCRSNKLVKRVEVIFRNNATHTRHEQNNRKPEEFLDTLKQKLALKVHRLKRYKKAQQRKNDNAIFTTNEKIFYRNLHNPKNDRNYENNTNTPNLPSKEQLETYWASIWEEQKQHNDKASWIVDEEEKWRDIDVMKFVEVTESDIIHITTRLHNWKAPGIDKIHNFWYKKLTILHKSIAKNLTDIILGQQNIPEFITTGITYMLPKTKYTSEPSQYRPITCLPTIYKILTSAVTKKINSHIIHHNIIAEEQKGCRQGHMGCKEQLIIDSTIHKHATSKNRNLHCTYIDYKKAFDSVPHSWLIQILDIYRVNPKIIDFMRHVMLQWKTTLQINSNNNNVTTRQISIKKGIYQGDSLSPLWFCLALNPLSHLLQRCGAGYCLKHSTDETTISHLIYMDDIKLYAKSEKDMKKLVDTTAEFSKDINMQFGLEKCKTLHIVRGKVRPGDYAVNESDSITALEPTDLYKYLGYTQLKGLDHVKIKNTLTAEYKKRVNAVCKTQLSGKHLIKALNTFAIPVLTYSFGVIKWTKTDTEQLQRTTRTTLTKHNNLHPKSAIERLTIKREHGGRGLIDIQHLWRKQVSRLKLFFHTKSRTSNIHKAIVTNDLNYTPLNLSDQIETQNTTNDDQQIQKIEDWKRKVLHGRHPHNLEQSHINKLASNKWLKIGNLFPETEGFIIAIQDQIINTKNYRKYIIKDPTLTNDKCRKCHVHPETIQHITGACTTLTQTDYTHRHNQVANVIHQKLALKHTLIQNTNTPYYNYKPETTLENTTHKLYYDRAILTDRTIHYNRPDIILQDKLNKVTYLIDIAVPNTHNIQKTITEKISKYAELKEEVTRIWRQEKVYVVPIVLSTTGVIPNHLIHSLKLLDLKETLYITLQKAAILNTCRIVRKFMQIEENEIGPHHNT

SEQ ID NO: 21314 - protein, 1282 aa, Autographa gamma
METRSKKKRIGPLPGGYRRGTPGADAGCLSMRSVSGEELSRRAPIDKDTTAETSDEIDRLTDRTISPVEPFSPSTISYTPSLASSPVTISISDILSTPTLDVAREVNTFLPASTKAGKQRVRMRWSKEVNLFIMRTYYYITKLETDMTIYRKVLHELFSQKYPEISVSEQRVSDQRRTIVRNKLLSQAELDTLKNEVRAQLEECANEIPLAQGNTEDLSINIPTSTQLNLNTQTLTQNYLTSHIGTQTESLTLTIENDINTFVEPDPLPNPSTEDILEKLKTALVLYSGMDPVSRPKLPKLKYSPKLMQLVVLFNNNILSNLVSEDTQFADLNTLIYCTALVISEELNYKITEYVGNTRPKHNNKPAWQIRLERDIEKLRADCGRLTQYINNNRSNKVIKRVEAIFKSRITHTRHENDNRKPEEFLDTLKQKLALKVHRLKRYTKAQQRKNDNIVFSTNEKMFYRNLSKPQSESIAQDNAELPTKESLENFWSGLWEQQVQYNDSAEWIRQEEAKWIAIEEMGFADITETDILNITVRLHNWKSPGVDKIHNYWYKKLVTLHKILAKNLTDVILGRQIIPDFLATGVTYMLPKGKHSAEPSQYRPITCLPTVYKILTSVITSKINKHIEHHNIIAEEQKGCRRNHMGCKEHLIIDSTIHKHAATKNRNLHCTYIDYQKAFDSIPHSWLIKVLQIYKVNFKIIQFLSSIMTRWKTTLQLNYNRTSVTSRQISIRKGIYQGDSLSPLWFCLALNPLSSMLHRSRVGYCLKHSTQEVIISHLIYMDDIKLYSKSERDMKKLIDTTTLFSNDINMQFGLDKCKTLHIVRGKIKPGNYPVNSIECITAMEPTDLYKYLGYKQLKGLDHTSIKSTLDTEYKRRVNTLCKSHLAGKHLIKAINTYAIPILTYSFGVIKWTKTDIEQIERTTRTTLTKHNNLHPKSAIERLTIKRQDGGRGLIDIHHLWQKQISRLKSFFLTKSNTSDIHKAIAQNDDNYTPLNLNDQTETLNISSSDPQKQKMETWKKKVLHGRHPHDLEQPHVDKIASNKWLKVGNLFPETEGFILAIQDQIINTKNYRKYIIKDPSVTNDKCRKCHTQPETIQHITGACTSLTQTDYTHRHNQVVNIIHQQLALKYKLIENNKTPYYKYTPQTVVENGTHKLYYDRAILTDKTIHYNRPDITLQDKENKTTYLIDIAVPNTHNLQKTIAEKISKYAELKEEVARIWRQDKVVVVPIVLSSTGVIPKNLHNSLKVIDLNKSTYITLQKAAILNTCRIVRKFLSLEDNN

SEQ ID NO: 21315 - protein, 1314 aa, Xestia c-nigrum
METRSKSKRIGPLPGGDRRGAPGADAGCHSMRSVSGEELNRRAPTDKDTTAEIIDDGDRLTDRTDTPVEPYSPSTVSYTPSRRSSPSIPSSPTLSSPPINSLNTVPPTPTLTAARGVSTFLPASTKAGKARVRMRWSKEVNLFIMRTYFHITKLETDMTTYRQQLHELFTRQYPEITVSEQRISDQRRAIVRNKLLSQEIIDQIKEETRIQLEADDNATPLLQNVTDSVQQSHTLPYTQLQPSIQSQFYNQSQANTQTSHTSTQTEYITLTLENDIETLAVENNNLTTDTYIQEIHDKFRTTLAQYSGMDPAIRPRLPKLRYSPKLFRLVNLFNENILNQFISDETQLNDIHTLIYCTAVVISEELNFKITKNTVQTRPKQNIKPAWQQRLEKDIEKLRADIGRLTQYINNNRSSKVVRRVEAIFRSHLIHTRHEQNNKKPEEFLDTIKQKLALKVHRLRRYKKAQQRKNDNAIFATNEKIFYRNLNKPNTETNHDSNTDTPDKPTKEQLESYWSSIWEEQAQHNDKATWITEEETKWRAIREMEFIEITEADITHITGRLHNWKSPGIDKVHNFWFKKLTSLYKPIASNLTQIILGQQNTPEFIATGITYMLPKTKNAPHPSQYRPITCLPTIYKILTSAITMKINKHIEQHNIMAEEQKGCRRGHMGCKEQLIIDSTIHKHATTKNRNLHCTYIDYKKAFDSVPHSWLIQILKIYRVNSKIIEFLSNIMTQWKTTLQINCNQNNVTTRQIFIRKGIYQGDSLSPLWFCLALNPLSHLLQRCGAGYCLKNTTEQTSISHLIYMDDIKLYAQTEKDMKKLVEATADFSQDINMQFGLDKCKTLHIIRGKIRPGNYAVNSTDTITAMEPSDLYKYLGYTQLKGLDHVRIKETLTVEFKRRLNAICKTQLSGKNLIKALNTFAIPILTYSFGVIKWTKTDTEQLERTTRTTLTKHNNLHPKSAIERLTIKRQNGGRGLIDIQHLWRKQICRLKTFFHSKSQTSNIHKAIVQNDQNYTPLNLNEQSDTSQIIIEDPQTQKIDDWKKKVLHGRHPHDLEQSHVNKVASNKWLKIGNLFPETEGFIIAIQDQIINTKNYRKFIIKDPSVTNDKCRKCHTQPETIQHITGACTTLTQTDYTHRHNQVANVIHQRLAVKYSLLQDTNTPYYNYTPQATLENDTHKLYYDRAILTDRTIHYNRPDIILQDKINKVTYLIDIAVPNTHNIQKTITEKISKYAELKQEVIRIWRQEKVYVVPIVLSTTGVIPNHLLHSLKLLDLKETLYITLQKAAILNTCRIVRKFMQIEEHEIGPHHNTPST

SEQ ID NO: 21316 - protein, 1309 aa, Hemaris fuciformis
METRSKKKLRGPLPGGDRRGTPGADAGCYSMQTVSGEELSRRAPTGSPESITAANLTDRQTDSRSNSPSEPYSPSTKSYTPSICSSSSRSPPSLTNKIREPSIPDLDAAREVNRPFLPMSTKAGKPRVRMSWSRDVNLFIMRTYYYITKLETDMTIYRKHLHEHFSQRYPDVTVSEQRLSDQRRAIVRNNLLPQEVLDQLKTDVRKQLEEESMINDDTEVICRNQSPLPHPHTSNSNTPHLSLIQIQPITQENQNQCSQITHTSTQTETVILTLENEIDNMPEPNIPTDIHIQTIQDKFTATLTLYSGLDPTLRPKLPKLKYTSKLTSLINIFNQSILNNFISETTKLLDIHTIIYCTAYVIAEELDFKINEQRVGHIKPGKNNKPPWQYRLEKDIEKIRADCGRLTQYINNNRSKKVIKKVEEIFKKYTTHTRHENNNKKPEEFLDTLKQKLAVKAQRLKRYKKAQERRKDNVLFAKNEKMFYRQLRNPHTNIKTNIHNENNISTPKKEALEAFWAKVWEEQIQHNDEANWIKEEENMWSEVEEMEFTEVTEADIKLITNRLHNWKSPGIDKIHNFWYKKLTSLHKAIAQNFTDIILRKQALPHFLATGITYMLPKDKFSPDPSNYRPITCLPTIYKILTSVITSKINTHVENHNIIAEEQKGCRRGHMGCKEQLVIDSTIHKHASTKSRNLHCTYIDYKKAFDSIPHSWLIQILKIYKINSVIIEFLQNIMLNWKTTLHLYNVNDPIITRQISIRKGIFQGDSLSPLWFCLALNPLSHILQRSRAGYHLKHNSEETNISHLIYMDDVKLYSKNEKDMNKLIEATLKFSKDINMHFSLDKCKTVHIIRGKIRPGDYTLNNTDLITAMEPTDLYKYLGYKQLKGIDHKNIKHTLSGEYRRRVNAICKTQLSAKNLIKALNTYAIPILTYSFGVIKWSKSNIEQIERLTRTTLTKHKYLHPKSAVERTTIKREAGGRGLIDIYNLWQKQIYNLKLFFREKSRTSNIHNAICQNDNNFTPLNLCEPPNPPNPNNIDRQQQKIEDWKKKVLHGRHPHDLEQPHIDKIGSNKWLKIGGLFPETEGFLIAIQDQVINTKNYRKFIIKDPTMINDKCRRCHTQPETIQHITGACICLTQTDYTHRHNQISNIIHQTLALKYNLIQSSKTPYYKYTPETILENALYKLYYDRAILTDRTIHYNRPDITLQDKRNKTTYLIDIAVPNTHNIQKTIAEKNNKYTDLKNEVIRIWKQEKVYVVPIVLSTTGVIPKHLHHSLKLLNLNKSLYITLQKAAILNTCRIVRKFMEIDETVSHS

SEQ ID NO: 21317 - protein, 1209 aa, Duroca duroca
MSRGTPTPTLDVAQEVNTFLPASTKAGKPRVRMSWSKEVNMYIMRIYYYVTKLETDMTMYRKQLYDLFSRQYPEIKVTEQRVSDQRRAIIRNKRLPISILDQIKEEVRIKLQENTDIIDVPNVNNIPENILQLQVHTNSQITHSHNTNTQLINIQTSHTSTQTSNRYAQTECETVIVENDVEILVESNPLTETHIQKLHDRLKTILIQYSGMDPTVRPKLPKLKYSYRLSQIISLFNNNILPQYISNDIKLIDVHTLIYCTAVVIAEELNYKITENANDIRPKNNNKPPWQQRLEKDIEKLRADCGRLTQYINNNRSKKVVKKVEEIFRRKITHTRHESDNSKPEEFLDTLKQKLALKVHRLKRYKKAQQRKNDNILFNNNEKAFYRNLLRHTHNPTIENLETPTATQLEDFWGQIWEDKEQHNDKASWIAQEESRWNAIQEMEFVEITEADITNVTTTLHNWKSPGIDKIHNYWFKKLTSLHKSIAKNLTDIILGKQNIPEFIATGVTYMLPKTAHSLEPSQYRPITCLPTIYKILTSTIARKMITHIEHNHIMAEEQKGCRRGHMGCKEQLVIDSTIHKHATTKNRNLHCTYIDYQKAFDSVPHSWLIQVLHIYKINPKIIIFLSNIMSYWKTSLQLNSRNSTITTRQIVIRKGIYQGDSLSPMWFCLALNPLSNLLRGCRAGYNLKCTTETTTISHLIYMDDIKLYSQTQKQMTQLINITSEFSKDIKMKFGLEKCKTLHIVKGKILPGDHEIDDNNAIRAMEPSDLYKYLGYKQLKGLNHTQIKQTLTTEYKKRLNAICNTKLSGKSTIKALNTYAIPILTYSFGIIKWSNTDIEHLERTTRTTLTKHNYLHPKSAVERLTIKRNSGGRGLIDIHHLWEKQIDKLKLFFQTKSLTSNTHKAICHNDHSLTPLNLSENITNLRTDNRDPHSHKLDNWKKKTLHGRHPHDLQQTHIDPVASNKWLTVGNLFPETEGFIIAIQDQVINTKNYRKFIIKDTTVATDKCRRCHMQPETIQHITGACTTLTQTDYTYRHNQVVNIVHQRLALKHNLIQNTNTPYYKYTPSTVLENSTHKLYYDRAILTDRTIHYNRPDITLTDKINKVTYIIDIAVPNTHNIQKTISEKINKYIELQEEVARIWKQNKVYVVPMVLSTTGVIPKHLHHSLKLIDLKQTLYITMQKAVILNTCRIVRKFLQVDVNETHTHPE

SEQ ID NO: 21318 - protein, 1273 aa, Arctia plantaginis
MQNKTNKYNLRPLPGGRRDLIRNNNINNQTDRQTDNDNISLNSLTSLSVTEPYSPSTSSYRPTPVSFVDEDSHETPNPTLAVTQEVNAFLPASTKSGKPRVRMRWSKEVNLFIMRTYYQITKLETDMTTYRKQLHELFTRHYPDINVTEQRIADQRRTIVRNKLLTEETLHILKEEIRMQLQQNEHIYEYIENNSNPQLHNTQSVTTALPTQSQPHTITQSSHISTQPETITLTLENDIEIMQNVNPSSDNIQKIQEKFRTALALYSRMDPITRPKLPKLKYSRKLSELTHVFNHNILHQFLSEDTQLTDIHTLIYCTALVISEELNYKIIDHPRNILRKNSKPPWQIRLEKDIEQLRADCGRLTQYINNNRSNKIVKRVEQIFRRQCTHTRHENNNRKPEEYLDTLKQKLALKVHRLKRYKKAQLRKNDNMLFTLNEKSFYRNLSKPQTATTRPENIDIPTQTQLETFWSGIWEEPVQHNDKADWITEEENKWNSIEEMEFDCITEDDIAHVTGKLHNWKSPGIDKIHNYWYKKITLFHKPIAKNLTYIILGKQNIPEFIGMGITYMLPKTAHSPQPSQYRPITCLPTIYKILTSAIAHKINMHIEHNHIIAEEQKGCRRGHMGCKEQLIIDSTIHKHATTKNRNLHCTYIDYKKAFDSIPHSWLLKILHIYKINPKITDFMRDIMSHWKTTLHLNMNDRTVTTRQISIKKGIYQGDSLSPLWFCLALNPLSHLLQRCQAGYRLRNSTEETIISHLIYMDDIKLYAKSDKEMTKLLQNTTKFSKDINMEFGLDKCKTLHIIRGKIRPGDYAVDESSTIAAMESTDLYKYLGYKQLKGLDHTSIKQILATEYKSRTNTLCKTQLSAKNLIKALNTYAIPILTYSFGIIKWTKTDIEQIERTTRTTLTKHNNLHPKSAIERLTIKRENGGRGLIDIYHLWQKQVYNLKTFFRTKSHTSNIHKAITLNDYNFTPLNLNDHTGIHNPNNIDPQADKIENWKKKVLHGRHPHDLEQPHIDTIASNSWLKIGNLFPETEGFIITIQDQIVNTKNYRKYIIKDATVTDDKCRKCHIQSETIQHITGACITLTQTDYTHRHNQITNIIHQKLALKHHLIQNTNTPYYNYTPQSVLESSSHKLYYDRAILTDRTIHYNRPDITLQDKINKTTYLIDIAVPNTHNLQKTITEKISKYTELKEEIIRIWRQEKVYIVPIVLSTTGVIPKHLHHSLKLINLNESVYFNLQKAAILNTCRTVRKFMDIEENGTAQHTQQPPSTST

SEQ ID NO: 21319 - protein, 1044 aa, Mythimna ferrago
MLENDVETLVVPEQNLATELYIQEINDKFRTTLTLYSGMDPAVRPKLPKLRHSRDLFRLVNLFNENILNQFISDDTQLIDIHTLIYCTAVVICEELKFKISQDTGNLRPKQNVKPAWQHRLEKDIDKLRADCSRLTQYINNNRSSKVVKRVEAIFRSSSTHTRHENNNRKPEEYLDTLKQKLSLKVHRLKRYKKAQQRKIDNTTFSTNEKMFYRNLRKSDTNTSTENSSDTINKPTKEQLEAYWSSIWEERVQHNDKATWIAEEETKWRAIEEMDFLEITESDVTHVTGRLHNWKAPGIDKIHNFWYKKLTSLYKPMAKNLTEIILGQQNIPEFITTGITYMLPKNKTSPQPSLYRPITCLPTIYKILTSLITIKINSHIERHNIMAEEQKGCRRGHMGCKEQLIIDSTIHKHASTKNRNLHCTYIDYKKAFDSVPHSWLIQILQIYKINSKIIDFLRNIMSQWKTTLQINHDNNRVITRQIYIKKGIYQGDSLSPLWFCLALNPLSRLLERSRAGYCFKHSTNQTTISHLIYMDDIKLYAQTEKDMRKLVEATAEFSQDINMQFGLDKCKTLHIIRGRIRPGSYVVNDTDTITAMESNDLYKYLGYMQLKGLDHVRIKDTLTTEYKKRLNTLCKTQLSGKHLIKAINTFAIPILTYSFGVIKWTKTDTEQLERITRTTLTKNNHLHPKSAIERLTIKRQNGGRGLIDVQHMWRKQVFKLKSFFETKSRTSKIHKAVVLHDSNYTPLNLNARLDTQNINNDNPQTQKMEDWKRKVLHGRHPHDLEQSHVNRIASNKWLVVASLFPETEGFMIAIQDQIINTRNHRKYIIKDPSVTDDKCRKCHLQPETIQHITGACTTLTQTDYTHRHNQVANVIHQSLAVKYTLIQNTNTPYYNYTPQTVLENDTHKLYYDRAILTDRTIHYNRPDITLQDKINKITYLIDIAIPNTHNIKKTITEKISKYAELKDEVTRIWRQENVYVVPIVLSTTGVIPNCLLHSLKLINLKESLYITLQKAAILNTCRIVRKFMQIDENALGPPHNTPLT

SEQ ID NO: 21320 - protein, 1324 aa, Mesoligia furuncula
METRSKRKRIGPLPGGDRRGALGADAECLSMRTVSGEELNRRAPTDKDATADIIDDGDRLTDRINTPVEPYSPSTVSYTPSRPSTPSIPSSPSIPSSPPITSFNSVQPNSTLNVTREVSTFLPASTKAGKARVRMRWSKEVNLFIMRTYLYITKLETDLTTYRKQLHELFTRQYPEITVTEQRISDQRRIIVRNKLLSQDIINQLKEEVRTQLQGESENTAGAISIALTQNTTAYNQQEQPCSQTEPIIQSQPITQSQPYFQSQAYSETTHTSTQTESITIMLENEIETLADISINQSTDTHIQEIHDKFKTALTQYSGMDPAARPRLPKLRYTPKLSQLVHLFNQNILQQYISEETHLIDIHTLIYCTALVISEELNFKITEYTGNSRQRNINKPAWQQRLEKDIEKLRADCGRLTQYINNNRSNKVVKRVDAIFKNMATHTRHENDNRKPEEFLDTLKQKLALKVHRLRRYKKAQERKQDNSLFATNEKNFYRNLQTAQTNTNTLTTENNIELPTAEQLETFWSGIWEEQVQHNNNSDWITDEETKWSSLEEMEFVELTESDITCVTARLHNWKSPGIDKIHNFWYKKLESLHKVLAKNLTQIILGKQNIPEFLATGITYMLPKAQYSSQPSQYRPITCLPTIYKILTSAITTKINKHIENHNIIAEEQKGCRRGHMGCKEQLVIDSIIHKHANTKHRNLHCTYIDYKKAFDSIPHSWLIQILQIYKINSKIIDFLQDIMARWRTTLQLNYRNNAITTRQISIKKGIYQGDSLSPLWFCLALNPLSDLLHRSQAGYSIKHTTEETIISHLIYMDDIKLYSKSEKEMKKLIDITTEFSKDINMQFGLDKCKTVHIIRGKIKPGDYPINNTDTITAMEPTDLYKYLGYKQLKGLDHSTIKYTLNSEYKRRVVAVCKTQLSGKHLIKALNTYAIPILTYSFGVIKWSKTDIQQIERTTRTTLTKHNNLHPKSAIERLTIKRQYGGRGLIDVHHLWQKQIAKLRTFFHSKSQTSNIHKAVVMNDISYTPLNLHDQIDIQHTSHEDPHKQKVEDWKKKVLHGRHPHDLEQSHIDTIASNKWLKIGNLFPETEGFIIAIQDQIINTKNYRKFIIKDPTITNDKCRKCHSQPETIQHITGACTTLTQTDYTHRHNQVANVIHQKLALKYKLIQDTNTPYYKYVPQTVLENTTHKLYYDRAILTDRTVHYNRPDITLQDKVNKVTYLIDIAVPNTHNLQKTIGEKISKYVELKEEVSRIWRQEKVYVVPIVVSTTGVIPNHLHHSLKQIDLKDSIYITLQKAAILNTCRIVRKFMQIDENEITPHNINSS

SEQ ID NO: 21321 - protein, 1319 aa, Mesoligia furuncula
METRSKRKRIGPLPGGDRRGAPGADAGCLSMRTVSGEELNRRAPIDKDTTAEIIDDGDRLTDRTTTPVEPYSPSTVSYTPSRPSSPSMPSSPILSSPPITCLNSIPPTPILNVAREVSSFLPASTKAGKARVRMRWSKEVNLFIMRTYFYITKLETDMTTYRQQLHELFTRQYPEITVSEQRISDQRRAIVRNKLLSQEIIEQLKEETRIQLQEAEYNTSADAIPLSQNTTETAQQSHSQPHIQVTPYTQSQPYNQSQVFTQTSHTSTQTESIMLTLENDIETLTVADQNLTADICIQEILDKFRTTLAQYSGMDPAVRPKLPKLRYSPNLFQLVNLFNENILDQFISDDTQLIDIHTLIYCTAVVVSEELNFKITQYTGNTRPKQNTKPAWQQRLEKDIEKLRADCSRLTQYINNIRSRKVVKRVEALFRSSVTHTRHENDNRKPEEFLDTLKQKLALKVHRLRRYKKAQQRKNDNAIFATNEKIFYRNLHKPDADTNDENNTDAPNQPTKEQLETYWSSIWEEQEQHNDKATWITEEETKWRAIEEMEFVEITEADITHLTGRLHNWKSPGIDKIHNFWYKKLTILHKPIAKNLTKIILGQQNIPDFIATGITYMLPKTKNSPQPYQYRPITCLPTIYKILTSAITMKINSHIEHHNIMAEEQKGCRRGHMGCKEQLIIDSTIHKHASTKNRNLHCTYIDYKKAFDSVPHSWLIQILEIYRINSKIIDFLRNIMPLWKTTLQINCNHNNITTRQISIRKGIYQGDSLSPLWFCLALNPLSNMLQRCRAGYCLKHTTEQTTVSHLIYMDDIKLYAQTEKDMKKLVEATAEFSLDINMQFGLDKCKTLHILRGKIRPGNYVVNNTDTITAMEPTDLYKYLGYTQLKGLDHVRIKETLTTEYKRRLNAVCKTQLSSKNLIKALNTFAIPILTYSFGVIKWTKTDTEQLERTTRTTLTKHNNLHPKSAIERLTIKRQNGGRGLIDIQHLWRKQVCRLKTFFQSKSHTSNIHKAIVQNDFNYTPLNLNEQLDTPHNTSDDPQKQKIEDWKKKVLHGRHPHDLEQSHVNQLASNKFLKIGNLFPETEGFIIAIQDQIINTKNYRKFIIKDPSVTNDKCRKCHIQPETIQHITGACTTLTQTDYTHRHNQVANVIHQKLALKYTLIQDANTPYYNYTPQTILENDTHKLYYDRAILTDRTIHYNRPDITLQDKINKVTYLIDIAVPNTHNIQKTISDKISKYAELKDEVTRIWRQQKVYVVPIVLSTTGVIPNHLLHSLKLINLKETLYITLQKAAILNTCRIVRKFMQIDENQVGSHHNTSLT

SEQ ID NO: 21322 - protein, 1319 aa, Mesoligia furuncula
METRSKRKRIGPLPGGDRRGAPGADAGCLSMRTVSGEELNRRAPIDKDTTAEIIDDGDRLTDRTTTPVEPYSPSTVSYTQSRPSSPSMPSSPILSSPPITSLNSIPSTSTLNVAREVSSFLPASTKAGKARVRMRWSKEVNLFIMRTYFYITKLETDITTYRQQLHELFTRQYPEITVSEQRISDQRRAIVRNKLLSQEIIEQLKEETRIQLQEAEYNASADAIPLSQNTTETAQQSHSQPHIQVTPYTQSQPYNQSQVFTQTSHTSTQTESIMLTLENDIETLTVADQNLTADICIQEILDKFRTTLAQYSGMDPAVRPKLPKLRYSPNLFQLVNLFNENILQQFISDDTQLIDIHTLIYCTAVVVSEELNFKITQYTGNTRPKQNTKPAWQQRLEKDIEKLRADCSRLTQYINNIRSRKVVKRVEALFRSSVTHTRHENDNRKPEEFLDTLKQKLALKVHRLRRYKKAQQRKNDNAIFATNEKIFYRNLYKPDADTNDENNTDAPNQPTKEQLETYWSSIWEEQEQHNDKATWITEEETKWRAIEEMEFVEITEADITHLTGRLHNWKSPGTDKIHNFWYKKLTILHKPIAKNLTKIILGQQNIPDFIATGITYMLPKTKNSPQPSQYRPITCLPTIYKILTSAITMKINSHIEHHNIMAEEQKGCRRGHMGCKEQLIIDSTIHKHASTKNRNLHCTYIDYKKAFDSVPHSWLIQILEIYRINSKIIDFLRNIMPLWKTTLQINCNHNNITTRQISIRKGIYQGDSLSPLWFCLALNPLSNLLQRCRAGYCLKHTTEQTTVSHLIYMDDIKLYAQTEKYMKKLVEATAEFSLDINMQFGLDKCKTLHIVRGKIRPGNYVVNNTDTITAMEPTDLYKYLGYTQLKGLDHVRIKETLTTEYKRRLNAICKTQLSSKNLIKALNTFAIPILTYSFGVIKWTKTDTEQLERTTRTTLTKHNNLHPKSAIERLTIKRQNGGRGLIDIQHLWRKQVCRLKTFFQSKSRTSNIHKAIVQNDFNYTPLNLNEQLDPPHNTSDDPQKQKIEDWKKKVLHGRHPHDLEQSHVNQLASNKFLKIGNLFPETEGFIIAIQDQIINTKNYRKFIIKDPSVTNDKCRKCHIQPETIQHITGACTTLTQTDYTHRHNQVANVIHQKLALKYTLIQDANTPYYNYTPQTILENDTHKLYYDRAILTDRTIHYNRPDITLQDKINKVTYLIDIAVPNTHNIQKTISDKISKYAELKDEVTRIWRQQKVYVVPIVLSTTGVIPNHLLHSLKLINLKETLYITLQKAAILNTCRIVRKFMQIDENQVGSHHNTSLS

SEQ ID NO: 21323 - protein, 1156 aa, Parnassius apollo
MTTYRQQLHAHFTRQYPEITVSEQRISDQRRTIVRNKLLSQEVIDQLKEEVRTQLIQEEATNSYVETNITQNTSENDRQVQPQLLSQSQLIYTQSQPCDHSQISHTSTQTETVILTLENDIETIVVPDQHLTTDTYIQEINEKFRTTITLYSGMDPAARPRLPKLKYTPNLFRLVNLFNETILTQYISDDTQLIDIHLLIYCTAIVISEELNFKITDNARTTRTRQNTEPAWQQRLEKDIEKLRANIGRLTQYINGCRSNKLVKKVEVIFRNNATHTRHEKSNTRPEEFLDTLKQKLALKVHRLKRYKKAQQRKKDNVRFATNEKLFYRNLHKPQTDIIDERNTHTPNLPTKEQLEAYWASIWEEQKQHNDKASWIIEEEAKWRDIDEMEFEEVTELDITLITARLHNWKSPGIDKIHNFWYKKLTSLHKPLARNLTDIITGQQNTPEFIATGITYMLPKTKNSPQPSQYRPITCLPTIYKILTSAITKKIQSHIEHHNIIAEEQKGCRQGHMGCKEQLIIDSTIHKHATSKNRNLHCTYIDYKKAFDSVPHSWLLKILEIYRINPKIIDFLRRIMLQWKTTLQINCNQNTVTTRQISITKGIYQGDSLSPLWFCLALNPLSHLLQSCGAGYCLKLNTDETTISHLIYMDDIKLYAKTDKDMKKLIDITTEFSSDINMHFGLDKCKTLHIVRGKVRPGDYVVNETEAITAMESTDLYKYLGYVQLKSLDHVRIKNSLTTEYKRRLNAVCKTQLSSKHLIKAINTYAIPILTYSFGVIKWSKTDAEQLERTTRTTLTKHNNLHPKSAIERLTIKREHGGRGLMDIQHLWRKQVSRLKSFFYTKSHTSNIHKAIVTNDINYTPLNLSNQIESQNTTSDNPQTHKIDEWKKKVLHGRHPHDLEQSHINKLASNKWLKIGNLFPETEGFIIAIQDQIINTKNYRKYIIKDPTVNNDKCRKCHTHPETIQHITGACTTLTQTDYTHRHNQVANVIHQKLALKHALIPDANTPYYNYTPKHTLENTTHKLFYDRGILTDRTIHYNRPDIILQDKINNITYLIDIAVPNTHNLQKTITEKICKYAELKDEVTRIWQQEKVYVVPIVLSTTGVIPNHLLRSLKLLQLKETLYITLQKAAILNTCRIVRKFMQIEENEIGPHQIT

SEQ ID NO: 21324 - protein, 1309 aa, Hemaris fuciformis
METRSKKKLRGPLPGGDRRGTPGADAGCYSMQTVSGEELSRRAPTGSPESITAANLTDRQTDSRSNSPSEPYSPSTKSYTPSICSSSSRSPPSLTNKIREPSIPDLDAAREVNRPFLPMSTKAGKPRVRMSWSRDVNLFIMRTYYYITKLETDMTIYRKHLHEHFSQRYPDVTVSEQRLSDQRRAIVRNNLLPQEVLDQLKTDVRKQLEEESMINDDTEVICRNQSPLPHPHTSNSNTPHLSLIQIQPITQENQNQCSQITHTSTQTETVILTLENEIDNMPEPNIPTDIHIQTIQDKFTATLTLYSGLDPTLRPKLPKLKYTSKLTSLINIFNQSILNNFISETTKLLDIHTIIYCTAYVIAEELDFKINEQRVGRIKPGKNNKPPWQYRLEKDIEKIRADCGRLTQYINNNRSKKVIKKVEEIFKKYTTHTRHENNNKKPEEFLDTLKQKLAVKAQRLKRYKKAQERRKDNVLFAKNEKMFYRQLRNPHTNIKTNIHNENNISTPKKEALEAFWAKVWEEQIQHNDEANWIKEEENMWSEVEEMEFTEVTEADIKLITNRLHNWKSPGIDKIHNFWYKKLTSLHKAIAQNFTDIILRKQALPHFLATGITYMLPKDKFSPDPSNYRPITCLPTIYKILTSVITSKINTHVENHNIIAEEQKGCRRGHMGCKEQLVIDSTIHKHASTKSRNLHCTYIDYKKAFDSIPHSWLIQILKIYKINSVIIEFLQNIMLNWKTTLHLYNVNDPIITRQISIRKGIFQGDSLSPLWFCLALNPLSHILQRSRAGYHLKHNSEETNISHLIYMDDVKLYSKNEKDMNKLIEATLKFSKDINMHFSLDKCKTVHIIRGKIRPGDYTLNNTDLITAMEPTDLYKYLGYKQLKGIDHKNIKHTLSGEYRRRVNAICKTQLSAKNLIKALNTYAIPILTYSFGVIKWSKSNIEQIERLTRTTLTKHKYLHPKSAVERTTIKREAGGRGLIDIYNLWQKQIYNLKLFFREKSRTSNIHNAICQNDNNFTPLNLCEPPNPPNPNNIDRQQQKIEDWKKKVLHGRHPHDLEQPHIDKIGSNKWLKIGGLFPETEGFLIAIQDQVINTKNYRKFIIKDPTMINDKCRRCHTQPETIQHITGACICLTQTDYTHRHNQISNIIHQTLALKYNLIQSSKTPYYKYTPETILENALYKLYYDRAILTDRTIHYNRPDITLQDKRNKTTYLIDIAVPNTHNIQKTIAEKNNKYTDLKNEVIRIWKQEKVYVVPIVLSTTGVIPKHLHHSLKLLNLNKSLYITLQKAAILNTCRIVRKFMEIDETVSHS

SEQ ID NO: 21325 - protein, 885 aa, Heliconius pardalinus
MKIFRHTTLHTKHENDNQKLEEFLDTLKQKLALKSHRLKRYKKAQKRKDDNILFTTREKTFYRQLSKPNHQSQDINKMSIPTEEQLTTYWSDIWEQELKHNETAKWILDETDKYKIIDTMNFSEITETEILKITAKLHNWKSPGADKVHNFWYKKLTIFHRALAKNFTDIILNKQNIPNFMAIGITYMIPKNKFSSEPSQYRPITCLPTIYKILTSVITSRITTHIEKYNVIAEEQKGCRRGHMGCKEQLIIDSTIHKHATTKNRNLHCTYIDYKKAFDSIPHSWLIQILKIYKISPFIIEFLNIIMSQWKTTLQLNYNSTTVTTRHIQIKRGIFQGDSLSPLWFCLALNPLSNLLQNSRLGYSFSSRTQNSLISHLIYMDDLKLYAKKDKDMKTLIDITTEFSNDIQMQFGLDKCKTLHITKGKIQKGNYSINDHNTITALESNDIYKYLGYNQLKGLDHTNIKHILITEFKKRIYAICKTQLSGKNLVKAINTYAIPILTYSFGVIKWSKTDIENLERLIRTTLTKHNYLHCKSAIERLTIKRLHGGRGIININTLWQNQIKSLQKFFINKSNNSKIHKTIIDNDHNYTPLNLDQITDIQNDQNINQQMQQIDNWKRKVLHGRHPHDLEQAHIDSIGSNMFLKVGSLFPETEGFIIAIQDQVINTKNYKKYIIKDTTVTNDKCRRCHSQPETIQHITGACSNLTHSDYTHRHNQICNIIHQQLAHKCKFIKNIDTPYYKYAPETILENSTHKLYYDRAVLTDRTIHFNRPDIILQNKKHKITYLIDIAVPNTHNLQKTIAEKINKYEELKEEIVRIWKQKTVYTVPIVLSTTGVIPKHLHHSLNMLNLKSTTYITLQRAAILNTCRIVRKFLQIDEQNTNIPH

SEQ ID NO: 21326 - protein, 1305 aa, Emesis lacrines
MAMVTHLMVMLLRSKRKVPLPGGDRRGTPGADAGCHSMRTVSGAELSRRAPTGFSELATADSNDNIDILTDTDNISINTINTVVEPYSPSTNSYIPTPVSFVEENSLELPTPTLNVAQEVNTFLPASTKAGKPRVRMSWNKDVNMFIMRTYYYITKLETDMTTYRKQLHESFILQYPEVKVTEQRISDQRRTIIRNKLLTEEILQQLKDEVRIQLENETHIDTYTNNIRHTNSIPKITQYLSSQTGTQLMSHSQLYFQPYTQTSETSTQTDTITLTLENDVETIIVPTLITNIYEQDIIDKFRSALTKYSGMDPAFRPKLPKLKYSKQLFQLTNLFNQSILNQFVSEDAQLTDIHTLIYCTAVVISEELNYKIMVGDRNCNLKPKHSEKPPWQVRLERDIEKLRADCGRLTQYINNNRSHKVVKRVEAIFKSRKIHTRHEENNKKPEEFLDTLKQKLALKVHRLRRYKKALQRKNDNILFTNNEKLFYRNLTKTHNDTSTTENNEIPTQAQLETFWSDIWEEPAQHNDKAHWITEEENRWNKIREMEFHEITKTDIAKVTARLHNWKSPGIDKIHNFWYKKLNYLHNSIAKNFTDIIVGKQNIPEFIATGITYMIPKNNYSTQPSQYRPITCLPTIYKILTSAITNKITIHIEQNLIISEEQKGCRRGHMGCKEQLIIDSTVHKHATTKNRNLHCTYIDYKKAFDSIPHSWLVQILKIYKINPTITLFLQNIMQYWKTTLQINHYSNTLTTRQIHIRKGIYQGDSLSPLWFCLALNPLSNMLHGCRAGYCLKHTGQETVISHLIYMDDIKLYSKSEKDMKKLLDKTIEFSSDINMEFGIEKCKTLHIVRGKIRSGDYVINDNTTITAMEPTDLYKYLGYKQLKGLDHTTIKQTLRIEYKRRLESICKTQLSGKKLIKAINTYAIPVLTYSFGIIKWSKTDIENLERIIRTTLTKHNHLHPKSAIERLTIKRQNGGRGLIDIHNLWQKQIHTLKIFFQAKSHTSKLHKAIVDNDYNYTPINLSKTTDVQDPTNTDLQTQKLDTWKKKTLHGRHPHDLDQSHIDNVASNKWLKVGNLFPETEGFIIAIQDQIISTKNYRKHIIKDPSVTNDKCRKCHTQPETIQHITGGCTTLTQTDYTHRHNQIVNIIHQNLALKHQLIQNAHTPYYKYKPETVLENPTHKLYYDRAILTDRTIHYNRPDITLQDKTKKITYLIDIAVPNTHNIQKTITEKISKYSELKDEITRIWRQEKVYIVPIVISTTGIIPKQLHNSLKLIDLQNSLYITLQKASILNTCRIVRKFMQLEEN

SEQ ID NO: 21327 - protein, 1303 aa, Emesis angularis
METRSKSKRKGPLPGGDRRGAPGADAGCLSMRTVSGEELNRRAPTGKDTTAEIRDDGDILTDRTNSPVEPFSPSTVSYTPSRTSSPSIPSSPPTTSFNTDPPIPTLNVAREASSFLPVSTKAGKSRVRMRWSKDVNIFIMRTYYFITKLETDLTTYRQQMHEIFSQQYPEINVSEQRIADQRRVIIRNKLLSQDILNQLREEVRTQLENSDNNITTNPDTQTYDTLSENIPQPQLPILSQLDTQTLSCYQSQTNSQTTHTSTQTESITITLENDIETLADISQNQNTETRIQEILDKFKTALTQYAGLNPAARPRLPKLKYTPKLAQLVHLFNQNILNQFISEDTHLIDTHTLIYCTALVISEELNYKITEQTRNTRSRNDSKPAWQQRLERDIEKLRADCGRLTQYINNNRSSNIVRKVEIIFKNMTNHTRHESNNRKPEEFLDTLKQKLALKVHRLRRYKKAQERKNDNTQFATNEKSFYRNLQNPKTDTSTNNSIELPSAEQLESFWSGIWEEQVQHNEKSDWIKDEKTKWNSLKEMDFVEITESDINSITARLHNWKSPGIDKIHNYWYKKLYSLHKTLANNLTDIILGKQVIPEFIATGITYMLPKAHYTPQPSQYRPITCLPTIYKILTSAITSKITRHIEQHDILAEEQKGCRRGHMGCKEQLVIDSIVHKHATTKNRNLHCTYIDYKKAFDSISHSWLIQILQIYKINTKIIDFLQNIMSQWKTTLQLNYRHENVTTRQIFIKKGIYQGDSLSPLWFCLALNPLSHLLRSCQAGYCLKHNIEETIISHLIYMDDIKLYAKTEKEMKRLIDTTAQFSNDINMHFGLDKCKTVHIIRGKIKPGDYIINDTDTITAMESTDLYKYLGYKQLRGLDHTAIKHTLNTEYKKRVVAVCKTQLAGKHLIKALNTYAIPILTYSFGVIKWSKTDIQQIERTTRTILTKQNNLHPKSAIERLTIKRQNGGRGLIDIHNLWQKQISRLKTFFHTKSHTSNIHKAIATNDLNYTPLNLNEQTETQHTNNEDPQKQKLEDWRKKVLHGRHPHDLDQPHIDSIASNKWLKIGNLFPETEGFIIAIQDQIINTKNYRKFIIKDPTITNDKCRKCHSQPETIQHITGACTTLTQTDYTHRHNQVANIIHQQLALKHKLIQDTNTPYYKYTPQNVLENTTHKLYYDRAILTDRTIHYNRPDITLRDKINKVTYLIDIAVPNTHNLQKTIGEKFCKYAELKEEVTRIWRQVKVYVVPIVLSTTGVIPNHLHHSLKLIDLKDSLYTSLQKAAILNTCRIVRKFMQIDKDAPLS

SEQ ID NO: 21328 - protein, 1183 aa, Cecropterus takuta
MRRSSRIKNLEIRNKNSAQSGTVAEIVSNLSSPTSSTRSLFQSTNSTPLSFENRINSISRSTTVSPISVDVVQIQNVTLPALDVARGANAFLPASTKAGKPRVRMKWSQDVNIFIMRTYYHITKLETDLTTYRKTLHELFSIQYPDVNVSEQRVSDQRRMIIKNKYLTQEILDTLKKEVSRQLQEDKHIHEVNDDNNQVHIEINQNTLESQAHSQKTSSQFHNLSQLNTQTLIPTSHSSTQTEFITLLLENETNTIADFVDIENLRVDIGRLTQYINNNRSDRLIKKVQHIFNRMTRHTKHESNNRKPEEFLDTLKQKLALKTHRLKRYKKTQQRKVDNIQFATNEKLFYRNLRKPKLDFTTTKNNHTNIPTQEELETYWSNIWEENIRHNDNADWIREEQRKWEVIDEMEFEEITELDITIATARLHNWKAPGVDKIHNFWYKKLTTLHQPLARALTDIILGKQNIPNFITIGITYMLPKTNNSTQPSQYRPITCLPTIYKILTSTITARINTHIEHHNILAEEQKGCRKGHMGCKEQLVIDSIIHKHATSKHRNLHCTYIDYKKAFDSIPHSWLIQILQIYKIHPVIVDFLRNVMPLWKTTLHLNQGNKSISTKRININKGIYQGDSLSPLWFCLALNPLSNLLHNCQIGYRFNNSREKTTISHLIYMDDIKLYAKNHKDMQKLIDKTTQFSKDINMQFGLDKCKTLHIIKGKIQSGDYIVNDTDVISAMEPTDVYKYLGYNQLKGLLHINIKNELTTEFKRRLEAICKTHLSGKHLTKAINTYAIPILTYSFGIIKWTKTDVEQLERITRTTLTKHNHLHPKSAVERLNIKRQDGGRGVIDINYLWQKQINNLRHFFFTKSSTSNIHSAITCNDENFTPLNLSEHTDQHTLSYGNPQLHKIENWKNKVLHGRHPHDLEHTQVDKIASNKWLEVGNLFPETEGFMIAIQDQVINTKNYRKHIIKDPNVKNDKCRRCHTQPETIQHITGACTNLTQTDYTHRHNQVTSIIHQNLALKHNLIQNTNTPYYKYTPQTVIENTSHKLYYDRAILTDRTIHYNRPDIILQDKLNKITYLIDIAVPNTHNIQKTIVEKINKYVDLKEEVGRIWKQNKVYVVPIVLSTTGVIPYHLHQSLKLIGLKHSLYIPLQKAAILNTCRIVRKFMQIDEKEVGSQNLTQSIAPL

SEQ ID NO: 21329 - protein, 1256 aa, Thymelicus lineola
MRTVSGEELNRRTLSGSPENTTANQIDDNRSLNSFTSAIEPYSPSTASYIPSPVSFTDEMSRGAPTPVLSVAQEVNTFLPVSTKAGKPRVRMKWNKEVNMFIMRTYYYITKLETDMTIYRKQLHELFSLQFPEIKVSEQRISDQRRAITRNKLLSQEIIDQIKEEVRTKLQENIDNTENNILADDITPTYQIPSRTQPYTNTISQTQLRPFTQISHTSTQTESETFTLESDIGILVDSDPSIDAHIEEIRAKLKSALINFSGMDPTMRPKLPKLKYSSKLSQLVDLFNKHILLQFLTPDAKLEDIHTLVYCTAVVIAEELGYKINTQTSHTRTKSNSKPPWQIRLERDIEKLRADCGRLTQYIYNNNRSKKVVKKVEEIFKSRMTHTRHENNNKQPEEFLDTLKQKLATKVHRLRRYIKAQQRKSDNILFATNEKQFYRKLVTKQIDKIPTKNLDIPTKTQLELFWSGIWEDETQHNDQADWIKEEENRWNTIKEMEFGEITEIDITHITAKLHNWKSPGIDKIHNYWWKKLTSVHRHIAKNLTYLILGKQNIPTFIATGITYMIPKTTYSSQPSQYRPITCLPTIYKILTSAITTKINNHIQQNEILAEEQKGCRRGHMGCKEQLIIDSTIHKHAATKNRNLHVTYIDYKKAFDSIPHSWLLKILQIYKINSTIVNFIRNIMSHWKTTLQVNANDKNITTRQISIKRGIYQGDSLSPLWFCLALNPLSHLLNQCQAGYCFKHTREETLISHLIYMDDIKLYSKTHNDMKKLIDTTVEFSNNIKMEFGIDKCKTLHIIKGKIKPGDYTIDSDYTITALESTDIYKYLGYKQLKGLDHTTLKQTLTTEYKRRINAICNTQLSGRHTIKALNTYAIPVLTYSFGVIKWSKTDIEQIERNTRTTLTKHNYLHPKSAIERLTIRRHEGGRGLIDLHHLWQKQIYHLKLFFHTKSRTSNIHKAISHNDHNFTPLNLNENSNTVDPRNIDPQEKKLENWKKKTLHGRHPYDLEQAHIDPVASNKWLKVGNLFAETEGFLIAIQDQIINTKNYKKFIIKDPSVINDKCRKCHTQPETIQHITGACTTLTQTDYTHRHNQVTNIIHQHLALKHNLIQNTNTPYYKYTPATVLENSSYKLYYDRAILTDKTIHYNRPDITLKDKINNTTYLIDIAVPNTHNIPKTIAEKISKYSDLKEEVTRIWRQDKVYIVPIVLSTTGVIPKHLHHSLKLLGLKDTLYVTLQKAAILNTCRIVRKFMQVDENN

SEQ ID NO: 21330 - protein, 1184 aa, Noctua janthe
MKWSKEVNTFIMRTYLYITKLETDMTTYRQQMHALFTRQYPDIAVSEQRIADQRRTIVRNKLLSQEVIDQLKEEIRTQLLQEETLNYIDTNNITQNVNEIYHQEQPQLLSQSQLIYSQSQPYNQSQAHTQISHTATQTESFTLTLENDIETIAIPDQHLTTDTYIQEINDKFRTTITQYSGMDPAARPRLPKLKYTPNLFRLVNLFNESILTQFISDDTQLIDIHLLIYCTAVVISEEINFKITDHTGTPRIRQNLAPAWQQRLEKDIEKLRADIGRLTQYINGCRSNKLVKRVEVIFRNNLTHTRHEKNNRQPEEFLDTLKQKLALKVHRLKRYKKAQQRKKDNTTFTTNEKIFYRNLHKPQTDTFDENNTNIPNLPTKEQLEEYWASIWEEPVQHNDKASWIAEEEVKWRAVDEMEFLEVSETDITHITARLHNWKSPGIDKIHNFWYKKLTSFHKSLAKNLTDIILGQQNTPEFIATGITYMLPKTKNSPQPSQYRPITCLPTIYKILTSAITKKISSHIERHNIIAEEQKGCRQGHMGCKEQLIIDSTIHKHATYKNRNLHCTYIDYKKAFDSVPHSWLIQILEIYRINPKIIDFIRNIMLQWKTTLQINYNHNTVTTRQISIKKGIYQGDSLSPLWFCLALNPLSHLLQGCGAGYCLKHTTDETIISHLIYMDDIKLYAKTENDMKKLVDVTAEFSKDINMQFGLEKCKTLHIVRGKVRPGDYVLNDTDTISAMEQTDLYKYLGYAQLKGLDHTRIKNTLSNEYKRRVNAICKTQLSGKHLIKALNTFAIPVLTYSFGVIKWSKTDTEQLERTTRTTLTKHNNLHSKSAIERLTIKRQHGGRGLIDIQHLWRKQISRLKSFFHSKSRTSSIHKAIVINDLNYTPLNLSHQIETLNTNNDDPQQHKIEDWKKKVLHGRHPHDLEQSHINKLASNKWLKIGNLFPETEGFIIAIQDQIINTKNYRKYIIKDPTVTNDKCRKCHSQPETIQHITGACTTLTQTDYTHRHNQVANVIHQKLALKHTLIHNTSTPYYNYKPEATLENTTHKLYFDRAILTDKTIHYNRPDIILQDKINKVTYLIDIAVPNTHNIQKTITEKISKYAELKDEVTRIWRQEKVYVVPIVLSTTGVIPNHLLHSLKLLDLKESIYIILQKAAILNTCRIVRKFMQIEENEIGPHHNT

SEQ ID NO: 21331 - protein, 1317 aa, Agrochola circellaris
METRSKSKRIGPLPGGDRRGAPGADAGCLSMRTVSGEELNRRAPTDKDATAEIIDDGDRLTDRTNTPVEPYSPSTVSYTPSRPSSPSIPSSPIPPSPPITSLNSISPTPTLNVAREASSFLPASTKAGKARVRMRWSKEVNLFIMRTYFYITKLETDMTTYRQQLHELFTRQYPEITVSEQRISDQRRAIVRNKLLSQQIIEQLKEETRIKLQEAENNAGANAIPLSQNITEIAEQSHIQVEPYTQSQPYNQSQAYTQTSHTSTQTESITLTLENDIETLSGANENLTTDLYIQQIHDKFRTTLAQYSGMDPTVRPKLPKLRYSPNLFRLVNLFNENILNQFISDDTQLIDIHTLIYCTAVVISEELNFKITQHSGNARPKQNIKPAWQQRLEKDIEKLRADCSRLTQYINNNRSSKVVRRVEAIFRSSFTHTRHEDNNRKPEEFLDTLKQKLALKVHRLRRYKKAQQRKNDNAIFATNEKMFYRNLHKPDTDTNNENTSNTDAPDRPTKEQLETYWSSIWEEQEQHNDKATWITEEETKWRAIAEMEFVEITEADITHLTGRLHNWKSPGIDKIHNFWYKKLTSLYKPIAKNLTEIILGQQNIPDFIATGITYMLPKSKNSPQPSQYRPITCLPTIYKILTSAITMKINSHIEHHNIMAEEQKGCRRGHMGCKEQLIIDSTIHKHASTKNRNLHCTYIDYKKAFDSVPHSWLIQILEIYRINSKIIDFLRNIMPLWKTTLQINCNHNNVTTRKISIKKGIYQGDSLSPLWFCLALNPLSHLLQRCRAGYCLKHTTEQTSVSHLIYMDDIKLYAQTEKDMKKLVEATAEFSLDINMRFGLDKCKTLHIIRGKIRPGSYVVNNTDTITAMEPTDLYKYLGYTQLKGLDHVRIKETLTTEYKRRVNAICKTQLSGKNLIKALNTFAIPILTYSFGVIKWTKTDTEQLERATRTTLTKHNNLHPKSAIERLTIKRQNGGRGLIDIQHLWRKQVCRLKTLFHSKSRTSNIHKAIAQNDFNYTPLNLNEQPDTPQITSDDPQKQKIEDWKKKVLHGRHPHDLEQSHVNTVASNKFLKIGNLFPETEGFIIAIQDQIINTKNYRKFIIKDPSVTNDKCRKCHIQPETIQHITGACTTLTQTDYTHRHNQVANVIHQKLAVKYTLIQDTNTPYYNYTPQTILENDTHKLYYDRAILTDRTIHYNRPDITLQDKLNKVTYLIDIAVPNTHNIQKTISEKISKYAELKDEVIRIWRQQKVYVVPIVLSTTGVIPNHLLHSLKLLNLKESLYITLQKAAILNTCRIVRKFMQIDENEIGSHHNTFST

SEQ ID NO: 21332 - protein, 1314 aa, Noctua pronuba
METRSKRKRIGPLPGGDRRGTPGADAGCLSMRTVGGEELSRRAPTDKNTTAEIIDDGDRLTDRTDTPVEPYSPSTVSYTPSRRSSPSIPSSPSVSSPPIISLNTVTPTPTLNAARGVSTFLPASTKAGKARVRMKWSKEVNLFIMRTYLHITKLETDMTTYRQQLHALFTRQYPEITVSEQRVSDQRRIIVRNKLLSQEVIDQLKEEVRSQLLQEETVNYIDANNITQNLSEISHQEQPQSLSQSQIIYTQSQPYNQSRAYTQISHTSTQTESITLTLENDIETIVVLDQHLTRDIYIQEINDKFRTTITQYSGMDPAARPRLPKLKYTPNLFRPVNLFNESILTHFISDDTQLIDIHLLIYCTAVVISEELKFKITDHTRTRQNVAPAWQQRLENDIEKLRADIGRLTQYINGCRSNKLVKRVEVIFRNNATHTRHEQNNRKPEEFLDTLKQKLALKVHRLKRYKKAQQRKNDNAIFTTNEKIFYRNLHIPKNDRNSGNNTNTPNLPSKEQLETYWASIWEEQKQHNDKASWIADEEAKWRDIDGMEFVEVTESDIIHITTRLHNWKAPGIDKIHNFWYKKLTTLHKSLAKNLTDIVLGQQNIPEFITTGITYMLPKTKYTSEPSQYRPITCLPTIYKILTSAVTKKINSHIVHHNIIAEEQKGCRQGHMGCKEQLIIDSTIHKHATSKNRNLHCTYIDYKKAFDSVPHSWLIQILEIYRINPKIIHFLRHVMLQWKTTLQINSNNNNVTTRQISIKKGIYQGDSLSPLWFCLALNPLSHLLQSCGAGYCLKHSTDETTISHLIYMDDIKLYAKSEKEMKKLVDITAEFSQDINMQFGLEKCKTLHIVRGKVRPGDYELNESDTIAALEPTDLYKYLGYTQLKGLDHVKIKDTLTTEYKKRVNAVCKTQLSGKHLIKALNTFAIPVLTYSFGVIKWTKTDTEQLQRTTRTTLTKHNNLHPKSAIERLTIKREHGGRGLIDIQHLWRKQVSRLKLFFHTKSRTSNIHKAIVTNDLNYTPLNLSDQIETQNTTNDDPQTQKIEDWKKKVLHGRHPHDLEQSHINKLASNKWLKIGNLFPETEGFIIAIQDQIINTKNYRKYIIKDPTVTNDKCRKCHVHPETIQHITGACTTLTQTDYTHRHNQVANVIHQKLALKHTLTQNSNTPYYNYKPETTLENTTHKLYYDRAILTDRTIHYNRPDIILQDKINKVTYLIDIAVPNTHNIQKTITEKISKYAELKEEVTRIWRQEKVYVVPIVLSTTGVIPNHLIHSLKLLDLKETLYITLQKAAILNTCRIVRKFMQIEENEIGPHHNT

SEQ ID NO: 21333 - protein, 1317 aa, Noctua pronuba
METRSKRKRIGPLPGGDRRGTPGADAGCLSMRTVGGEELSRRAPTDKNTTAEIIDDGDRLTDRTDTPVEPYSPSTVSYTPSRRSSPSIPSSPSVLSPPIISSNTVTPTPTLNAARGVSTFLPASTKAGKARVRMKWSKEVNLFIMRTYLHITKLETDMTTYRQQLHTLFTRQYPEITVSEQRVSDQRRIIVRNKLLSQEVIDQLKEEVRTQLLQEETVNYIDANNITQNLSEISHQEQPQSLSQSQLIYSQSQPYNQSQAYTQISHTSTQTESITLMLENDIETIVVPDQQLTTDTYIQEINDKFRTTLTQYSGMDPAARPRLPKLKYTPNLFRLVNLFNESILTQFISDDTQLIDIHLLIYCTAVVISEELNFKITNHTGTPRTRQNLSPAWQQRLENDIEKLRADIGRLTQYINGCRSNKIVKRVEAIFRNNLTHTRHEKDNRKPEEFLDTLKQKLALKVHRLRRYKKAQQRKKDNATFATNEKMFYRNLHKPQTDTIDENNTNTPNLPTKEQLEEYWASIWEEPVQHNDKAAWIAEEEVKWRALDEMEFVEVAETDITHITARLHNWKSPGIDKIHNFWYKKLTSLHKSLAKNLTDIILGQQNTPEFISKGITYMLPKTKNSPQPSQYRPITCLPTIYKILTSAITKKISSHIEHHNIIAEEQKGCRQGHMGCKEQLIIDSTIHKHATTKNRNLHCTYIDYKKAFDSVPHSWLIQILEIYRINPKIIDFIRHIMLQWKTTLQITYNHNAVTTRQISIKKGIYQGDSLSPLWFCLALNPLSHLLQRCGAGYCLKHTTDETTISHLIYMDDIKLYAKTENDMKKLVDVTAEFSKDINMQFGLEKCKTLHIVRGKVRPGDYVLNDTDTISAMEQTDLYKYLGYAQLKGLDHTRIKNTLTNEYKRRVNAVCKTQLSGKHLIKALNTFAIPVLTYSFGVIKWSKTDTEQLERTTRTTLTKHNNLHPKSAIERLTIKRQHGGRGLIDIQHLWRKQVSRLKSFFHSKSRSSSIHKAIVINDLNYTPLNLSHQTETLNTSNDDPQQHKMEDWKRKVLHGRHPHDLEQSHINKLASNKWLKIGNLFPETEGFIIAIQDQIINTKNYRKNIIKDPTVTNDKCRKCHSQPETIQHITGACTTLTQTDYTHRHNQVANVIHQKLALKHTLIQNTSTPYYNYKPEVTLENTTHKIYYDRAILTDKTIHYNRPDIILQDKINKVTYLIDIAVPNTHNIQKTITEKISKYAELKDEVTRIWRQEKVYVVPIVLSTTGVIPNHLLHSLKLLDLKESIYIILQKAAILNTCRIVRKFMQIEENEIGPHHNT

SEQ ID NO: 21334 - protein, 1326 aa, Thyatira batis
METRSKRIRIGPLPGGDRRGTPGADAGCFSMRTVSGEELNRRTPTDKDTTAENIDDGDRLTDRTNTPAEPYSPSTVSYTPSRTSSPSIPSSPPNRILNTVSPTPTLNVAREVNTFLPVSTKAGKPRVRMSWSKDVNIFIMRTYFRITRLETDLTTYRQQLHELFTQQYPGITVSEQRISDQRRIIVRNKLLPPEIIKQLKEETRLHLQEEQDNTDNIGTSLNANETNTQHSQIELTTNTHCQYNYSLTNTQTSHTSTQTESITVMLENDIETIDIPDQNILSDEILQEINNKFRTTLTQYSGMDPAARPKLPKLKYSPKLFRYVNLFNENILNQFTFDDTKLIDIHTLIYCTAVVISEELNFKITDHLINSRPKHKTQPPWQQRLEKDIEKLRADCGRLTQYINNNRSSNVVRRVEAIFQSSLTHTRHENNNRRPEEFLDTLKQKLALKVHRLRRYNKAQQRKNDNALFAKNEKMFYRTLHKPHTDNVNTNDTNTNNTDTNNTNTNNTDTNNTTDIPTKEQLETFWSSIWEEQVQHNDKASWIIDEETKWKAIDEMEFVEITESDISNITARLHNWKSPGLDKIHNFWYKKLTSLHKALAKNLTEIILGKQNIPDFIATGITYMLPKSKNSVQPSQYRPITCLPTIYKILTSAITAKINIHIEHHKIMAEEQKGCRRGHMGCKEQLIIDSTIHKHATTKNRNLHCTYIDYKKAFDSVPHSWLLQILKIYKINPKIIAFLRNIMSQWKTTLQISSNHNTIITRQISIKKGIYQGDSLSPMWFCLALNPLSHLLQRCQAGYNLKHTINQTKVSHLIYMDDIKLYAQTEKDMKKLVVATSEFSKDINMQFGLDKCKTLHIIRGKVKPGNYSINNRDTITAMEPADLYKYLGYSQLKGLDHVRIKNTLTIEYKRRLNAVCKSQLTGKHLIKALNTYAIPILTYSFGVIKWTKTDTEQLERTTRTTLTKHNNLHPKSAIERLTIKRQNGGRGLIDIQHLWQKQVNRLKTFFHTKSLTSNIHKAIVLNDHNYTPLNLMEQVDTQYTNNEDPQKQKIEDWKKKVLHGRHPHDLQQSHINTLASNKWLKIGNLFPETEGFMIAIQDQIINTKNYRKYIIKDPTVTNDKCRKCHSQPETIQHITGACTTLTQTDYTHRHNQVANVIHQKLALKYTLIQNTNTPYYNYTPQTILENTTHKLYYDRAILTDRTIHYNRPDITLQDKVNKITYLIDIAVPNTHNIQKTITEKITKYLELKDEVTRIWRQEKVYIVPIVLSTTGVIPNHLLHSLKLIDLHETLYITLQKAAILNTCRIVRKFMQLEEGEIDPHSQNTHA

SEQ ID NO: 21335 - protein, 1321 aa, Xestia xanthographa
METRSKSKRIGPLPGGDRRGAPGADARCHSMRSVSGEELNRRAPTDKDTTAEIIDDGDRLTDRTDTPVEPYSPSTVSYTPSRRSSPSIPSSPTLSSPPILSLNTFSPTPTLNAARGVSTFFPASTKGGKTRVRMKWSKEVNLFIMRTYLYITKLETDMTTYRQQLQALFTRQYPDITVSEQRISDQRRTIVRNKLLSHEVIDQLKEEVRTQLLQEETLNSTDTNNTTQNVNEIGYQEQPQLFSQSQLISTQSQPYNQSQPSTQMSHASTQTESITLTLENDIETIVVPDQHLTTDTYIQEIHDKFRTTITQYSGMDPAARPRLPKLKYTPNLFRLVNLFNESILTQFISDDTQLIDIHLLIYCTAVVISEELNFKITEHTGTPRARQNLTPAWQQRLEKDIEKLRADIGRLTQYINGRRSNKLVKRVEAIFKNNLTHTRHEKNNRKPEEFLDTLKQKLALKVHRLRRYKKAQQRKKDNATFATNEKMFYHNPQTDTIDENNTNTPNLPTKEQLEEYWASIWEDPVQHNDKAPWIAEEEVKWRAVDEMEFVEVAETDITHITAKLHNWKSPGIDKIHNFWYKKLTSLHKSLAKNLTDIILRQQNTPEFIATGITYMLPKTKNSPEPSQYRPITCLPTIYKILTSAITGKISSHIEQHNIIAEEQKGCRQGHMGCKEQLIIDILFDYIDSTIHKHATSKNRNLYCTYIDYKKAFDSVPHSWLIQILEIYRINPKIIDFIRHIMLQWKTTLQINYNHNAVTTRQISIKKGIYQGDSLSPLWFCLALNPLSHLLQGCGAGYCLKHTTNETTISHLIYMDDIKLYAKTENDMKKLVDVTAEFSKDINMQFGLEKCKTLHIVRGKVRPGDYVVNDTDTISAMEQTDLYKYLGYAQLKGLDHTRIKNSLTSEYKRRVNAVCRTQLSGKHLIKALNTFAIPVLTYSFGVIKWSKTDTEQLERTTRTTLTKHNNLHPKSAVERLTIKRQHGGRGLIDIQHLWRKQISRLKSFFHSKSRSSNIHKAIVVNDLNYTPLNLSHQTETLNTTNDDPQQHKMEDWKKKVLHGRHPHDLEQTHINKLASNKWLKIGNIFPETEGFIIAIQDQIINTKNYRKYIIKDPTVTNDKCRKCHSQPETIQHITGACTTLTQTDYTHRHNQVANVIHQKLALKHTLIQNTSTPYYNYKPEATLENTTHKLYYDRAILTDKTIHYNRPDIILQDKINKVTYLIDIAVPNTHNIQKTITDKICKYAELKDEVTRIWRQEKVYVVPIVLSTTGVIPNHLLYSLKLLDLKESIYITLQKAAILNTCRIVRKFMQIEENEIVPHHNI

SEQ ID NO: 21336 - protein, 1324 aa, Xestia xanthographa
METRSKRKRIGPLPGGDRRGAPGADARCHSMRSVSGLELNRRAPTDKDTTAEIIDDGDRLTDRTDTPVEPYSPSTVSYTPSRRTSPSIPSSPTISSPPIISLNTVSPTPTLNAARGVSTFLPASTKAGKARVRMKWSKEVNTFIMRTYLHITKLETDMTTYRQQLHELFTRQYPEIAVSEQRISDQRRTIVRNKLLSLEEIDRIKAEVRTQLHVESVNNEDTNNIAVTQNTIEITQQEQPQAYAQPESYTQSQPYYQSHTYSQITHTSTQTENVTIMLENDIEVLANIDQNPPTDTRIQEINEKFETALTQYSGMDPAARPKLPKLRYTPKLVRLVNCFNQNILNQYISEETQLIDVHTLIYCTALVISEELNFKITEYTGNTRQPNANKPAWQLRLEKDIEKLRADCGRLTQYINNNRSNKVVKRVEIIFKNMAVHTRHENHNRKPEEFLDTLKQKLALKVHRLRRYKKAQERKNDNALFATNEKNFYRKLQKPQTDTDTPTTENNVELPTTEQLETFWAGIWEDQVHHKETSQWIQDEETKWSSLEEMGFSEISESDVASVTARLHNWKSPGIDKIHNYWYKKLESLHTILAKNLTEIILGKQNIPEFIATGITYMLPKTQYSPQPSQYRPITCLPTIYKILTSAITTKINKHIEHHNIIAEEQKGCRRGHMGCKEQLVIDSIIHKHAATKNRNLHCTYIDYKKAFDSIPHSWLIQILQIYKINPKIIHFLQNIMSHWKTTLQLNYRHTAITTRRITIKKGIYQGDSLSPLWFCLALNPLSDLLRRCQAGYSFKHDTEETVISHLIYMDDIKLYARSEKEMEKLIGTTTEFSKDINMQFGLDKCKTVHIIRGKIKPGDYPINNIDTITALEPTDLYKYLGYKQLKGIDHTAIKHTLNTEFKRRVIAVCKTQLSGKNLIKALNTYAIPILTYSFGVIKWSKTDIQQIERTTRTTLTKHNNLHPKSAIERLTIKRQYGGRGLIDIHHLWQKQITGLRTFFHSKSHTSSIHKAIVKNDINYTPLNLHEPTDTQHINNEDPQQQKLEDWKKKVLHGRHPHDLEQSHVDRKASNKWLKIGSLFPETEGFIIAIQDQIINTKNYRKFIIKDPTITNDKCRKCHSQPETIQHITGACTTLTQTDYTHRHNQVANIIHQNLALKHKLIQDTNTPYYKYVPERFLENTTHKLFYDRAILTDRTIHYNRPDIILQDKANKVTYLIDIAVPNTHNLQKTIGEKISKYAELKEEVTRIWRQEKVYVVPIVVSTTGVVPNHLHHSLQLLDLKDSIYITLQKAAILNTCRIVRKFMQIEDNASHNNHISSHTHTLR

SEQ ID NO: 21337 - protein, 1317 aa, Noctua fimbriata
METRSKKKRIGPLPGGDRRGAPGADAGCLSMRTVSGEELNRRAPTDKDTTAEIIDDGDRLTDRTDNPVEPYSPSTVSYTPSRRSSPSIPSSTTPLSPPIITLNTISPTPTLNAARGVSTFLPASTKAGKARVRMKWSKEVNLFIMRTYLHITKLETDMTTYRQQLHALFTRQYPDITVSEQRISDQRRTIVRNKLLSQEVIDQLKEEVRTQLLHEETVNYTDTNNITQNLSEISHQEQPQSLSQSQISYTQSQPYNQSQAYTQISHTSTQTEYITLTLENDIETIVVPDQHLTTDIYIQEINDKFRTTITQYSGMDPAARPRLPKLKYTPNLFRLVNLFNESILTQFISDDTQLIDIHLLIYCTAVVISEELNFKITDHTRSTRTRQNVAPAWQQRLEKGIEKLRADIGRLTQYINGCRSNKLVKRVEVIFRNNATHTRHEQNNRKPEEFLDTLKQKLALKVHRLKRYKKAQQRKNDNAIFTTNEKMFYRNLHNPKNDRNYENNTNTPNLPSKEQLETYWASIWEEQKQHNDKASWIVDEEGKWRDIDVMEFVEVTESDIIHITTRLHNWKAPGIDKIHNFWYKKLTTLHKSIAKNLTDIILGQQNIPEFITTGITYMLPKTKYTSEPSQYRPITCLPTIYKILTSAVTKKINSHIVHHNIIAEEQKGCRQGHMGCKEQLIIDSTIHKHATSKNRNLHCTYIDYKKAFDSVPHSWLIQILEIYRVNPKIIDFMRHVMLQWKTTLQINSNNNNVTTRQISIKKGIYQGDSLSPLWFCLALNPLSHLLQRCGAGYCLKHSTDETTISHLIYMDDIKLYAKSEKDMKKLVDITAEFSKDINMQFGLEKCKTLHIVRGKVRPGDYAVNESDSITALEPTDLYKYLGYTQLKGLDHVKIKNTLTAEYKKRVNAVCKTQLSGKHLIKALNTFAIPVLTYSFGVIKWTKTDTEQLQRTTRTTLTKHNNLHPKSAIERLTIKREHGGRGLIDIQHLWRKQVSRLKLFFHTKSRTSNIHKAIVTNDLNYTPLNLSDQIETQNTTNDDQQIQKIEDWKRKVLHGRHPHDLEQSHINKLASNKWLKIGNLFPETEGFIIAIQDQIINTKNYRKYIIKDPTLTNDKCRKCHVHPETIQHITGACTTLTQTDYTHRHNQVANVIHQKLALKHTLIQNTNTPYYNYKPETTLENTTHKLYYDRAILTDRTIHYNRPDIILQDKRNKVTYLIDIAVPNTHNIQKTITEKISKYAELKEEVTRIWRQEKVYVVPIVLSTTGVIPNHLIHSLKLLDLKETLYITLQKAAILNTCRIVRKFMQIEENEIGPHHNT

SEQ ID NO: 21338 - protein, 1006 aa, Mesoligia furuncula
MDPAARPKLPKLRYSPCLFRLVNLFNENILTQFISDDTQLIDIHTLIYCTAVVVSEELNFKITQHTGNTRSKQNIKPAWQQRLEKDIEKLRADCGRLTQYINNIRSNKVIRRVEAIFRSSVTHTRHENTNRKPEEFLDTLKQKLALKVHRLRRYKKAQQRKNDNAIFATNEKMFYRNLHKPKTDTNDEDNTVAPDQPTKEQLETYWSSIWEEQEQHNDKATWITEEEIKWRAIEEMEFVEITEADITHLTGRLHNWKSPGIDKIHNFWYKKLTSLHKPIAKNLTEIILGRQNIPDFIATGITYMLPKTINSPQPSQYRPITCLPTIYKILTSAITTKINSHIEHHNIMAEEQKGCRRGHMGCKEQLIIDSTIHKHTTTKKRNLHCTYIDYKKAFDSVPHSWLRKTLEIYRINSKIIDFLRNIMPLWKTTLQINSNHNNVTTRQISIKKGIYQGDSLSPLWFCLALNPLSHLLQRCQVGYCLRHTAEQTTVSHLIYMDDIKLYAQTEKDMKKLVEVTVEFSLDINMQFGLDKCKTLHIIRGKIRPGDYVVNNTDTITAMEPTDLYKYLGYTQLKGLDHVRIKETLTAEYKRRLNTICKTQLSSKNLIKALNTFAIPILTYSFGVIKWTKTDTEQLERTTRTTLTKHNNLHPKSATERLTIKRQHGGRGLIDIQHLWQKQVFRLKTFFHSKSRTSNIHKAIVQNDFNYTPLNLSEQLDTLQITSDDPQIQKIENWKKKVLHGRHPHDLEQSHVNKVASNKFLKIGNLFPETEGFIIAIQDQIINTKNYRKFIIKDPSVTNDKCRKCHSQPETIQHITGACTTLTQTDYTHRHNQVVNVIHQKLALKYTLIQNTNTPYYNYTPQTILENDTHKLYYDRAILTDKTIHYNRPDITLQDKINKVTYLIDIAVPNTHNIQKTISEKISKYAELKDEVTRIWRQQKVYVVPIVLSTTGVIPNYLLHCLKLLNLKETLYITLQKAAILNTCRIVRKFIQIDENEIGPHHNTSLT

SEQ ID NO: 21339 - protein, 1190 aa, Mesoligia furuncula
MRWSKEVNLFIMRTYLYITKLETDLTTYRKQLHELFTRQYPEITVTEQRISDQRRIIVRNKLLSQDIINQLKEEVRTQLQGESENTAGAISIALTQNTTAYNQQEQPCSQTEPIIQSQPITQSQPYFQSQAYSETTHTSTQTESITIMLENEIETLADISINQSTDTHIQEIHDKFKTALTQYSGMDPAARPRLPKLRYTPKLSQLVHLFNQNILQQYISEETHLIDIHTLIYCTALVISEELNFKITEYTGNSRQRNINKPAWQQRLEKDIEKLRADCGRLTQYINNNRSNKVVKRVDAIFKNMATHTRHENDNRKPEEFLDTLKQKLALKVHRLRRYKKAQERKHDNTLFATSEKNFYRNLQTAQTNTNTLTTENNIELPTAEQLETFWSGIWEEQVQHNNNSDWITDEETKWSSLEEMEFVELTESDITCVTARLHNWKSPGIDKIHNFWYKKLESLHKVLAKNLTQIILGKQNIPEFLATGITYMLPKAQYSSQPSQYRPITCLPTIYKILTSAITTKINKHIENHNIIAEEQKGCRRGHMGCKEQLVIDSIIHKHANTKHRNLHCTYIDYKKAFDSIPHSWLIQILQIYKINSKIIDFLQDIMARWRTTLQLNYRNNAITTRQISIKKGIYQGDSLSPLWFCLALNPLSNLLHRSQAGYSIKHTTEETIISHLIYMDDIKLYSKSEKEMKKLIDITTEFSKDINMQFGLDKCKTVHIIRGKIKPGDYPINNTDTITAMEPTDLYKYLGYKQLKGLDHSTIKYTLNSEYKRRVVAVCKTQLSGKHLIKALNTYAIPILTYSFGVVKWSKTDIQQIERTTRTTLTKHNNLHPKSAIERLTIKRQYGGRGLIDVHHLWQKQIAKLRTFFHSKSQTSNIHKAVVMNDISYTPLNLHDQIDIQHTSHEDPHKQKVEDWKKKVLHGRHPHDLEQSHIDTIASNKWLKIGNLFPETEGFIIAIQDQIINTKNYRKFVIKDPTITNDKCRKCHSQPETIQHITGACTTLTQTDYTHRHNQVANVIHQKLALKYKLVQDTNTPYYKYVPQTVLENTTHKLYYDRAILTDRTVHYNRPDITLQDKVNKVTYLIDIAVPNTHNLQKTIGEKISKYVELKEEVSRIWRQEKVYVVPIVVSTTGVIPNHLHHSLKQIDLKDSIYITLQKAAILNTCRIVRKFMQIDENEITPHNINSS

SEQ ID NO: 21340 - protein, 1304 aa, Parnassius apollo
METRSKSKRIGPLPGGDRRGAPGADAGCHSMRSVSGEELNRRAPTHKDTTAELIDDGDRLTDRTDTPVEPYSPSTVSYTPSTPTPPSPPITSLNTVSPTPTLSAAREVSTFLPASTKAGKARVRMKWSKEVNLFIMRTYLYITKLETDMTTYRQQLYAHFTRQYPEITVSEQRISDQRRTIVRNKLLSQEVIDQLKEEVRTQLIQEEATNSYVETNITQNTSENDRQVQPQLLSQSQLIYTQSQPCDHSQISHTSTQTETVILTLENDIETIVVPDQHLTTDTYIQEINEKFRTTITLYSGMDPAARPRLPKLKYTPNLFRLVNLFNETILTQYISDDTQLIDLHLLIYCTAIVISEELNFKITDNARTTRTRQNTEPAWQQRLEKDIEKLRANIGRLTQYINGCRSNKLVKKVEVIFRNNATHTRHEKSNTRPEEFLDTLKQKLALKVHRLKRYKKAQQRKKDNVRFATNEKLFYRNLHKPQTDIIDERNTHTPNLPTKEQLEAYWASIWEEQKQHNDKASWIIEEEAKWRDIDEMEFEEVTELDITLITARLHNWKSPGIDKIHNFWYKKLTSLHKPLARNLTDIITGQQNTPEFIATGITYMLPKTKNSPQPSQYRPITCLPTIYKILTSAITKKIQSHIEHHNIIAEEQKGCRQGHMGCKEQLIIDSTIHKHATSKNRNLHCTYIDYKKAFDSVPHSWLLKILEIYRINPKIIDFLRRIMLQWKTTLQINCNQNTVTTRQISITKGIYQGDSLSPLWFCLALNPLSHLLQSCGAGYCLKLNTDETTISHLIYMDDIKLYAKTDKDMKKLIDITTEFSSDINMNFGLDKCKTLHIVRGKVRPGDYVVNETEAITAMESTDLYKYLGYVQLKSLDHVRIKNSLTTEYKRRLNAVCKTQLSSKHLIKAINTYAIPILTYSFGVIKWSKTDAEQLERTTRTTLTKHNNLHPKSAIERLTIKREHGGRGLMDIQHLWRKQVSRLKSFFYTKSHTSNIHKAIVTNDINYTPLNLSNQIESQNTTSDNPQTHKIDEWKKKVLHGRHPHDLEQSHINKLASNKWLKIGNLFPETEGFIIAIQDQIINTKNYRKYIIKDPTVNNDKCRKCHTHPETIQHITGACTTLTQTDYTHRHNQVANVIHQKLALKHALIPDANTPYYNYRPKHTLENTTHKLFYDRGILTDRTIHYNRPDIILQDKINNITYLIDIAVPNTHNLQKMITEKICKYAELKDEVTRIWQQEKVYVVPIVLSTTGVIPNHLLRSLKLLQLKETLYITLQKAAILNTCRIVRKFMQIEENEIGPHQIT

SEQ ID NO: 21341 - protein, 1286 aa, Heliconius melpomene
METRLRKKLRGPLPEGNRRGAPGADAGCFSIRTVSGEELNRRAPTGDLQPEESTAEHLHTYTSRVNSPSEPYSPSTASYNPSVHSSPTSSVCSRGPPTPLLDVAQEANAFLPASTKAGKPRVRMQWSKDVNLFIMRTYYHITKLETDMTIYRKKLHEQFLLNYPQIKVSEQRISDQRRTIERNKLLSQEILNRLKEEVRIQLQEEETNNVNITEISNHTYIQTRTSSPTTFQYNANSQQTQTSHTFTQTETITQLLENDIEGFVNVQPPNEEYIRIIIDKFRTNLTLYAGMDPKMRPKLPKLRYCRKLYQLSNLFNENILIEYISPDTKLIDLHTLIYCTALTITEELNYKITGHSRINSKSNKYKPSWQYRLEKDIQKLRADIGKLTQFINNNRSKKIIERVEFLLKTTKVHTKHEKNNKRPEEVLDTLKQKLALKSHRLKRYNKAQERKAQNNTFVRNEKQFYRNLLKPQNLIQDKVETPTKEELEKYWSGIWEEQTYHNNQADWITKEEQRWHDLEVMDYNKIVKEDIKEITDKLHNWKSPGIDKIHNFWFKKLTFLHSSLAKNISEIISGQQNIPEFLATGITYMLPKNNFSTQPSQYRPITCLPTLYKIVTSLITQKINKHIENNNIIAEEQKGCRRGHMGCREQLIIDSTIMKHALSKNKNLHCTYIDYQKAFDSIPHSWLLHILNIYKINPKIINFLTNIMTQWKTTLHLHSSNYNINTREIAIKKGIYQGDSLSPLWFCLALNPLSYLLKCNRAGYVLKHDNNETIISHLIYMDDIKLYSKNNKEMKTLIDTTTEFSEDIHMHFGLDKCRTVHIVKGKIRPGDYVINEIDKITAMEPNEFYKYLGLQQLKGLNHTAIKETITNEYKKRINAICKSQLSSKHLIKALNTYAIPILTYTFGIVKWSNSNIEQIERLTRTTLTKHNNLHPKSAIERLTIKRKHGGRGLIDIKHLWQKQLHNLSIFFYTKAQSSDIHKSIVQNDFKYTPLNLNDCQSTENLTNTDPQKKKIEEWMKKVMHGRHPNDLQQPHIDLEASNKWLQTGSLFPETEGFIIAIQDQIINTKNFRKYIIKDPTVTSDKCRRCHTQPETIQHITGACASLTQTDYTHRHNQLVNIIHQILAHKHKLIQDTNIPYYKYTPQSVLENTSHKIYYDRAILTDKTIHFNRPDITLQDKINKTVYLIDVAVPNTHNIQKTIVEKINKYADLKEEVTRIWKQNKVYVVPIVISTTGVVPKAIHHYLKMIDLEDSIIHTLQKAAILNTCRMVRKFLQIEENNISTQN

SEQ ID NO: 21342 - protein, 1303 aa, Zopyrion sandace
METRSKRKRIGPLPGGDRRGTPGADAGCHSMRTVSGDELNRRARTDKDTTAETSDRSDTPIEPYSPSTISYTPSRQSSPSLPSSPLTSSSPQNINHTLPHTPALNVAQGVNTFLPASTKAGKPRVRMSWSKDVNLFIMRTYYHITKLETDMTTYRKQLHERFSQQYPTINVTEQRVSDQRRIIIRNKLLSETELSRLKEEVRVELENTDNYIDTTDTTRNSTQHTTQQATQSQSQDTYTNPHSLTQIHSQSQSHISTQTETITLTVKNDIEILTNRNTITETYTQEILDKFNTALAQYSGMDPTARPRLPKLKYSIKLTQLTNLFNENILNRFLSDDSQLTDIHTLTYCTALVVAEELGYKIGYNVFNRRTEHNKPSWQIRLERDIEKLRADCGRLTQYINNNRSDKVVKRVQTIFRNTIIHTRHDDNNRKPEEFLDTLKQKLALKVHRLRRYKKAQERKDHNTLFATNERLFYRHLHTPQKDTPTTIRTELPTQTDFERFWSGVWEIEIEHNDEADWIAEEINKLSTIDNMEFEDITLTDITNITAKLHNWKTPGIDKIHNYWYKKLTILHEHLAKNITQMIVGNQQIPDFIATGITYMLPKTTHPTQPSQYRPITCLPTIYKIVTSVIALKINTHIEHNNIIAEEQKGCRRGHMGCKEQLIIDSTIHKHTASKNRNLHCTYIDYKKAFDSVPHSWLLQILNIYKISPTITDFLRKIMPTWKTTLQINNSHNTITTRQIFIKRGIYQGDSLSPLWFCLALNPLSRLLQRCRAGYCFTHNNDKTTISHLMYMDDIKLYSQTKADMKKLLKSTTTFSNDIHMQFGLDKCRTLHIIRGKIQPGSYEVSDTDTILAMEPTEFYKYLGYTQQKGLDHTNIKKSLTTEYKRRLNTICKTQLSGRHIIKAINTFAIPILTYSFGVIKWAKTNIENLERTTRTILTKHNNLHPKSAIERLTIKRQDGGRGLIDIQHLWEKQIHNLKTFFHTKSHSSDIHKAICENDHNYTPLNLIEQTYTHNPHTHNPQTQKIDNWKKKTLHGRHPHDLEQSHIDTQASNKWLKVGSLFPETEGFIIAIQDQIISTKNYKKYIIKDPSITNDKCRRCHTQPETIQHITGACSTLTQTDYTHRHNQISNIIHQNLAHKHNLIQNIYTPYYNYKPQNVLENATHKMYYDRAILTDRTIHYNRPDITLTDKLNKTTYLIDISVPNTHNLQKTIAEKINKYTELKEEVIRIWRQDKVYVVPIVLSTTGVIPKHLHHSLKLLDIKDTTYITLQKAAILNTCRIVRKFMQIDENEITPSHTTYTHN

SEQ ID NO: 21343 - protein, 1317 aa, Laothoe populi
METRSKKKLRGPLPGGDRRGTPGADAGCFSIRSVSGEELNRRTPTGSPENTTADNYRHDTLTDRINSPIEPYSPSTTSYAPSTRSSSSTPSSPTINNYRDPPTTALDVAREANAFLPVSTKAGKPRVRMSWSKDVNLFIMRTYYYITKLETDMTAYRKHLHERFSREFPNIKVTEQRISDQRRTIERNKLLSQDTLNKLKDDVRRQLQADKDNNVHSDFPTLTYQDQNHSQFLSQTHEAQSVPNYHKPSFIQASQQSLVHLGPETENNISINFTTQTSHSCTQTESITFMLENDIETLMEPNSTTDAYIREIDEKFRTSLTLYSGLDPTARPKLPKLKYSYKLNELLKIFNNNILNQFLTDDTKLIDTHTLIYSTSIVISQELGYRIVEPTRYNRSRNNSKPAWQRRLETDIEKLRADCGRLTQYVNNNRSKKVVRKVEEIFKSKTIHTTHEACNKTPQEFLDTLKQKLALKVHRLKRYKKTQQRKNDNILFMNNEKTFYRNLWKTNTNINTDKSPTKEQLETFWAGIWEKQVQHNQNADWIKEEEDRWRTTDEMVFSEVTEADIKFITNRLHNWKSPGIDKIHNFWYKKLTSLHKTIAKNLTEIILGTQNIPHFIATGITYMLPKDKITSEPSQYRPITCLPTIYKILTAVISSKINQHIDHHNIIAEEQKGCRRGHMGCKEQLVIDSTIHKHATAKNRNLHCTYIDYKKAFDSVPHSWLIQILKIYKINNKIINFLQNIMKHWKTTLNLNIHNNSIITRQIYIKKGIYQGDSLSPMWFCLALNPLSHLLHHCGAGYHLKHDSEETTISHLIYMDDLKLYAKTAKDMKKLIDTTSYFSKDINMQFGLDKCKSLHIIKGKIRPGDYTVNNTETISAMEPSDLYKYLGYKQLKGLDHMTIKNTLSNEYQRRINLISKTQLSGKHLIKAFNTYAIPILTYSFGIIKWSKTDIEKIERITRTTLTKHNHHHPKSAIERLSIKRQDGGRGLIDIHQLWQKQLFNLKTFFYSKSHTSNIHKAINYNDHNFTPLNLHEQTNQPNPYNNDPQQQKMEDWKKKVLHGRHPHDLQQTHIDTVASNKWLKIGNIFPETEGFMIAIQDQVINTKNYRKYIIKDPTIINDKCRRCHSQPETIQHITGACISITQTDYTHRHNQVTNIIHQKLALKYSLIQNTNTPYYNYKPETILENTSYKLYYDRAILTDRTIHYNRPDITLMDKRNKTTYLIDIAIPNTHNIQKTITEKISKYAELKEEVVRIWNQDKVYVVPIVLSTTGVIPKHIHHSIKLLDLNKSLYITLQKAAILNTCRIVRKFLQIDENDTA

SEQ ID NO: 21344 - protein, 1311 aa, Biston betularia
METRSKRKRIGPLPGGDRRGTSGADAGCFSMRTVSGEELNRRTPTDKDITAETSDDGGRLTDRTNTPVEPYSPSTISYTPSRQSSPSIPSSPPRTSLNSVSPIPALNVARGANPFLPTSTKAGKARVRMRWSKDVNIFIMRTYFYITKLETDMTTYRQQLHELFTQQYPEVKVSQQRISDQKRAIVRNKLLSQEIIQQLKEETRIHLQEEEINSNASPLTQNITENTQQIQSQPLVQLVPNTQTQAYNYSQAHTQKSHMSTQTESIMLMLENDIETLVAVNQNLTTDNYVQEIHEKFITTLAQYSGMDPAARPKLPKLRYSTNLFRLVNLFNENILQQFISDDSQLIDIHTLIYCTAVVICEELNFKITEHTRNKRPRHNNKPPWQQRLETDIEKLRADCGRLTQYINNNRSNKVVRRVEAIFQSSDTHTTHENRNKKPEEFLDTLKQKLALKVHRLRRYKKAQQRKNDNAIFATNEKMFYRNLYNTHTNTNNTDTNAADTPTKEHLETFWSGIWEEQVQHNDKATWITEEETKWRAINEMEFVEITESDITHITSRLHNWKSPGIDKIQNFWYKKLTSLHKSIAKNLTDIVLCKQNIPEFMATGITYMLPKTKNSPQPSQYRPITCLPTIYKILTSAITTKISYHIEHNNIMAEEQKGCRRGHMGCKEQLIIDSAIHKHATAKNRNLHCTYIDYKKAFDSVPHSWLLQILEIYRINPKIIDFLRNIMSQWKTTLQINSTNSTVTTRQIFIKKGIYQGDSLSPLWFCLALNPLSHLLQRCLAGYCFKHTTEQTTISHLIYMDDIKLYAQTQKDMKKLVEATAEFSKDINMQFGLDKCKTLHIIRGKIQPGNYIVNNTDTITAMEPADLYKYLGYAQLKGLDHVRIKGTLTTEYKRRLNAICKSQLSGKHLIKALNTYAIPILTYSFGVIKWTKTDTEQLERTTRTTLTKHNNLHPKSAIERLTIKRQNGGRGLIDIQHLWRKQVSRLKTFFHTKSITSNIHKAIVLNDLNYTPLNLNEQTNIQHTNNDDPQIQKIEEWKKKVLHGRHPHDLEQSHVNTLASNRWLKIGNLFPETEGFIIAIQDQIINTKNYRKYIIKDPSVTNDKCRKCHVQPETIQHITGACTTLTQTDYTHRHNQVANVIHQKLALKYTLINDTNTPYYKYTPQTILENTTHKLYYDRAILTDRTIHYNRPDITLQDKINKVTYLIDIAVPNTHNIQKTITEKISKYAELKDEVTRIWRQEKVYVVPIVLSTTGVIPNHLLHSLKLLNLKETLYITLQKAAILNTCRIVRKFMQIEENDTGFHHNAPLT

SEQ ID NO: 21345 - protein, 1331 aa, Mesoligia furuncula
METRSKRKRIGPLPGGDRRGALGADAECLSMRTVSGEELNRRAPTDKDATADIIDDGDRLTDRINTPVEPYSPSTVSYTPSRPSTPSIPSSPSIPSSPSIPSSPPITSFNSVQPNSTLNVTREVSTFLPASTKAGKARVRMRWSKEVNLFIMRTYLYITKLETDLTTYRKQLHELFTRQYPEITVTEQRISDQRRIIVRNKLLSQDIINQLKEEVRTQLQGESENTAGAISIALTQNTTAYNQQEQPCSQTEPIIQSQPITQSQPYFQSQAYSETTHTSTQTESITIMLENEIETLADISINQSTDTHIQEIHDKFKTALTQYSGMDPAARPRLPKLRYTPKLSQLVHLFNQNILQQYISEETHLIDIHTLIYCTALVISEELNFKITEYTGNSRQRNINKPAWQQRLEKDIEKLRADCGRLTQYINNNRSNKVVKRVDAIFKNMATHTRHENDNRKPEEFLDTLKQKLALKVHRLRRYKKAQERKHDNSLFATNEKNFYRNLQTAQTNTNTLTTENNIELPTAEQLETFWSGIWEEQVQHNNNSDWITDEETKWSSLEEEMEFVELTESDITCVTARLHNWKSPGIDKIHNFWYKKLESLHKVLAKNLTQIILGKQNIPEFLATGITYMLPKAQYSSQPSQYRPITCLPTIYKILTSAITTKINKHIENHNIIAEEQKGCRRGHMGCKEQLVIDSIIHKHANTKHRNLHCTYIDYKKAFDSIPHSWLIQILQIYKINSKIIDFLQDIMARWRTTLQLNYRNNAITTRQISIKKGIYQGDSLSPLWFCLALNPLSDLLHRSQAGYSIKHTTEETIISHLIYMDDIKLYSKSEKEMKKLIDITTEFSKDINMQFGLDKCKTVHIIRGKIKPGDYPVNNTDTITAMEPTDLYKYLGYKQLKGLDHSTIKYTLNSEYKRRVVAVCKTQLSGKHLIKALNTYAIPILTYSFGVIKWSKTDIQQIERTTRTTLTKHNNLHPKSAIERLTIKRQYGGRGLIDVHHLWQKQIAKLRTFFHSKSQTSNIHKAVVMNDISYTPLNLHDQIDIQHTSHEDPHKQKVEDWKKKVLHGRHPHDLEQSHIDTIASNKWLKIGNLFPETEGFIIAIQDQIINTKNYRKFIIKDPTITNDKCRKCHSQPETIQHITGACTTLTQTDYTHRHNQVANVIHQKLALKYKLIQDTNTPYYKYVPETVLENTTHKLYYDRAILTDRTVHYNRPDITLQDKVNKVTYLIDIAVPNTHNLQKTIGEKISKYVELKEEVSRIWRQEKVYVVPIVVSTTGVIPNHLHHSLKQIDLKDSIYITLQKAAILNTCRIVRKFMQIDENEIAPHNINSS

SEQ ID NO: 21346 - protein, 1324 aa, Mesoligia furuncula
METRSKRKRIGPLPGGDRRGALGADAECLSMRTVSGEELNRRAPTDKDATADIIDDGDRLTDRINTPVEPYSPSTVSYTPSRPSTPSIPSSPSIPSSPPITSFNSVQPNSTLNVTREVSTFLPASTKAGKARVRMRWSKEVNLFIMRTYLYITKLETDLTTYRKQLHELFTRQYPEITVTEQRISDQRRIIVRNKLLSQDIINQLKEEVRTQLQGESENTAGAISIALTQNTTAYNQQEQPCSQTEPIIQSQPITQSQPYFQSQAYSETTHTSTQTESITIMLENEIETLADISINQSTDTHIQEIRDKFKTALTQYSGMDPAARPRLPKLRYTPKLSQLVHLFNQNILQQYISEETHLIDIHTLIYCTALVISEELNFKITEYTGNSKQRNINKPAWQQRLEKDIEKLRADCGRLTQYINNNRSNKVVKRVDAIFKNMATHTRHENDNRKPEEFLDTLKQKLALKVHRLRRYKKAQERKHDNSLFATSEKNFYRNLQTAQTNTNTLTTENNIELPTAEQLETFWSGIWEEQVQHNNNSDWITDEETKWSSLEEMEFVELTESDITCVTARLHNWKSPGIDKIHNFWYKKLESLHKVLAKNLTQIILGKQNIPEFLATGITYMLPKAQYSSQPSQYRPITCLPTIYKILTSAITTKINKHIENHNIIAEEQKGCRRGHMGCKEQLVIDSIIHKHANTKHRNLHCTYIDYKKAFDSIPHSWLIQILQIYKINSKIIDFLQDIMARWRTTLQLNYRNNAITTRQISIKKGIYQGDSLSPLWFCLALNPLSNLLHRTQAGYSIKHTTEETIISHLIYMDDIKLYSKSEKEMKKLIDITTEFSKDINMQFGLDKCKTVHIIRGKIKPGDYPINNTDTITAMEPTDLYKYLGYKQLKGLDHSTIKYTLNSEYKRRVVAVCKTQLSGKHLIKALNTYAIPILTYSFGVVKWSKTDIQQIERTTRTTLTKHNNLHPKSAIERLTIKRQYGGRGLIDVHHLWQKQIAKLRTFFYSKSQTSNIHKAVVMNDISYTPLNLHDQIDIQHTSHEDPHKQKVEDWKKKVLHGRHPHDLEQSHIDTIASNKWLKIGNLFPETEGFIIAIQDQIINTKNYRKFIIKDPTITNDKCRKCHSQPETIQHITGACTTLTQTDYTHRHNQVANVIHQKLALKYKLVQDTNTPYYKYVPQTVLENTTHKLYYDRAILTDRTVHYNRPDITLQDKVNKVTYLIDIAVPNTHNLQKTIGEKISKYVELKEEVSRIWRQEKVYVVPIVVSTTGVIPNHLHHSLKQIDLKDSIYITLQKAAILNTCRIVRKFMQIDENEITPHNINSS

SEQ ID NO: 21347 - protein, 1306 aa, Omphaloscelis lunosa
METRSKRKRIGPLPGGDRRGTPGADAGCLSMRTVSGEELNRRAPTDKDATAEAIDDGDRLTNRTDTPVEPYSPSTVSYVPSKTPSPSISSSSIPSSPPIPSFNTVSPSPVLNVAREVSTFLPASTKAGKARVRMRWSKEVDLFIMRTYLYITKLETDMTTYRQQLHERFSRQYPEISVSEQRISDQRRTIVRNKLLSQGELDQLKEEVHTQLQQDTNTIILTQNTNENSIQDQPQSLTQSQPNFESQPYNQSQTSHISTQTESITLTLENDIETVAAVNQNPITDMYIQEIHDKFRTTLTQYSGMDPAALPKLPKLKYSPNLFRLVNLFNEDILKQFLSDDTQLIDINTLVYCTAVVISEELNFKITEHARNTIQRDTVKPPWQLRLEKDIEKLRADCGRLTHYINGSRSHKVVKRVEAIFKNNFTHTRHEINNRKPEQFLDTLKQKLALKVHRLRRYLKAQQRKKDNAIFATNEKLFYRNIQKPHTDSTTENDTDIPSKENLETFWSNIWEEQVHHNDKATWITEEATKWTAIDEMEFKEITESEITYLTARLHNWKSPGIDKIQNFWYKKLTILHKSIAKNLTDIVLGEQNIPEFIATGITYMLPKTKNTSEPSQYRPITCLPTIYKILTSAITNKINSNIEHHNIIAEEQKGCRRGHMGCKEQLVIDSTIHKHATTKNRNLHCTYIDYQKAFDSIPHSWLIQILEIYKINPKIIEFLRIVMTRWKTTLHINNRLGTLLTRQIHIKKGIYQGDSLSPLWFCLALNPLSHLLNRCRAGYNFKNNTGETIISHLIYMDDIKLYAKTVKEMKTLIEVTTTFSQDINMQFGLDKCRTLHIIKGKVKPGNYPVNDTDTIAAMEPTDLYKYLGYKQLKGLDHTTIKQTLNTEYRGRINAICKTQLSGKHLIKALNTFAIPILTYSFGVIKWSKTDIEHLERITRTTLTKHNNLHPKSAIERLTIKRQNGGRGLIDIHHLWQKQITSLKTFFYTKSRTSNIHKAIAQNDFNYTPLNLNEHRDTTQITSDDPYEQKIENWKKKVLHGRHPHDLEQSHVNKLASNKFLKIGNLFPETEGFIIAIQDQIINTKNYRKFIIKDPSVTNDKCRKCHIQPETIQHITGACTTLTQTDYTHRHNQVANVIHQKFAVKYTLIQDTNTPYYNYIPQTILENDTHKLYFDRAILTDKTIHYNRPDITLQDKINKVTYLIDIAVPNTHNIQKTISEKISKYAELKDEVTRIWRQQKVYVVPIVLSTTGVIPNHLLHSLKLLNLKETLYITLQKAAILNTCRIVRKFMQIDEYEIGPHNTSST

SEQ ID NO: 21348 - protein, 1341 aa, Hemaris fuciformis
METRSKKKLRGPLPGGDRRGTPGADAGCYSMQTVSGEELSRRAPTGSPESITAANDFDRLTDSNTNSPIEPYSPSTKSYTPSTCTSPSIPTSSPHNSFRDPSTLAADVPREVNTFLPAATKAGKPRVRMSWSKDVNTFIMRTYYYITKLETDMTTYRKQLHELFSQKYPSIKVTEQRLSDQKRAIERNKLLPQDVLDEIKEEVRNQLNEQIDNNDRNRHVHISSHDHNETQSLHQSFITCSGTQLLPQLSYTMPHNIDNLTDLELHTVNLPHNQSTQISHVSTQTETITLTIESDIDKLTDPNIPSDTYIKDLQDRLTTNLTLYAGLDPESRPKLPKLKYSRKLTSLLKIFNENILHEYLNESTNLVDIHTLIYCTALIISEELDVKIRGTKNTVYIKQGQNSKPAWQYRLEKDIEKLRADCGRLTQYINNNRTKKIVKKVEEIFKNQTIHTKHEENNKKPEEFLDTLKQKLALKAQRLKRYKKAQQRRQDNHLFATNEKIFYRQLGSKFKNGNCEKFDNAPSKEDLESFWAEIWEDPVRHNDKADWIKEEEIRWSTIEEMEFTEITESDIKLTTAKLHNWKSPGIDKIHNFWYKKLTSLHRAIAKNLTDIILRRQSIPDFLATGITYMIPKDKPTSYPSQYRPITCLPTIYKILTSVISYKINTHIENHNILAEEQKGCRRGHMGCKEQLVIDSTIHKHAATKSRNLHCTYIDYKKAFDSIPHSWLIQILKIYKINRNLVEFLQNIMPYWKTTLHLNNHINSVKTRQVHIKKGIYQGDSLSPLWFCLALNPISYILNNCRAGYRLENKSENTNISHLIYMDDIKLYAKNEKDMKKLIEITTQFSKDINMQLGLDKCKTLHIIKGKVRPGDYTVSNEETITAMEPTDLYKYLGYKQLKGLDHTNIKHTLTAEYRKRINAICKSQLSGKNLIKAINTYAIPILTYSFGIIKWTKTDIEQIQRTTRTTLTKHNHHHPKSAIERLTIKRELGGRGLIDVYHLWQKQIFSLRTFFHTKSHTSNIHNTIAQNDHNFTPLNLHDETNQNNPNNSNQQELKLSDWKKKVLHGRHPHDLEKPHIDSIGSNKWLKIGNLFPETEGFIVAIQDQIINTKNYRKFIIKDPKLTNDKCRRCHTQPETIQHITGACTRLAQTDYTHRHNQIVNIIHQSLAIKYSLIENTKTPYYRYTPETVLENSSHKMYYDRAILTDRTIHYNRPDITLQDKINKITYVIDIAVPNTHNILKTIAEKSSKYLDLKDEITRIWRQEKVYVVPIVLSTTGVIPNHLHHSLSLLKLNKSLYISLQKAAILNTCRIVRKFMQIEENEIVQQNTNPNHDATILPFHNT

SEQ ID NO: 21349 - protein, 1286 aa, Thymelicus sylvestris
METRSKSKRLGPLPGGDRRGTPGADAGCFSMRTVSGEELNRRAPSGSPENTTANQIDDNRSLNSSTSAIEPYSPSTASYIPSPVSITDEMSRGAPTPVLSVAQEVNTFLPVSTKAGKPRVRMKWSKEVNMFIMRTYYYITKLETDMTIYRKQLHELFSLQFPEIKVSEQRISDQRRSIIRNKLLSQEIINQIKEEVRAKLQKNIENTDNNIGADDTTPSYQIPSHTQLYTNTISQTLLGPVTQISHTSTQTESETFILESDIEILVDSDPSIDNHIDKIRAKLKSALMNFSGMDPTMRPKLPKLKYSSKLSRLVDIFNKHILLQFLAPDAKLEDIHTLIYCTAVVIAEELDYKINDHTNHVRTKRNSKPPWQIRLERDIEKLRADCGRLTQYIHNNNRSKKVVKKVEEIFRSRMTHTRHENNNKKPEEFLDTLKQKLATKVHRLRRYIKAQQRKSDNILFASNEKQFYRKLVTKQIDKTPTKNLDIPTKTQLELFWGGIWEEETQHSDQADWIKEEENRWNSIKEMEFGEITEIDIAHITAKLHNWKSPGIDKIHNYWWKKLTSVHRHIAKNLTQIILGKQNIPTFIATGITYMIPKTTYSSQPSQYRPITCLPTIYKILTSAITIKINNHILHNEILAEEQKGCRQGHMGCKEQLIIDSTIHKHAAEKNRNLHVTYIDYKKAFDSIPHSWLLKILQIYKINPTIVNFIRNIMSHWKTTLQVNANDNTITTRQISFKRGIYQGDSLSPLWFCLALNPLSNLLHQCQVGYSFKHTKEKTLISHLIYMDDIKLYSKTHNDMKKLLDTTVEFSNSIKMEFGIDKCKTLHIIKGKVRPGDYTIDSDYTITALDSTDIYKYLGYKQLKGLDHTKLKQTLTTEYKRRINAICNTQLSGRHTIKALNTYAIPVLTYSFGVIKWSKTDIEQIERNTRTTLTKHNYLHPKSAIERLTIRRHEGGRGLIDLHHLWQKQIYHLKSFFHTKSRTSNIHKSICLNDHNFTSLNLNENSNTVDPRNIDPQEKKVENWKKKTLHGRHPYDLEQAHIDPVASNKWLKVGNLFAETEGFLIAIQDQIINTKNYKKFIIKDPSVTNDKCRKCHAQPETIQHITGACTTLTQTDYTRRHNQVANIIHQQLALKHNLIQNTNTPYYRYTPPTVLENSSYKLYYDRAILTDKTIHYNRPDITLQDKINKTTYLIDIAVPNTHNIPKTIAEKISKYAELKEEVSRIWRQDKVYIVPIVLSATGVIPKHLHHSLKLIGLKDTLYVTLQKAAILNTCRIVRKFMQIEENN

SEQ ID NO: 21350 - protein, 766 aa, Heliconius cydno
MEYNEIVKEDIKEITDKLHNWKSPGIDKIHNFWFKKLTFLHSSLAKNISEIISGQQNIPEFLATGITYMLPKNNFSTQPSQYRPITCLPTLYKIITSLITQKINKHIENNNIIAEEQKGCRRGHMGCREQLIIDSTIMKHALSKNKNLHCTYIDYQKAFDSIPHSWLLHILSIYKINPKIINFLTNIMTQWKTTLHLHSSNYNINTREIAIKKGIYQGDSLSPLWFCLALNPLSYLLKCNRAGYVLKHDNNETIISHLIYMDDIKLYSKNNKEMKTLIDTTTEFSEDIHMHFGLDKCRTVHIVKGKIRPGDYVINEIDKITAMEPNEFYKYLGLQQLKGLNHTAIKETITNEYKKRINAICKSQLSSKHLIKALNTYAIPILTYTFGIVKWSNSNIEQIERLTRTTLTKHNNLHPKSAIERLTIKRKHGGRGLIDIKHLWQKQLHNLSNFFYTKAQSSNIHKSIVQNDFKYTPLNLNDCQSTGNLTNIDPQKKKIEEWKKKVMHGRHPNDLQQPHIDLEASNKWLQTGSLFPETEGFIIAIQDQIINTKNFRKYIIKDPTVTSDKCRRCHTQPETIQHITGACASLTQTDYTHRHNQLVNIIHQRLAHKHKLIQDTNIPYYKYTPQSVLENSSHKIYYDRAILTDKTIHFNRPDITLQDKINKTVYLIDVAVPNTHNIQKTIVEKINKYADLKEEVTRIWKQNKVYVVPIVISTTGVVPKAIHHYLKIINLEDNILHTLQKAAILNTCRIVRKFLQIEENNINTLN

SEQ ID NO: 21351 - protein, 1286 aa, Cecropterus bathyllus
MRRSIRIKNKYSAQSGTVAETISHPSSPSSSTRSLFQSPNSTPLSFENRSNSVSRSTTISPMSVDIEQTHNITIPVSAVARGANAFLPTSTKAGKPRIRMKWNQDVNIFIMRTYYHITKLETDMTTYRKKLHELFSNQYPDIKVSEQRISDQRRMIIKNRYLTQEILHNLKEEVARQLKEEENMHEIDHGDNQVHLEVDRNTLEFQTQLQNNSSQSYNLSQPNTQTFIATSHSSTQTEFITLPLENETDITADLVPPNDIAFQDMYDKLQTTLTQYSGVDPTARPKLPKIKHTKHLNSLVHLFNQHILHRLISNEMQLNDIHTLIYCTALVIAEELNYKITHNTTHKKPKDHTKPSWQIRLERDIENLRVDIGRLTQYINNNRSDRLVKKVQHIFNRIPTHTKHESNNRKPEEFLDTLKQKLALKTHRLKRYKKTQQRKMDNSQFATNEKLFYRNLCQPKIDFTTKRDNHTKIPTKEEIETYWANIWEKNISHNDKADWIAEEQAKWKVIDEMKFEEITEIDITTATARLHNWKAPGVDKIHNFWYKKLTTLHEPLARAITQIILGNQNIPNFITIGITYMLPKTNNSTQPSQYRPITCLPTIYKILTSTITMKINSHIEHHNILAEEQKGCRRGHMGCKEQLVIDSIIHKHATSKHRNLHCTYIDYKKAFDSIPHSWLIQILQIYRIHPTIIDFLRNIMQLWKTTLHLNQGNKYISTRQININKGIYQGDSLSPLWFCLALNPLSNLLHNCQTGYRFNNSPEKTTISHLIYMDDIKLYAKTHKDMQTLIEKTTQFSKDINMQFGLDKCKSLHIVKGKIQSGDYRVNDTEVISAMEPTDVYKYLGYNQLKGLLHTPIKHELTTEFKRRIDAICKTHLSGKHLTKAINTYAIPILTYSFGIIKWTKTDIEQLERITRTTLTKHNHLHPKSAVERLNIKRQDGGRGVIDINHLWLKQINNLRHFFFMKSSTSNIHSAITHNDENLTPLNLSDLTDQHTLNDGNPQLKKIENWKNKVLHGRHPHDLEHTHVDKIASNKWLKVGNLFPETEGFIIAIQDQVINTKNYRKHIIKDPNVKNDKCRRCHTQPETIQHITGACTNLTQTDYTHRHNQVTNIIHQNLALKHNLIQNTNTPYYRYTPQTVIENTSHKLYYDCAILTDRTIHYNRPDIILQDKLNKITYLIDIAVPNTHNIQKTIVEKINKYIELKEEVARIWKQNKVYVVPIVLSTTGVIPYHLHQSLKLIGLQHSLYIPLQKAAILNTCRIVRKFMQLDEKEVGSHNLNQPVPPP

SEQ ID NO: 21352 - protein, 1273 aa, Arctia plantaginis
MRNKNNKYNLRPLPGGRRDSIRNNNINNQTDRQTDNDNISLNSLKSLSVTEPYSPSTSSYRPTPVSFVDEDSHETPNPTLAVTQEVNAFLPASTKSGKPRVRMRWSKEVNLFIMRTYYQITKLETDMTTYRKQLHELFTRHYPDINVTEQRIADQRRTIVRNKLLTEETLHILKEEIRMQLQQNEHIYEYIENNSNPQLHNTQSVTTALPTQSQPHTITQSSQISTQPETITLTLENDIEIMQNVNPSSDKIQKIQDKFRTALALYSRMDPITRPKLPKLKYSRKLSELTHFFNHNILHQFLSEDTQLTDIHTLIYCTALVISEELNYKIIDHPRNILRKNSKPPWQIRLEKDIEQLRADCGRLTQYINNNRSNKIVKRVEQIFRRQSTHTRHENNNRKPEEYLDTLKQKLALKVHRLKRYKKAQQRKNDNMLFTLNEKSFYRNLSKPQTATTRPENIDIPTQTQLETFWSGIWEEPVQHNDKADWITEEENKWNSIEEMEFDCITEDDIAHVTGKLHNWKSPGIDKIHNYWYKKITSFHKPIAKNLTYIILGKQNIPEFIGMGITYMLPKTAHSPQPSQYRPITCLPTIYKILTSAIAHKINMHIEHNHIIAEEQKGCRRGHMGCKEQLIIDSTIHKHATTKNRNLHCTYIDYKKAFDSIPHSWLIKILHIYKINPKITDFMRDIMSHWKTTLHLNMNDRTVTTRQISIKKGIYQGDSLSPLWFCLALNPLSHLLQRCQAGYRLRNSTEETIISHLIYMDDIKLYAKSDKEMTKLLQNTTKFSKDINMEFGLDKCKTLHIIRGKIRPGDYAVDESSTIAAMESTDLYKYLGYKQLKGLDHTSIKQILATEYKSRTNTLCKTQLSAKNLIKALNTYAIPILTYSFGIIKWTKTDIEQIERTTRTTLTKHNNLHPKSAIERLTIKRENGGRGLIDIYHLWQKQVYNLKTFFRTKSHTSNIHKAITLNDYNFTPLNLNDHTGIHNPNNIDPQADKIENWKKKVLHGRHPHDLEQPHIDTIASNSWLKIGNLFPETEGFIIAIQDQIVNTKNYRKYIIKDATVTDDKCRKCHIQSETIQHITGACITLTQTDYTHRHNQITNIIHQKLALKHHLIQNTNTPYYNYTHQSVLESSSHKLYYDRAILTDRTIHYNRPDITLQDKINKTTYLIDIAVPNTHNLQKTITEKISKYTELKEEIIRIWRQEKVYIVPIVLSTTGVIPKHLHHSLKLINLNESVYFNLQKAAILNTCRTVRKFMDIEENGTAQHTQQPPSTST

SEQ ID NO: 21353 - protein, 1301 aa, Spodoptera litura
METRSKKKRIGPLPGGDRRGTPGADAGCFSMRSVSGVELNRRASTKKHVTAEISDDADLQTNRSNTPLEPYSPSTISYTPSRSSSPSIPSSPVSHTVSPTPALNVARGANAFLPASTKAGKPRVRMKWSKEVNIFIMRTYFYITKLETDMTIYRKVLHELFCRQYPEVNVSEQRISDQRRTIVRNKLLSQEIIDQIKEETRKQLEAESENSSNTDLSPQNIQTNDQQTQPLTQTQPLNMQSQPYNYTQITHSSTQTESITLTLENDIDTLTAVEQAPITEEYTQQLYDKFQTTLTQYSGMDPASRPRLPKLLYNRNLFRLVNLFNESILAHFISEDNQLTDLHTIIYCTALVISEELNFKITENTGNSRPRISIKPPWQQRLEKGIEKLRADCGRLTQYINNNRSNKVVKRVEAIFKNTRIHTRHENNNRTPHEFLDTLKQKLALKVHRLRRYKKAQQRRNDNAIFAKNEKIFYRKLNTSHTNISDNQSTIPSKEQLESFWAGIWEESISHNDRSAWITEEETKWAGIDEMEFIEITESDIANVTGRLHNWKSPGIDKVHNFWYKKLTILHKHIAKNLTEIVLGKQRIPEFIATGITYMLPKAKHSSQPSQYRPITCLPTIYKILTSAITIKVNAHIERYKIMAEEQKGCRRGHMGCKEQLIIDSTIHKHATSKNRNLHCTYIDYKKAFDSVPHSWLIKILEIYKINNKIVDFLRNIMPHWKTTLQINTTNDNVVTRQIRIKKGIYQGDSLSPLWFCLALNPLSHLLQRCHAGYCLKHSSDETVISHLVYMDDIKLYAKSDKDMKTLVDITATFSNDINMQFGLDKCKTLHIVRGKIQPGNYVVNDRDIITAMEQTDLYKYLGYTQLKGLDHIKIKNSLTTEYKRRLNAVCKTQLSGKHLIKAINTFAVPILTYSFGVIKWTKTDTEQLERTTRTTLTKHNNLHPKSAIERLTIKRQNGGRGLIDISHLCQKQICKLKSFFHSKSQTSDIHKAIVSNDTNYTPLNLNEPIDVENFNETDPQKEKLENWKRKVLHGRHPHDLEQAHVNTIASNKWLKIGNLFPETEGFIIAIQDQIINTKNYKKYIIKDPTVTDDKCRKCHIQPETIQHITGACTTLTQTDYTHRHNQIVNVIHQKLALKYTLIQNTNTPYYKYTPETVLENTTHKLYYDRAILTDRTIHYNRPDITLQDKVNNITYLIDIAVPNTHKIQKTITEKITKYAELKDEVARIWKQNKVYVVPIVLSTTGVIPNHLLHSLKLLDLKETLYITLQKAAILNTCRIVRKFMQIEDNEINHQTTPTNT

SEQ ID NO: 21354 - protein, 1184 aa, Mythimna ferrago
MRWSKEVNLFIMRTYLYITKLETDMTTYRQQLHERFTRQYPEITVSEQRIADQRRAIVRNKLLSQEIIEQLKEETRLQLQESEGNTDRTTLSQNTTKIDRHPQTQPHTQLESSSSQLYNQSQDYTQTSHRSTQTESLTLMLENDVETLVVPEQNLATELYIQEINDKFRTTLTLYSGMDPAVRPKLPKLRHSRDLIRLVNLFNENILNQFISDDTQLIDIHTLIYCTAVVICEELKFKISQDTGNLRTKQNVKPAWQHRLEKDIDKLRADCSRLTQYINNNRSSKVVKRVEAIFRSSNSKHTRHENNNRKPEEYLDTLKQKLSLKVHRLKRYKKAQQRKIDNTTFSTNEKMFYRNLRKSDTNTSTENSSDTIDIPTKEQLEAYWSSIWEERVQHNDEATWIAEEETKWRAIEEMDFLEITESDVTHVTGRLHNWKAPGIDKIHNFWYKKLTSLYKPIAKNLTEIILGQQNIPEFITTGITYMLPKNKTSPQPSLYRPITCLPTIYKILTSLITIKINSHIERHNIMAEEQKGCRRGHMGCKEQLIIDSTIHKHASTKNRNLHCTYIDYKKAFDSVPHSWLIQILQIYKINSKIIDFLRNIMSQWKTTLQINHDNNRVITRQIYIKKGIYQGDSLSPLWFCLALNPLSRLLQRSRAGYCFKHSTNQTTISHLIYMDDIKLYAQTEKDMKKLVEATAEFSQDINMQFGLDKCKTLHIIRGRIRPGSYVVNDTDTITAMESNDLYKYLGYMQLKGLDHVRIKDTLTTEYKKRLNTLCKTQLSGKHLIKAINTFAIPILTYSFGVIKWTKTDTEQLERITRTTLTKNNHLHPKSAIERLTIKRQNGGRGLIDVQHMWRKQVFKLKSFFETKSRTSKIHKAVVLHDSNYTPLNLNARLDTQNINNDNPQTQKMEDWKRKVLHGRHPHDLEQSHVNKIASNKWLVVGSLFPETEGFMIAIQDQIINTRNHRKYIIKDPSVTDDKCRKCHLQPETIQHITGACTTLTQTDYTHRHNQVANVIHQSLAVKYTLIQNTNTPYYNYTPQTVLENDTHKLYYDRAILTDRTIHYNRPDITLQDKINKITYLIDIAIPNTHNIKKTITEKISKYAELKDEVTRIWRQEKVYVVPIVLSTTGVIPNCLLHSLKLINLKESLYITLQKAAILNTCRIVRKFMQIDENALGPPHNTPLT

SEQ ID NO: 21355 - protein, 1318 aa, Hydraecia micacea
METRSKRKRLGPLPGGDRRGALGADAECLSMRTVSGEELSRRAPTDKDATADIIDDGDRLTDRTNTPVEPYSPSTVSYTPSRPSTPCVPSSPSISSSPPITSFNSAQPTSTLNVTREVSTFLPASTKAGKARVRMRWSKEVNLFIMRTYLYITKLETDLTTYRKQLHELFTRKYPEITVTEQRISDQRRIIVRNKLLSQDVINQLKEEVRTQLQGESENTAGEITIALTQNTTAYNEQEQPCSQTEPITQSQPYFQSQAYSQTTHTSTQTESITVMLENEIETLADININQSTDTHIQEIHDKFKTALTQYSGMDPAARPRLPKLRYTPKLSQLVHLFNQNILQQYISEETRLIDIHTLIYCTALVISEELNFKITEYTGNSRQKNINKPAWQQRLEKDIEKLRADCGRLTQYINNNRSNKVVKRVEAIFKNMAIHTRHENDNRKSEEFLDTLKQKLALKVHRLRRYKKAQERKNDNSLFATNEKNFYRNLQTAQTDTNTRTTENNVELPTTEQLETFWSGIWEEQVQHNKNSNWIIDEETKWSSLEEMEFVELTESDITCVTARLHNWKSPGIDKIHNYWYKKLESLHKVLAKNLTQIILGKQNIPEFIATGITYMLPKAQYSPQPSQYRPITCLPTIYKIITAAITRKINKHIEHHNIIAEEQKGCRRGHMGCKEQLVIDSIIHKHAATKHRNLHCTYIDYKKAFDSIPHSWLIQILQIYKINSKIIDFLQDIMARWRTTLQLNYQNNAITTRQISIKKGIYQGDSLSPLWFCLALNPLSDLLHRSQAGYSLKHATEETIISHLIYMDDIKLYSKSEKEMKKLIDITTEFSKDINMQFGLDKCKTVHIIRGKIKPGDYPINNTDTITAMEPTDLYKYLGYKQLKGLDHSTIKYTLNSEYKRRVVAVCKTQLSGKHLIKALNTYAIPILTYSFGVIKWSKTDIQQIERTTRTTLTKHNNLHPKSAIERLTIKRQYGGRGLIDVHHLWQKQIAKLRTFFHSKSHTSNIHKAVVMNDISYTPLNLHEQIDIQHTGDEDPHKQKLEDWKMKVLHGRHPHDLEQSHIDTIASNKWLKIGNLFPETEGFIIAIQDQIINTKNYRKFIIKDPTIINDKCRKCHSQPETIQHITGACTTLTQTDYTHRHNQVANVIHQKLALKYKLIQDTNTPYYKYVPQTVLESTTHKLYYDRAILTDRTVHYNRPDITLKDKVNNITYLIDIAVPNTHNLQKTIGEKISKYAELKDEVTRIWRQEKVYVVPIVVSTTGVIPNHLHHSLKLIDLKDSIYITLQKAAILNTCRIVRKFLQIEENEISPPNNNSS

SEQ ID NO: 21356 - protein, 1315 aa, Eupsilia transversa
METRSKRKRIGPLPGGDRRGAPGADAGCHSMRTVSGEELNRRASTDKDATAEISDDGDRLTDRINTPVEPYSPSTVSYTPSRASSPSIPSSPIPSSPPITSLNSIQPTPTLNVAREASSFLPASTKAGKARVRMRWSKEVNLFIMRTYFYITKLETDMTTYRQQLHELFSQQYPEITVSEQRISDQRRAIVRNKLLSQEIIEQLKEETRIKLQETENNTGANAILLSQNITEIAEQPHTQVESYTQSQSYNQTQAYTQTSHTSTQTESITLTLENDIETLTVPDQNLTTDIYIQEIHDKFRTTLAQYSGMDPTVRPKLPKLRYSPNLFRLVNLFNENILNQFISDDTQLIDIHTLIYCTAVVVSEELNFKITQHTGNTRPKQNIKPAWQQRLEKDIEKLRADCSRLTQYINNIRSSKVVRRVEAIFRSSPTHTRHENNNRKPEEFLDTLKQKLSLKVHRLRRYKKAQQRKNDNAIFATNEKMFYRNLHKLDTDTNDENNTDAANQPTKEQLETYWGSIWEEQQQHKDKATWITEEETKWRAIDEMEFVEITEADITHLTGRLHNWKSPGIDKIHNFWYKKLTSLYKPIAKNLTEIILGQQNIPDFIATGITYMLPKTKNSPQPSQYRPITCLPTIYKILTSAITTKINSHIEHHNIMAEEQKGCRRGHMGCKEQLIIDSTIHKHAATKNRNLHCTYIDYKKAFDSVPHSWLIHILEIYRINSKIIDFLRNIMPLWKTTLQLNCNQNNVTTRQIFIKKGIYQGDSLSPLWFCLALNPLSHLLQRCRAGYCLKHTIEQTTVSHLIYMDDIKLYAQTEKDMKKLVEATAEFSLDINMQFGLDKCKTLHIIRGKIRPGNYVVNNTDTITAMESTDLYKYLGYTQLKGLDHVRIKETLTAEYKRRLNAICKTQLSGKNLIKALNTFAIPILTYSFGVIKWTKTDTEQLERTTRTTLTKHNKLHPKSAIERLTIKRQNGGRGLIDIQHLWRKQVSRLKTFFHSKSRTSNIHKAIAQNDFNYTPLNLNEQPDTPEITCDDPQTQKIEDWKKKVLHGRHPHDLEQSHVNKVASNKFLKIGNLFPKTEGFIIAIQDQIINTKNYRKFIIKDPSVTNDKCRKCHIQSETIQHITGACITLTQTDYTHRHNQVANVIHQKLALKYTLIQDTNTPYYNYTPQTILENDTHKLYYDRAILTDRTIHYNRPDITLRDKINKVTYLIDIAVPNTHNIQKTITEKISKYAELKDEVARIWRQEKVYVVPIVLSTTGVIPNHLLHSLKLLNLKETLYITLQKAAILNTCRIVRKFMQINENEIGPHHNTSVT

SEQ ID NO: 21357 - protein, 834 aa, Deilephila porcellus
MFYRQLRSPQTDTSTQNTETIPTKEELESYWASLWEEQKQHNDQADWINEEKNRWNTIEEMEFDEVTEGDIKIITTKLHNWKSPGIDKIHNFWFKKLTSLHKAIAKNFTEIILQKQNIPEFIATGITYMLPKDKVTTHASQYRPITCLPTIYKILTAVISSKINIHIENHNIIAEEQKGCRRGHMGCKEQLVIDSVIHKHATNKNRNLHCTYIDYKKAFDSIPHSWLIQILKIYRINKNIIDFLQNIMKYWKTTLHLTSRNRSVTTREISIRKGIYQGDSLSPLWFCLALNPLSQILNNYRTGYHLKHASDNITISHLIYMDDIKLYAKSEKDMKTLLEATSTFSKDINMHFGLDKCKTVHIVRGKIRPGDYTINDSDSITALEPTDLYKYLGYKQLKGIDHTKIKNSLSVEYQRRINTICKTQLSGKHLIKALNSYAIPIMTYSFGIIKWSKTDIEKIERTTRTTLTKHNYLHPKAAVERLTIKRETGGRGLIDIYHLWLKQLYKLKTFFITKSHTSTIHNAITHNDNNFTPLNLHDPTNLQNPNDIDRQQKKIEDWKKKVLHGRHPHDLEQTHIDKIASNKWLEIGNIFPETEGFMMAIQDQIINTKNYRKFIIKDPIITIDKCRRCHAQPETIQHITGACISLTQTDYTHRHNQIANIIHQSLARKYSLIQDSNTPYYKYKPEIILENPSYKLYFDRAILTDRTIHYNRPDITLQDKRNKTTYLIDIAVPNTHNIQKTIAEKNNKYAELKDEVTRIWKQEKVYVVPIVLSTTGVIPKHLHHSLKLLNLNKSIYITLQKASILNTCRIVRKFMQIDENEITHHNNSTTVPLP

SEQ ID NO: 21358 - protein, 1319 aa, Mesoligia furuncula
METRSKSKRIGPLPGGDRRGAPGADAGCLSMRTVSGEELNRRAPTDKDTTAEIIDDGDRLTDMTNTPVEPYSPSTVSYTPSRPSSPSIPSSPTLLSPPIRSLNLIPPTPTLNVAREVSSFLPASTKAGKARVRMRWSKEVNQFIMRTYFYITKLETDMTTYRQQLHELFTRQYPEITVSEQRISDQRRAIVRNKLLSREIIEQLKEETRLQLQEAENNTDGNAIPLSQNTNEIAEQSHPQPCSQVQSYTQSQSYNQSQAYTQTSHTSTQTESINLTLENDIETLTFADQNLTTDIYIQEIHDKFRTTLAQYSGMDPAVRPKLPKLRYSPCLFRLVNLFNENILTQFISDDTQLIDIHTLIYCTAVVVSEELNFKITQHTGNSRSKQNIKPAWQQRLEKDIEKLRADCGRLTQYINNIRSNKVIRRVEAIFRSSVTHTRHENNNRKPEEFLDTLKQKLALKVHRLRRYKKAQQRKNDNVIFATNEKMFYRNLHKPKTNTNDDNNTVAPDHPTKEQLETYWSSIWEEQEQHNDKATWITEEEIKWRAIEEMEFVEITEADITQLTGRLHNWKSPGIDKIHNFWYKKLTSLHKPIAKNLTEIILGRQNIPDFIATGITYMLPKTINSPQPSQYRPITCLPTIYKILTSAITTKINSHIEHHNIMAEEQKGCRQGHMGCKEQLIVDSTIHKHATTKNRNLHCTYIDYKKAFDSVPHSWLIKTLEIYRINSKIIDFLRNIMPLWKTTLQINSNHNNVTTRQISIKKGIYQGDSLSPLWFCLALNPLSHLLQRCQVGYCLKHTAEQTTVSHLIYMDDIKLYAQTEKDMKKLVEVTAEFSLDINMQFGLDKCKTLHIIRGKIRPGDYVVNNTDTITAMEPTDLYKYLGYTQLKGLDHVRIKETLTAEYKRRLNTICKTQLSSKNLIKALNTFAIPILTYSFGVIKWTKTDTEQLERITRTTLTKHNNIHPKSATERLTIKRQHGGRGLIDIQHLWQKQVFRLKTFFYSKSGTSNIHKAIVQNDFNYTPLNLSEQLDTPQITSDDPQIQKIENWKKKVLHGRHPQDLEQSHVNKVASNKFLKIGNLFPETEGFIIAIQDQIINTKNYRKFIIKDPSVTNDKCRKCHSQPETIQHITGACTTLTQTDYTHRHNQVATIIHQKLGLKYTLIQNTNTPYYNYTPQTILENDTHKLYYDRAILTDRTIHYNRPDITLQDKINKVTYLIDIAVPNTHNIQKTISEKISKYAELKDEITRIWRQQKVYVVPIVLSTTGVIPNYLLHSLKLLNLKETLYITLQKAAILNTCRIVRKFMQIDENEIGPHHNTSIT

SEQ ID NO: 21359 - protein, 1341 aa, Hemaris fuciformis
METRSKKKLRGPLPGGDRRGTPGADAGCYSMQTVSGEELSRRAPTGSPESITAANDFDRLTDSNTNSPIEPYSPSTKSYTPSTCTSPSIPTSSPHNSFRDPSTLAADVPREVNTFLPAATKAGKPRVRMSWSKDVNTFIMRTYYYITKLETDMTTYRKQLHELFSQKYPSIKVTEQRLSDQKRAIERNKLLPQDVLDEIKEEVRNQLNEQIDNNDRNRHVHISSHDHNETQSLHQSFITCSGTQLLPQLSYTMPHNIDNLTDLELHTVNLPHNQSTQISHVSTQTETITLTIESDIDKLTEPNIPSDTYIKDLQDRLTTNLTLYAGLDPESRPKLPKLKYSRKLTSLLKIFNENILHEYLNESTNLVDIHTLIYCTALIISEELDVKIRGTKNTVYIKQGQNSKPAWQYRLEKDIEKLRADCGRLTQYINNNRTKKIVKKVEEIFKNQTIHTKHEENNKKPEEFLDTLKQKLALKAQRLKRYKKAQQRRQDNHLFATNEKIFYRQLGSKFKNGNCEKFDNAPSKEDLESFWAEIWEDPVRHNDKADWIKEEEIRWSTIEEMEFTEITESDIKLTTAKLHNWKSPGIDKIHNFWYKKLTSLHRAIAKNLTDIILRGQSIPDFLATGITYMIPKDKPTSYPSQYRPITCLPTIYKILTSVISYKINTHIENHNILAEEQKGCRRGHMGCKEQLVIDSTIHKHAATKSRNLHCTYIDYKKAFDSIPHSWLIQILKIYKINRNLVEFLQNIMPYWKTTLHLNNHINSVKTRQVHIKKGIYQGDSLSPLWFCLALNPISYILNNCRAGYRLENKSENTNISHLIYMDDIKLYAKNEKDMKKLIEVTTQFSKDINMQLGLDKCKTLHIIKGKVRPGDYTISNEETITAMEPTDLYKYLGYKQLKGLDHTNIKHTLTAEYRKRINAICKSQLSGKNLIKAINTYAIPILTYSFGIIKWTKTDIEQIERTTRTTLTKHNHHHPKSAIERLTIKRELGGRGLIDVYHLWQKQIFSLRTFFHTKSHTSNIHNTIAQNDHNFTPLNLHDETNQNNPNNSNQQELKLSDWKKKVLHGRHPHDLEKPHIDSIGSNKWLKIGNLFPETEGFIVAIQDQIINTKNYRKFIIKDPKLTNDKCRRCHTQPETIQHITGACTRLAQTDYTHRHNQIVNIIHQSLAIKYSLIENTKTPYYRYTPETVLENSSHKMYYDRAILTDRTIHYNRPDITLQDKINKITYVIDIAVPNTHNILKTIAEKSSKYLDLKDEITRIWRQEKVYVVPIVLSTTGVIPNHLHHSLSLLKLNKSLYISLQKAAILNTCRIVRKFMQIEENEIVQQNTNPNHDATILPFHNT

SEQ ID NO: 21360 - protein, 1086 aa, Heliconius cydno
MDNINRNQNQSHLVLSNTITAVSQVGEQSQNYFNTQTTQTSTQTESLNYLIENDIETLIVPTNYTEEFITNLREKLTTTLNLFSGLDPTIRPSLPKLKYTHKLTELIHIFNLKILGNYISNEIQLIDIHTLIYCTALVIGEELGYKIIQRTHTGQRKNYKNKPSWQIRLEKSIEKLRVDIGRLTQYINSNRSQKVVKTVMKIFRNTTLHTKHENDNQKSEEFLDTLKQKLALKSHRLKRYKKAQKRKDDNILFATREKTFYRQLSKPNHPSQNRNTESIPTEEQLTTYWSDIWEQESKHNENAKWIVEETDKYKTIDTMNFDEITETEILKITAKLHNWKSPGADKVHNFWYKKLTIFHRAIAKNFTDIILNKQNIPSFIATGITYMIPKGKFSSEPSQYRPITCLPTIYKILTSVITSRITVHIEKYNIIAEEQKGCKRGHMGCKEQLIIDSTIHKHATTKNRNLHCTYIDYKKAFDSIPHTWLIQILKIYKISPFIIEFLNIIMSQWKTTLQLNYNSTTVRTRHILIKKGIYQGDSLSPLWFCLALNPLSNLLQNSRLGYSFSSRSRNSLISHLIYMDDIKLYAKTHTDMKQLIDITTEFSNDIKMQFGLDKCKALHIIKGKIQEGNYLINDHDIITALESDDIYRYLGYNQLKGLDHTNTKQFLTTQFKNRLYAICKAQLSGKNLIKAINTYAVPILTYSFGIVKWTKTDIDNLERSIRTILTKHNYLHPKSAIERLSIKRSHGGRGIININILWQNQIKSLQKFFIYKSNSSIIHKIIKDNDHNYTPLNLEEITGCQNNQHTDPQKQLIENWKSKVLHGRHPHDMEQAHIDSVGSNMWLKVGNLFPETEGFIIAIQDQIINTKNYRKYIIKDSKVTNDKCRRCHSQPETIQHITGACSNLTHSDYTHRHNQICNIIHHQLAHKYKFITNFDTPYYKYTPETILENSTHKIYYDRAVLTDRTIHFNRPDIILQNKIDKITYLIDIAVPNTHNLQKTIAEKINKYEELKEEVTRIWKQKTVYIVPIVLSTTGVIPKHLHHSLNMLNLKRTTYITLQRAAILNTCRIVRKFLQIDEQSTNTPQVQ

SEQ ID NO: 21361 - protein, 1257 aa, Astraptes enotrus
MRRSIRIQNKHFAQSGAVAELISNPSSPTSSTRSLFPSTNSTPLSFENRNESINRSTTVSPMSVDFEQVQNITLPTSDVARGANAFLPASTKAGKPRIRMKWSQDVNIFIMRSYYHITKLETDMTTYRKTLHELFKSQYPDVKVSEQRISDQRRMIIKNKFLTQEILDRLKEEVSRQLQDEKNVNDNNIENNQVHTEVNRNSPESQLHLQNNSYESHNLSQSNTQTFTSISHSSTQTEFITLLLENESDTIADVVPPNDTSFQDMYDKLQTAVTQYSGMDPTARPKLPRIKYTKHLNDLVRLFNQHILHRLISKETQLNDIHTLIYCTAIVIAEELNYKITHNTTHKEPKNYTKPAWQIRLERDIENLRVDIGRVTQYVNNNRSDRLVKRVQDIFNRISRHTKHEKNNRKPEEFLDTLKQKLALKTHRLKRYKRTQQRKKDNTQFSSNEKLFYRNLCKPKLDFTTTKNNNCIEIPTKEELETYWANIWEENIKHNDEANWITEEQSKWQVIDEMEFKEITELDITNITARLHNWKAPGIDKIHNYWFKKLTTLHQPLAKALTEIILGKQNIPNFITIGITYMLPKTNNSIQPSQYRPITCLPTIYKILTSAITAKINTHIEHHNILAEEQKGCRRGHMGCKEQLVIDSIIHKHATSKHRNLHCTYIDYKKAFDSIPHSWLIQILQIYRISPIIINFLRNIMSHWKTTLHLHQGNKSISTRQININKGIYQGDSLSPLWFCLALNPLSNLLHSCQTGYRLNNNSEETTISHLIYMDDIKLYAKTFKDMQKLLDKTTQFSRDINMQFGLDKCKTLHIVKGNIRSGDYRVNNTDVISAMEPTDVYKYLGYNQLKGLLHTHTKHTLTIEFKRRIDAICKTHLSGKNLTKAINTYATPILTYSFGIIKWTKTDIEQLERVTRTTLTKHNYLHPKSAVERLNIKRQDGGRGVIDINYLWQKQINNLRHFFFMKSITSNIHSAITHNDQNFSPLNLSDHADQYTLNNRDSQLQKIENWKNKVLHGRHPHDLELTHVDKIASNKWLKVGNLFPETEGFMIAIQDQVINTKNYRKHIIKDPNAKNDKCRRCHTQPETIQHITGACTNLTQTDYTHRHNQVTNIIHQNLALKHNLIQNTNTPYYQYTPQTVIENTSYKLYYDRAILTDRTIHYNRPDIILQDKLNKITYLIDIAVPNTHNVQKTILEKINKYIDLKEEVTRIWKQNKVYVVPIVLSTTGVIPYHLHQSLKLIGLKHSLYISLQITSQ

SEQ ID NO: 21362 - protein, 1317 aa, Noctua janthe
METRSKKKRIGPLPGGDRRGAPGADAGCLSMRTVSGEELNRRAPTDKDTTAEIIDDGDRLTDRTDTPVEPYSPSTVSYTPSRRSSPSIPSSPTPLSPPIISFNTVSPTPTLNATRGVSTFLPASTKAGKARVRMKWSKEVNTFIMRTYLYITKLETDMTTYRQQMHALFTRQYPDIAVSEQRIADQRRTIVRNKLLSQEVIDQLKEEIRTQLLQEETLNCIDTNNITQNVNEIYHQEQPQLLSQSQLIYSQSQPYNQSQAHTQISHTATQTESITLMLENDIETIAVPYQHLTTDTYIQEINDKFRTTITQYSGMDPAARPRLPKLKYTPNLFRLVNLFNESILTQFISDDTQLIDIHLLIYCTAVVISEELNFKITDHTGTPRTRQNLAPAWQQRLEKDIEKLRADIGRLTQYINGCRSNKLVKRVEVIFRNNLTHTRHEKNNRKSEQFLDTLKQKLALKVHRLRRYKKAQQRKKDNTTFATNEKMFYRNLHKPQTDTIDINNTNIPNLPTKEQLEEYWASIWEEPVQHNDKASWIAEEEVKWRGVDEMEFLEVAETDIAHITARLHNWKSPGIDKIHNFWYKKLTSLHKSLAKNLTDIILGQQNTPEFIATGITYMLPKTTNSPQPSQYRPITCLPTIYKILTSAITKKISSHIERHNIIAEEQKGCRQGHMGCKEQLIIDSTIHKHATSKNRNLHCTYIDYKKAFDSVPHSWLIQILEIYRINPKIIDFIRNIMLQWKTTLQINYNHNTVTTRQISIKKGIYQGDSLSPLWFCLALNPLSHLLQGCGAGYCLKHTTDETIISHLIYMDDIKLYAKTENDMKKLVDVTAEFSKDINMQFGLEKCKTLHIVRGKVRPGDYVVNDTDTISAMEQTDLYKYLGYAQLKGLDHTRIKNTLSNEYKRRVNAICKTQLSGKHLIKALNTFAIPVLTYSFGVIKWSKTDTEQLERTTRTTLTKHNNLHPKSAIERLTIKRQHGGRGLIDIQHLWRKQISRLKSFFHSKSRTSSIHKAIVINDLNYTPLNLSHQIETLNTNNDDPQQHKIEDWKKKVLHGRHPHDLEQSHINKLASNKWLKIGNLFPETEGFIIAIQDQIINTKNYRKYIIKDPTVTNDKCRKCHSQPETIQHITGACTTLTQTDYTHRHNQVANVIHQKLALKHTLIHNTSTPYYNYKPEATLENTTHKLYFDRAILTDKTIHYNRPDIILQDKINKVTYLIDIAVPNTHNIQKTITEKISKYAELKDEVTRIWRQEKVYVVPIVLSTTGVIPNHLLHSLKLLDLKEFIYIILQKAAILNTCRIVRKFMQIEENEIGPHHNT

SEQ ID NO: 21363 - protein, 1318 aa, Mythimna ferrago
METRSKSKRIGPLPGGDRRGTPGADAGCHSMRTVSGEELSRRAPTDKDTTAEIIDDGDRLTDRTNTPVEPYSPSTDSYVPSRSSSPSTPSSPILSHSSHTIASSNTIPPTPTLNVTQEASSFLPASTRAGKTRVRMRWSKEVNLFIMRTYLYITKLETDMTTYRQQLHERFTRQYPEITVSEQRIADQRRAIVRNKLLSLEIIEQLKEETRLKLQESEGNTDRTTLSQNTTEIDRHPQTQPHTQLESSSSQLYNQSQDYTQTSHTSTQTESLTLMLENDVETLVVPEQNLATELYIQEINDKFRTTLTLYSGMDPAVRPKLPKLRHSRDLFRLVNLFNENILNQFISDDTQLIDIHTLIYCTAVVICEELKFKISQDTGNLRPKQNVKPAWQHRLEKDIDKLRADCSRLTQYINNNRSSKVVKRVEAIFRSSSTHTRHENNNRKPEEYLDTLKQKLSLKVHRLKRYKKAQQRKIDNTTFSTNEKMFYRNLRKSDTNTSTENSSDTIDIPTKEQLEAYWSSIWEERVQHNDKATWIAEEETKWRAIEEMDFLEITESDVTHVTGRLHNWKAPGIDKIHNFWYKKLTSLYKPMAKNLTEIILGQQNIPEFITTGITYMLPKNKTSPQPSLYRPITCLPTIYKILTSLITIKINSHIERHNIMAEEQKGCRRGHMGCKEQLIIDSTIHKHASTKNRNLHCTYIDYKKAFDSVPHSWLIQILQIYKINSKIIDFLRNIMSQWKTTLQINHDNNRVITRQIYIKKGIYQGDSLSPLWFCLALNPLSRLLERSRAGYCFKHSTNQTTISHLIYMDDIKLYAQTEKDMRKLVEATAEFSQDINMQFGLDKCKTLHIIRGRIRPGSYVVNDTDTITAMESNDLYKYLGYMQLKGLDHVRIKDTLTTEYKKRLNTLCKTQLSGKHLIKAINTFAIPILTYSFGVIKWTKTDTEQLERITRTTLTKNNHLHPKSAIERLTIKRQNGGRGLIDVQHMWRKQVFKLKSFFETKSRTSKIHKAVVLHDSNYTPLNLNARLDTQNINNDNPQTQKMEDWKRKVLHGRHPHDLEQSHVNKIASNKWLVVGSLFPETEGFMIAIQDQIINTRNHRKYIIKDPSVTDDKCRKCHLQPETIQHITGACTTLTQTDYTHRHNQVANVIHQSLAVKYTLIQNTNTPYYNYTPQTVLENDTHKLYYDRAILTDRTIHYNRPDITLQDKINKITYLIDIAIPNTHNIKKTITEKISKYAELKDEVTRIWRQEKVYVVPIVLSTTGVIPNCLLHSLKLINLKESIYITLQKAAILNTCRIVRKFMQIDENALGPPHNTPLT

SEQ ID NO: 21364 - protein, 1318 aa, Agrochola circellaris
METRSKRKRIGPLPGGNRRGAPGADAGCLSMRTVSGEELNRRAPTDKVATAEADDGDRLTNRTDTPVEPYSPSTVSYAPSRTSSPSIPSSPIQSSPPIPSFNTVTSTPALNVAREVSTFLPASTKAGKSRVRMRWSKEVNLFIMRTYLYITKLETDMTTYRQQLHELFTRQYPEITVTEQRISDQRRAIVRNKLLSKEIIDQLIDEVRTQLLEESENIEGAITIALTQNAIEHNPQEQPQPYTQPQPITQSQPYFQSHAYSQTTHTSTQTESITIMLENEIETLVDNNQNQSTDTRSQEIHDKFKTALTQYSGMDPATRPKLPKLRYTPKLFHLVNLFNQNILNQYISEETQLIDVHTLIYCTALVISEELNFKITEYTGNTRQGNVNKPAWQQRLEKDIEKLRADCSRLTHYINNNRSNKVVKRVETIFKNMSTHTRHENDNRKPEEFLDTLKQKLALKVHRLRRYKKAQERKNDNSLFASNEKNFYRKLQTPQTDTETPTAENNTELPTAEQLETFWSSLWEEQVQHNAQSDWISDEETKWSSLEEMEFIELTESDIGSITARLHNWKSPGIDKIHNYWYKKLDSLHKVLAKNLTEIILGKQNIPEFIATGITYMLPKKQYSPQPSQYRPITCLPTIYKILTSAITTKINKHIEHHNIVAEEQKGCRRGHMGCKEQLVIDSIIHKHAATKNRNLHCTYIDYKKAFDSIPHSWLIQILQIYKINSKIIDFLQNIMSRWKTTLQLNYRHNTITTQQISIKKGIYQGDSLSPLWFCLALNPLSHLLHRCQAGYSLKHTTEETVISHLIYMDDIKLYAKSEKEMKKLIDITTEFSKDINMQFGLDKCKTIHIIRGKIKPGDYPVNNTDTITAMEQTDLYKYLGYNQLKGIDHTAIKHTLNTEYKRRVIAVCKTQLSGKHLIKALNTYAIPILTYSFGVIKWSKTDIQQIERSTRTTLTKHNNLHPKSAIERLTIKRQYGGRGLIDVHNLWQKQIAKLRTFFHSKSHTSNIHKAVIMNDIRYTPLNLHEQIDTQDTSNNDPHKQKIEDWKKKVLHGRHPHDLEQSHIDTIASNKWLKIGNLFPETEGFIIAIQDQIINTKNYRKFIIKDPTIINDKCRKCHSQPETIQHITGACTTLTQTDYTHRHNQVANVIHQKLALKYKLIQDTNTPYYKYIPQVILENTTHKLYYDRAILTDRTVHYNRPDITLQDKVNKVTYLIDIAVPNTHNLQKTIGEKISKYADLKEEVTSIWRQEKVYVVPIVVSTTGVIPNHLHHSLKLIDLKDSIYITLQKAAILNTCRIVRKFMQIEENEITPHNINST

SEQ ID NO: 21365 - protein, 1318 aa, Hydraecia micacea
METRSKRKRLGPLPGGDRRGALGADAECLSMRTVSGEELSRRAPTDKDATADIIDDGDRLTDRTNTPVEPYSPSTVSYTPSRPSTPCVPSSPSISSSPPITSFHSAQPTSTLNVTREVSTFLPASTKAGKARVRMRWSKEVNLFIMRTYLYITKLETDLTTYRKQLHELFTRKYPEITVTEQRISDQRRIIVRNKLLSQDVINQLKEEVRTQLQGESENTEGEITIALTQNTTAYNEQEQPCSQTEPITQSQPYFQSQAYSQTTHTSTQTESITVMLENEIETLADININQSTDTHIQEIHDKFKTALTQYSGMDPAARPRLPKLRYTPKLSQLVHLFNQNILQPYISEETRLIDIHTLIYCTALVISEELNFKITEYTGNSRQKNINKPAWQQRLEKDIEKLRADCGRLTQYINNNRSNKVVKRVEAIFKNMATHTRHENDNRKSEEFLDTLKQKLALKVHRLRRYKKAQERKNDNSLFATNEKNFYRNLQTAQTDTNTRTTENNVELPTTEQLETFWSGIWEQQVQHNKNSNWIIDEETKWSSLEEMEFVELTESDITCVTARLHNWKSPGIDKIHNYWYKKLESLHKVLAKNLTQIILGKQNIPEFIATGITYMLPKAQYSPQPSQYRPITCLPTIYKILTAAITRKINKHIEHHNIIAEEQKGCRRGHMGCKEQLVIDSIIHKHAATKHRNLHCTYIDYKKAFDSIPHSWLIQILQIYKINSKIIDFLQDIMARWRTTLQLNYQNNAITTRQISIKKGIYQGDSLSPLWFCLALNPLSDLLHRSQAGYSLKHATEETIISHLIYMDDIKLYSKSEKEMKKLIDITTEFSKDINMQFGLDKCKTVHIIRGKIKPGDYPINNTDTITAMEPTDLYKYLGYKQLKGLDHSTIKYTLNSEYKRRVVAVCKTQLSGKHLIKALNTYAIPILTYSFGVIKWSKTDIQQIERTTRTTLTKHNNLHPKSAIERLTIKRQYGGRGLIDVHHLWQKQIAKLRTFFHSKSHTSNIHKAVVMNDISYTPLNLHEQIDIQHTGDEDPHKQKLEDWKKKVLHGRHPHDLEQSHIDTIASNKWLKIGNLFPETEGFIIAIQDQIINTKNYRKFIIKDPTIINDKCRKCHSQPETIQHITGACTTLTQTDYTHRHNQVANVIHQKLALKYKLIQDTNTPYYKYVPQTVLESTTHKLYYDRAILTDRTVHYNRPDITLKDKVNNITYLIDIAVPNTHNLQKTIGEKISKYAELKDEVTRIWRQEKVYVVPIVVSTTGVIPNHLHHSLKLIDLKDSIYITLQKAAILNTCRIVRKFLQIEENEISPPNNNSS

SEQ ID NO: 21366 - protein, 1316 aa, Mimas tiliae
METRSKKKLRGPLPGGDRRGTPGADAGCYSIRTVSGKELNRRTPAGSPESVTADIDLPDRLTDSRTDSPIEPYSPSTVSYILSTDSSPSIPRSPPSNSYRDPSIPALDVAREVTAFLPASTKAGKPRVRMSWSKDVNLFIMRTYYYITKLETDMTIYRKQLHERFSRQYPDIKVTEQRVSDQRRAIERNKLLSQDTLDQLKEEVRKQLENEINNLDDGDDINLIDRDQNHLQPLSQLCTTHSNAQSIPLDPTSRVQHTHNLSYSQITQTSQISTQTESVTLTVENDIETLMEPNFITDTYTQELFEKFTTSLTLYSGLDPVARPKLPKLRYSPKLTKLTQIFNQNILTKFLSQDTKLIDIHTLIYCTAIVISEELGYKITESIRIQSRSRLNRKPPWQHRLETDIEKLRADCGRLTQYINKNRSKKVVKRVEEIFKSKTTHTRHENKNKTPEEFLDTLKQNLALKVHRLKRYKKAQQRKNDNILFTTNEKTFYRNLKKPRINAYNTENTQNIESPTKEQLETFWANLWEETIEHNNYADWIKEEENRWSTVGEMEFTEITESDMKCITNRLHNWKSPGVDKIHNFWFKKLTSLHKLIAKNITEIILNKQNIPHFIATGITYMLPKGEISSEPSQYRPITCLPTLYKIITAVISFKINTHVEHHNIIAEEQKGCRRGHMGCKEQLVIDSTIHKHATTKNRNLHCTYIDYKKAFDSIPHSWLIKVLEIYKINNSLIKFLQNIMTHWKTTLHLNDHNNSITTRPISIKKGIYQGDSLSPLWFCLALNPLSHILQRCRAGYHLKDNTQETIISHLIYMDDIKLYAKTEKDMKKLIDATSNFSKDINMQFGLDKCRTLHIIRGKIRPGDYTVNNNDIITAMEPADLYKYLGYKQLKGLDHTNIKHTLFTEYQRRINLLSKTQLSAKHLIKAFNTYAIPILTYSFGIIKWTKTDIDKIERITRTTLTKHNHHHPKSAIERLTIKRQEGGRGLIDIYNLWQKQLYNLKTFFYSKSHISNIHKAITHNDYNFTPLNLHEQTDQQNLLSSDPQKQKIEDWKKKVLHGRHPHDLEQPHIDAIASNKWLNIGNLFPETEGFMLAIQDQVINTKNYRKYIIKDPTVTNDKCRRCHTQSETIQHITGACTSLTQTDYTHRHNQVANIIHQSLARKYTLIPNTNTPYYKYTPETILENSSYKLYFDRAILTDRTIHYNRPDITLQDKTNKITYLIDIAVPNTHNIHKTIIEKINKYTELREEVARIWRQQKVFVVPIVLSTTGVIPKDLRTSLDLLNLNNSIYISLQKAAILNTCRIVRKFLQVSDSGMI

SEQ ID NO: 21367 - protein, 887 aa, Cosmia trapezina
MAIHTRHENDNRKPEEFLDTLKQKLALKVHRLRRYKKAQERKNDNSLFATNEKNFYRNLQKPQTDTNTPTTENNVELPTAEQLETFWSGIWEEHVQHKEKSDWITDEETKWSSLEEMEFDELTESDITCITARLHNWKSPGIDKIHNYWYKKLESLHKVLAKNLTEIILGKQNIPEFIATGITYMLPKAQYSPQPSQYRPITCLPTIYKILTSAITTKINKHVENHNIIAEEQKGCKRGHMGCKEQLVIDSIIHKHATTKNRNLHCTYIDYKKAFDSIPHSWLIQILQIYKINSKIIDFLQNIMSRWRTTLHLNYQHNAITTRQISIKKGIYQGDSLSPLWFCLALNPLSNLLHRSQAGYSLKHSTEETIISHLIYMDDIKLYSKSEKDMKKLIDITTEFSKDINMEFGLDKCKTVHIIRGKIKPGDYPINNTDTITAMEPTDLYKYLGYRQLKGLDHSAIKCTLNSEYKRRVVAVCKTQLSGKHLIKALNTYAIPILTYSFGVIKWSKTDIQQIERTTRTTLTKHNNLHPKSAIERLTIKRQYGGRGLIDVHHLWQKQIAKLKTFFNSKSHTSNIHKAVVMNDISYTPLNLHEQIDTQHTSNEDPHKQKLEDWKKKVLHGRHPHDLEQSHIDTIASNKWLKIGNLFPETEGFIIAIQDQIINTKNYRKFIIKDPTITNDKCRKCHSQPETIQHITGACTTLTQTDYTHRHNQVANIIHQKLALKYNLIQDTNTPYYKYIPQTVLESTTHKLYYDRAILTDRTVHYNRPDITLKDKVNKVTYLIDIAVPNTHNLQKTIGEKISKYAELKEEVTRIWRQEKVYIVPIVVSTTGVIPNHLHHSLKLIDLKDSIYITLQKAAILNTCRIVRKFMQIEENEISPHNINSSS

SEQ ID NO: 21368 - protein, 1317 aa, Noctua fimbriata
METRSKKKRIGPLPGGDRRGAPGADAGCLSMRTVSGEELNRRAPTDKDTTAEIIDDGDRLTDRTDTPVEPYSPSTVSYTLSRRSSPSIPSSPTPLSPPIITLNTISPTPTLNAARGVSTFLPASTKAGKTRVRMKWSKEVNLFIMRTYLHITKLETDMTTYRQQLHALFTREYPDITVSEQRISDQRRTIVRNKLLSQEVIDQLKEEVRTQLLHEETVNYTDTNNITQNLSEISHQEQPQSLSQSQIIYTQSQPYNQSQAYTQISHTSTQTESITLTLENDIETIVVPDQHLTTDIYIQEINDKFRTTITQYSGMDPAARPRLPKLKYTPNLFRLVNLFNESILTHFISDDTQLIDIHLLIYCTAVVISEELKFKITDHTRTTRTRQNVAPAWQQRLEKGIEKLRADIGRLTQYINGCRSNKLAKRVEVIFRNNGTHTRHELNNRKPEEFLDTLKQKLALKVHRLKRYKKAQQRKNDNAIFTTNEKIFYRNLHNPKNDRNYENNTNTPNLPSKEQLETYWASIWEEQKQHNDKASWIVDEEEKWRDINVMEFVEVTESDIIHITTRLHNWKAPGIDKIHNFWYKKLTTLHKSIAKNLTDIILGQQNIPEFITTGITYMLPKTKHTSEPSQYRPITCLPTIYKILTSAVTKKINSHIIHHNIIAEEQKGCRQGHMGCKEQLIIDSTIHKHATSKNRNLHCTYIDYKKAFDSVPHSWLIQILEIYRVNPKIIDFMRHVMLQWKTTLQINSNNNNVTTRQISIKKGIYQGDSLSPLWFCLALNPLSHLLQRCGAGYCLKHSTDETTISHLIYMDDIKLYAKSEKDMKKLVDITAEFSKDINMQFGLEKCKTLHIVRGKVRPGDYAVNESDSITALEPTDLYKYLGYTQLKGLDHVKIKNTLTAEYKKRVNAVCKTQLSGKHLIKALNTFAIPVLTYSFGVIKWTKTDTEQLQRTTRTTLTKHNNLHPKSAIERLTIKREHGGRGLIDIQHLWRKQVSRLKLFFHTKSRTSNIHKAIVTNDLNYTPLNLSDQIETQNTTNDDQQIQKIEDWKRKVLHGRHPHDLEQSHINKLASNKWLKIGNLFPETEGFIIAIQDQIINTKNYRKYIIKDPTLTNDKCRKCHVHPETIQHITGACTTLTQTDYTHRHNQVANVIHQKLALKHTLIQNTNTPYYNYKPETTLENTTHKLYYDRAILTDRTIHYNRPDIILQDKLNKITYLIDIAVPNTHNIQKTITEKISKYAELKEEVTRIWRQEKVYVVPIVLSTTGVIPNHLIHSLKLLDLKETLYITLQKAAILNTCRIVRKFMQIEENEIGPHHNT

SEQ ID NO: 21369 - protein, 1341 aa, Hemaris fuciformis
METRSKKKLRGPLPGGDRRGTPGADAGCYSMQTVSGEELSRRAPTGSPESITAANDVDRLTDSNTNSPIEPYSPSTKSYTPSTCTSPSIPTSSPHNSFRDPSTLAADVPREVNTFLPAATKAGKPRVRMSWSKDVNTFIMRTYYYITKLETDMTTYRKQLHELFSQKYPSIKVTEQRLSDQKRAIERNKLLPQDVLDEIKEEVRNQLNEQIDNNDRNRHVHISSHDHNETQSLHQSFITCSGTQLLPQLSYTMPHNIDNLTDLELHTVNLPHNQSTQISHVSTQTETITLTIESDIDKLTEPNIPSDTYIKDLQDRLTTNLTLYAGLDPESRPKLPKLKYSRKLTSLLKIFNENILHEYLNESTNLVDIHTLIYCTALIISEELDVKIRGTKNTVYIKQGQNSKPAWQYRLEKDIEKLRADCGRLTQYINNNRTKKIVKKVEEIFKNQTIHTKHEENNKKPEEFLDTLKQKLALKAQRLKRYKKAQQRRQDNHLFATNEKIFYRQLGSKFKNGNCEKFDNAPSKEDLESFWAEIWEDPVRHNDKADWIKEEEIRWSTIEEMEFTEITESDIKLTTAKLHNWKSPGIDKIHNFWYKKLTSLHRAIAKNLTDIILRRQSIPDFLATGITYMIPKDKPTSYPSQYRPITCLPTIYKILTSVISYKINTHIENHNILAEEQKGCRRGHMGCKEQLVIDSTIHKHAATKSRNLHCTYIDYKKAFDSIPHSWLIQILKIYKINRNLVEFLQNIMPYWKTTLHLNNHINSVKTRQVHIKKGIYQGDSLSPLWFCLALNPISYILNNCRAGYRLENKSENTNISHLIYMDDIKLYAKNEKDMKKLIEVTTQFSKDINMQLGLDKCKTLHIIKGKVRPGDYTVSNEETITAMEPTDLYKYLGYKQLKGLDHTNIKHTLTAEYRKRINAICKSQLSGKNLIKAINTYAIPILTYSFGIIKWTKTDIEQIERTTRTTLTKHNHHHPKSAIERLTIKRELGGRGLIDVYHLWQKQIFSLRTFFHTKSHTSNIHNTIAQNDHNFTPLNLHDEINQNNPNNSNQQELKLSDWKKKVLHGRHPHDLEKPHIDSIGSNKWLKIGNLFPETEGFIVAIQDQIINTKNYRKFIIKDPKLTNDKCRRCHTQPETIQHITGACTRLAQTDYTHRHNQIVNIIHQSLAIKYSLIENTKTPYYRYTPETVLENSSHKMYYDRAILTDRTIHYNRPDITLQDKINKITYVIDIAVPNTHNILKTIAEKSSKYLDLKDEITRIWRQEKVYVVPIVLSTTGVIPNHLHHSLSLLKLNKSLYISLQKAAILNTCRIVRKFMQIEENEIVQQNTNPNHDATILPFHNT

SEQ ID NO: 21370 - protein, 1258 aa, Viola violella
MRRSLRIKNKNSAQSGAVAEITSNPSSPTTSTHSLFESPNSTPLSFENSMNSVNRSTTVSPISSNVEQIQNNTLPASDVARGANAFLPASTKAGKTRVRMKWSQDVNIFIMRTYYHITKLETDMTAYRKTLHELFSIQYPDVKVSEQRVSDQRRMIIKNKYLTQEILNKLKEDVSKQLQEEENINEIDNDNTIVHQAERNVLESQTHTVQNNSTQSYNLTQSHTQISVPTSHSSTQTEFTTLLLETETETIADLDPPNDASFQDMYDKLQRALIQFSGMDPTARPKLPRLKYTKHLNDLVHLFNQHILHRYISKETQLNDIHTLIYCTALVIAKELNFKIIHNTTYIKPKDYTKPSWQIRLERDIENLRADIGRLTQYINNNRSDRLLKKVQHIFNRITKHTKHERNNRKPEEFLDTLKQKLALKTHRLKRYKKTQQRKKDNTQFATNEKLFYRNLCKPKIDFTSKENNNTEIPTKEELEKYWSNIWEENISHNDKAHWITEEKDKWEVIDEMEFQEITERDMVNITARLHNWKSPGIDRVHNYWYKKLTTLHQPLARALTEIILGKQTIPNFITIGITYMLPKTNNSTQPSQYRPITCLPTIYKILTSAIASKITLHIEQHNVLAEEQKGCRRGHMGCKEQLLIDSVVHKHATLKHRNLHCTYIDYKKAFDSIPHSWLIKILQIYRISPIIIDFLRNIMPHWKTTLHLNQGNKSISTRKINIKKGIYQGDSLSPLWFCLALNPLSNLLHSCQIGYRFNNSSEETTISHLIYMDDIKLYAKTQKDMQKLLDTTTQFSNDINMQFGLDKCKTLHIIKGKIQPGDHIVNNTEVISAMESTDVYKYLGYNQAKGLLHTHIRQTLSTEFERRINAICKSHLSGKHLTKAINTYAIPILTYSFGVIKWTKTDIEQLERTTRTTLTKHNHLHPKSAVERLTIKRQDGGRGVIDINCLWHKQIGKLRRFFFMKSTTSNIHSTITHNDKNLTPLNLSDHTDQHPLNNRNTQLQKIEYWKNKVLHGRHPHDLEQTHIDKIASNKWLRVGNLFPETEGFMIAIQDQIINTKNYRKHIIKDPNIKNDKCRRCHTQPETIQHITGACTNLTQTDYTHRHNQVTNIIHQNLALKYELIQNTNTPYYKYTPQTVLENTSHKLYYDRAILTDRTIHYNRPDIILQDKINKITYLIDIAIPNTHNIQKTIAEKSNKYAELKEEVTRIWKQNRVYVVPIVLSTTGLIPYHLHQSLKLIDLTHSTYITLQKAAILN

SEQ ID NO: 21371 - protein, 910 aa, Muschampia plurimacula
MRLEKDIAKIRVEIGRLTQYIKGNRSKKITKYVQTIFKTRLIHTTHENDNRKPEEFLDTLKQKLALKVNRLKRYKKAQQRKNDNIVFTTNEKKFYKKLHKQQSVTENEPDLPTKEQLEEFWSGIWEDEIQHNEKANWIEDEEIKWSTIEEMKFVEITENDVKYITHRLHNWKSPGIDKIHNFWYKKLFSLYNLIAKNLTDIILGTHRIPEFMATGITYMLPKSEYTSNPAQYRPITCLPTIYKILTSTITIKINRHIEQNNILAEEQKGCRQGHMGCKEQLIIDSTIHKHATSKNRNLHCTYIDYKKAFDSITHSWLLKILQIYKINHKVLNFLQNIMTQWKTTLHLSTLHKTINTRQIFIKKGIYQGDSLSPMWFCLSINPLSHLLHRCQVGYSLKHDTASTNISHLIYMDDIKLYAKTEIGIRKLLDTTTQFSRDINMDFGLDKCKLLHIKRGKIQPGDYELNNTDRITAMEPTDLYKYLGYYQLKGLDHTAIKETLTTEYRNRINILCKTQLSGKHLIKSINTYAIPILTYSFGILKWTKTDIEQLERITRTTLTKHNNLHPKSAIERLTIKREDGGRGLIDLCQLWKNQISILKTFFYTKSHSSDIHKAIVLNDHNYTPLNLLTHDLTTTQSSINTQKEKIEHWKRKVLHGRHPSDLEQSHVDAKASNKLLQIGNLFPETEGFIISIQDQVINTRNYRKHILKDPTLTNDKCRKCHTQPETIQHITGACITLTQTDYTHRHNQVANIIHQKLAAKYKLIQKSNTPYYNYIPQTILENETHKLYYDRAILTDKTIHYNRPDITLQDKLNRVTFLIDVAVPNTHNLQKTITEKITKYSELKEEVTRIWKQKKVFVVPIVLSTTGVIPYHLQHSIKLLGLKDTTYINLQKAAILNTCRTVRKFLQTDEN

SEQ ID NO: 21372 - protein, 1277 aa, Autochton oryx
MRRSNRIKNKYFAQSGTVAGIISNPPSPTSSIHSIFQSTNSTPLSFENSNISESSLSTVSQVSAESEQTQNIIPPVLDVARGANAFLPASTKTGKTRVRMKWSQDVNIFIMRTYYHITKLEADMTTYRKKLHELFSSQYPDVKVSEQRVSDQRRMIIKNKYLSQEILNKLKEEVSKQLEEEESINKVNNDNSQVHIETDRNTLETQTQLQNNSSQSHYLSQSLVPTSHSSTQTEFITLLLENETEIIADLAPPNVVSFQDIYDKLQTALTQYSGMNPTSRPKLPRIKYTKHLNDLVHLFNRHILHRLITKEMQLNDIHTLIYCTALVIAEELNYKIIHNTTHKKSKEYTKPSWQIRLERDIENLRADIGRLTQYINNNRSDRLVKKVQLIFNRITKHTKHENNNKKPEEFLDTLKQKLALKTYRLKRYKKTQQRRKDNIQFTTNEKLFYRNLSKSKIDFTTEGENHTQMSTKEELETYWSNIWEENIKHNEKANWIIQEQDKWKGIDEMEFQEITERDITNITARLHNWKSPGVDRIHNYWYKKLTILHQPLARVLTEIILGKQNIPSFITIGITYMLPKINNPTQPSQYRPITCLPTIYKILTSAITSKINTHIEHHNILAEEQKGCRRGHMGCKEQLVIDSIIHKHATAKHRNLHCTYIDYKKAFDSIPHSWLIKILQIYRISPIIIDFLRNIMLHWKTTLHLYQGNKSISTRQINIKKGIYQGDSLSPLWFCLALNPLSNLLHNCQTGYRFNNSLRDSTISHLIYMDDIKLYAKTHKAMQNLLDKTTQFSKDINMQFGLDKCKTLHIIKGKIQSGDYKVNTIDVISAMEPTDFYKYLGYNQMKGLLHTHIKQTLTTEFKRRVDAICKTHLSGKHLTKALNTYAIPILTYSFGIIKWTKTDIEQLERITRTTLTKHNHLHPKSAVERLNIKRQDGGRGVIDINCLWQKQITNLRHFFFMKSTTSNIHLAITHNDEHFTPLNLSDYSDQNIHENINPQLHKIENWKNKVLHGRHPHDLEHTHVDKLASNKWLKVGNLFPETEGFMIAIQDQVINTKNYRKHIIKDSNVKNDKCRRCHTQPETIQHITGACTILTHTDYTHRHNQVTNIIHQKLALKHNLIQKTNTPYYKYTPQTILENTSHKLYYDRAILTDRTIHYNRPDIILQDKLNKITYLIDIAVPNTHNIQKTIADKISKYVELKEEVTRIWKQNKVYVVPIVLSTTGVIPYCLHQSLKLIGLTHSVYITLQKAAILNTCRIVRKFMQIDENEIGPHNLYL

SEQ ID NO: 21373 - protein, 1041 aa, Noctua janthe
MLENDIETIAVPYQHLTTDTYIQEINDKFRTTITQYSGMDPAARPRLPKLKYTPNLFRLVNLFNESILTQFISDDTQLIDIHLLIYCTAVVISEELNFKITDHTGTPRTRQNLAPAWQQRLEKDIEKLRADIGRLTQYINGCRSNKLVKRVEVIFRNNLTHTRHEKNNRKSEEFLDTLKQKLALKVHRLRRYKKAQQRKKDNTTFATNEKMFYRNLHKPQTDTIDINNTNIPNLPTKEQLEEYWASIWEEPVQHNDKASWIAEEEVKWRGVDEMEFLEVAETDITHITARLHNWKSPGIDKIHNFWYKKLTSLHKSLAKNLTDIILGQQNTPEFIATGITYMLPKTTNSPQPSQYRPITCLPTIYKILTSAITKKISSHIERHNIIAEEQKGCRQGHMGCKEQLIIDSTIHKHATSKNRNLHCTYIDFKKAFDSVPHSWLIQILEIYRINPKIIDFIRNIMLQWKTTLQINYNHNTVTTRQISIKKGIYQGDSLSPLWFCLALNPLSHLLQGCGAGYCLKHTTDETIISHLIYMDDIKLYAKTENDMKKLVDVTAEFSKDINMQFGLEKCKTLHIVSGKVRPGDYVVNDTDTISAMEQTDLYKYLGYAQLKGLDHTRIKNTLSNEYKRRVNAICKTQLSGKHLIKALNTFAIPVLTYSFGVIKWSKTDTEQLERTTRTTLTKHNNLHPKSAIERLTIKRQHGGRGLIDIQHLWRKQISRLKSFFHSKSRTSSIHKAIVINDLNYTPLNLSHQIETLNTTNDDPQQHKIEDWKRKVLHGRHPHDLEQSHINELASNKWLKIGSLFPETEGFIIAIQDQIINTKNYRKYIIKDPTATNDKCRKCHSQPETIQHITGACTTLTQTDYTHRHNQVANVIHQKLALKHTLIHNTSTPYYNYKPEATLENTTHKLYYDRAILTDKTIHYNRPDIILQDKINKVTYLIDIAVPNTHNIQKTITEKNIKYAELKDEVTRIWRQEKVYVVPIVLSTTGVIPNHLLHSLKLLDLKESIYIILQKAAILNTCRIVRKFLQIEENEIGPHHNT

SEQ ID NO: 21374 - protein, 1286 aa, Ochropleura plecta
MRTVSGEELNRRAPTDKDTTAEIIDDGDRLTDRTDTPVEPYSPSTVSYTPSRPSSPSISSSPTLSTHPIITLNTVSPTPTLNAARGVSTFLPASTKAGKARVRMRWSKEVNLFIMRTYFYITKLETDMTTYRKQLHELFTQQYPEITVSEQRISDQRRAIVRNKLLSQAIIDQLKEDIRVQLQADDNTTPLLENLTDIAQQPQTQLNTQSQPNIQSQLYNQSQANTQTSHTSTQTEYITFTLENDIETLVVENHNPTTDTYIQEIHDKFRTTLSQYSGMDPAIRPKLPKLRYSPNLFRLVNLFNENILNQFISDETQLIDIHTLIYCTAVVISEELNFKITQNTGNLRPKQNIKPAWQQRLEKDIEQLRADIGRLTQYINNNRSSKVVRRVEAIFRTHLVHTRHENNNRKPEEFLDTIKQKLALKVHRLRRYKKAQQRKNDNAIFATNEKIFYRNLNKPNTDTHYDTNTDTPTQPTKEQLETYWASIWEQQARHNDEAAWITEEETKWKAIDEMEFVEVTEADITHITGRLHNWKSPGIDKVHNFWFKKLTSLYKPIARNLTQIILGQQNAPEFIATGITYMLPKTKNLPQPSQYRPITCLPTIYKILTSAISTKINRHIEQHNIMAEEQKGCRRGHMGCKEQLIIDSTIHKHATTKNRNLHCTYIDYKKAFDSVPHSWLIQILKIYRVNSKIIDFLSNIMSQWKTTLQINCNQNSITTRQILIKNGIYQGDSLSPLWFCLALNPLSHLLQRCQAGYRLKHTTEQTTISHLIYMDDIKLYAQTEKDMKKLVEVTADFSQDINMQFGLDKCKTLHIIRGKIRPGNYVVNNTDTITAMEPSDLYKYLGYTQLKGLDHVRIKETLTAEYKRRLNVVCKTQLSGKNLIKALNTFAIPILTYSFGVIKWTKTDTEQLERTTRTTLTKHNNLHPKSAIERLTIKRQNGGRGLIDIQHLWRKQVCRLKTFFHTKSLTSNIHKAIVQNDHNYTPLNLNEQLDTSHNINEDPQTQKIDDWKKKVLHGRHPYDLEQTHVNKDASNKWLKIGNLFPETEGFIIAIQDQIINTKNYRKFIIKDPSVTNDKCRKCHTQPETIQHITGACTTLTQTDYTHRHNQVANVIHQRLAVQYTLIQDTNTPYYNYTPQATLENDTHKLYYDRAILTDRTIHYNRPDIILQDKINKITYLIDIAVPNTHNIQKTITEKISKYAELKEEVTRIWRQEKVYVVPIVLSTTGVIPNHLLHSLKLLSLKETLYITLQKAAILNTCRIVRKFMQIEENEIGPHHNTPHTST

SEQ ID NO: 21375 - protein, 1316 aa, Mimas tiliae
METRSKKKLRGPLPGGDRRGTPGADAGCYSIRTVSGKELNRRTPAGSPESVTADIDLPDRLTDSRTDNPIEPYSPSTVSYILSTDSSPSIPRSPPSNSYRDPSIPALDVAREVTAFLPASTKAGKPRVRMSWSKDVNLFIMRTYYYITKLETDMTIYRKQLHERFSRQYPDVKVTEQRVSDQRRAIERNKLLSQDTLDQLKEEVRKQLENEINNLDDGDDINLIDRDQNHLQPLSQLCTTHSNAQSIPLDPTSRVQHTHNLSYSQITQTSQISTQTESVTLTVENDIETLMEPNFITDTYTQELFEKFTTSLTLYSGLDPVARPKLPKLRYSPKLTKLTQIFNQNILTKFLSQDTKLIDIHTLIYCTAIVISEELGYKITESIRIQSRSRLNRKPPWQHRLETDIEKLRADCGRLTQYINKNRSKKVVKRVEEIFKSKTTHTRHENNNKTPEEFLDTLKQNLALKVHRLKRYKKAQQRKNDNILFTTNEKTFYRNLKKPRINAYNTENTQNIESPTKEQLETFWANLWEETIEHNNYADWIKEEENRWSTVGEMEFIEITESDIKCITNRLHNWKSPGVDKIHNFWFKKLTSLHKLIAKNITEIILNKQNIPHFIATGITYMLPKGEISSEPSQYRPITCLPTLYKIITAVISFKINTHVEHHNIIAEEQKGCRRGHMGCKEQLVIDSTIHKHATTKNRNLHCTYIDYKKAFDSIPHSWLIKVLEIYKINNSLIKFLQNIMTHWKTTLHLNDHNNSITTRPISIKKGIYQGDSLSPLWFCLALNPLSHILQRCRAGYRLKDNTQETIISHLIYMDDIKLYAKTEKDMKKLIDATSNFSKDINMQFGLDKCRTLHIIRGKIRPGDYTVNNNDIITAMEPADLYKYLGYKQLKGLDHTNIKHTLFTEYQRRINLLSKTQLSAKHLIKAFNTYAIPILTYSFGIIKWTKTDIDKIERITRTTLTKHNHHHPKSAIERLTIKRQEGGRGLIDIYNLWQKQLYNLKTFFYSKSHISNIHKAITHNDYNFTPLNLHEQTDQQNLISSDPQKQKIEDWKKKVLHGRHPHDLEQPHIDAIASNKWLNIGNLFPETEGFMLAIQDQVINTKNYRKYIIKDPTVTNDKCRRCHTQSETIQHITGACTSLTQTDYTHRHNQVANIIHQSLARKYTLIPNTNTPYYKYTPETILENSSYKLYFDRAILTDRTIHYNRPDITLQDKTNKITYLIDIAVPNTHNIHKTIIEKINKYTELREEVARIWRQQKVFVVPIVLSTTGVIPKHLRTSLDLLNLNNSIYISLQKAAILNTCRIVRKFLQVSDSGMI

SEQ ID NO: 21376 - protein, 889 aa, Euproctis similis
MKPADRPKLPKLKYSIQLTKLTHLFNQHILHTYLNKDTQLADIHTLIYCTAVVISEELNYKISHNHQNFKTRDNRKPAWQLRLEKDIEKIRADCGRLTQYIKNNRSKKVVKRVEQIFKNHLIHTRHEGDNKNPAEYLDTLKQKLAVKVNRLKRYKKALQRKEENALFGSNEKSFYRNLKTSQIHISPSTNIEIPSKTDLEHFWSGIWEEKMEHNDKADWILEELKQWDTIEEMPFEEITENDIKDVTLKLHNWKSAGIDKVHNYWYKKFTILHKSIARILTDIILERENIPDFLTIGITYMIPKNKYSSQPSQYRPITCLPTIYKILTSVIAHKINNHAERNNIIAEEQKGCRQGHMGCKEQLLIDSVIHRNASVKNRNLHCTYIDYKKAFDSIPHSWLLKILQIYKINTKLIRFLSNIMLHWKTTLQLNYNQTTIKTREININKGIFQGDSLSPLWFCLALNPLSHLLHRCKVGYCLKHTTEQTNISHLIYMDDIKLYAQSKKQMEKLLNVTTEFSKDINMQFGLDKCKTLNIIKGKIQPGDCSVDDDNIIAAMEPTDFYKYLGYNQTKGLNHTLIKENILHEYKNRVNTLCKTQLSAKNLFKALNTFAIPVLTYSFGVIKWSKTNLELLERVTRTTLTKHNHLHPKSAIERLTIRRETGGRGLIDIQQLWQKQIQNLRTFFHKKSRASSIHKAITHNDLNFTPLNLSVFQNTLSNFNTDHQINQIESWKKKTLHGRHPHDLEQNHVDQIASNKWLKVGSLFPETEGFMIAIQDQIINTKNYRKFIIKDSSVTDDKCRKCYSQPETIQHITGACVTLTQTDYTHRHNQLVNIVHQNLALKHNLIPNSLTPYYNYTPQTVLENTTHKLYYDRAILTDKTIHYNRPVCLV

SEQ ID NO: 21377 - protein, 979 aa, Xestia xanthographa
MDPAARPRLPKLKYTPHLFRLVNLFNESILTQFISDDTQLIDIHLLIHCTAVVISEELNFKITDHTGTPRTRQNIVPAWQQRLEKDIDKLRADIGRLTQYISGCRSNKLVKRVEIIFRNNSTHTRHENSNRKPEEFLDTLKQKLALKVHRLKRYKKAQQRKNDNATFATNEKMFYRNLHTPQPDTNHENNTNTPNLPTKEQLEAYWASIWEEQVQHNDQALWIAEEEAKWREIDEMEFVEVAESDITHITARLHNWKSPGIDKIHNFLYKKLTSLHKSIAKNLTDIILGQQNTPEFIATGITYMLPKTKNSPQPSHYRPITCLPTIYKILTSAITKKISSHIEHHNIIAEEQKGCRKGHMGCKEQLIIDSTIHKHATSKNRNLHCTYIDYKKAFDSVPHSWLLQILEIYRINPKIIEFMRHIMLQWKTTLQLNCNPNTVITRQISIKKGIYQGDSLSPLWFCLAFNPLSHLLQRCGAGYCLKNTSDETTISHLIYMNDIKLYAKTEKDMKNLVDITAKFSNDINMKFGLDKCKTLHIVRGKVRPGDYTVNDTDTITAMDPTDMYKYLGYAHLKGLDHVRIKNTLTAEYKRRLNTVCKTQLSGKHLIKALNTFAIPVLTYSFGVIKWTKTDTEQLERTTRTTLTKHNNLHPKSAIERLNIKRQHGGRGLIDIQHLWRKQVNHLKTFFHTKSRTSNIHKAIVTNDLNYTPLNLSNQTETHNTSIDDPQQHKMEDWKRKVLHGRHPHDLEQSHVNKLASNKWLKIGNLFPETEGFIIAIQDQIINTKNYRKYIIKDPTVTNDKCRKCHIQPETIQHITGACTTLTQTDYTHRHNQVANVIHQKLALKHSVIQNTNTPYYNYKPETTLENTTHKLYYDRAILTDRTIHYNRPDIILQDKINKVTYLIDIAIPNTHNIQKTITEKISKYAELKEEVTRIWRQEKVYVVPIVLSSTGVIPNHLLHSLKLLDLKKPSTLHCKKLLF

SEQ ID NO: 21378 - protein, 1321 aa, Xestia xanthographa
METRSKKKRIGPLPGGDRRGAPGADARCHSMRSVSGEELNRRAPTDKDATAEIIDDGDRLTDRTDTPVEPYSPSTVSYTPSRRSSPSIPSSPTVSSPPIISLNTVTPTPTLNVARGVSTFLPASTKVGKARVRMKWSKEVNLFIMRTYLHITKLETDMTTYRQQLHALFTRQYPEITVSEQRISDQRRTIVRNKLLSQEVIDQLKEEVRTQLQQEEIVNYTDTNNITQNINGISHQEQPQLLSQSQLIYAQSQPYSQSQAYTQTSHTSTQTESITLTLENDIETIVVPDQHLTTEPYIQEINDKFRTTITQYSGMDPAARPRLPKLKYTPHLFRLVNLFNESILTQFISDDTKLIDIHLLIYCTAVVISEELNFKITDHTGTPRTRQNIVPAWQQRLEKDIEKFRADIGRLTQYISGCRSNKLVKRVEIIFRNNSTHTRHENSNRKPEEFLDTLKQKLALKVHRLKRYKKAQQRKNDNATFATNEKMFYRNLHTPQTDTNHENNTNTPNLPSKEQLETYWAGIWEEQKQHNDKASWIADEEAKWRDIDVMEFVEVTESDIIHITARLHNWKSPGIDKIHNFWYKKLTALHKSMAKNLTDIVLGQQNIPEFITTGITYMLPKTKYTSEPSQYRPITCLPTIYKILTSAVTKKINSHIIQHNIIAEEQKGCRQGHMGCKEQLIIDSTIHKHATSKNRNLHCTYIDYKKAFDSVPHSWLIQILEIYRINPKIVDFMRHVMLQWKTTLKINSSNNNVTTRQISIKTGIYQGDSLSPLWFCLALNPLSHLLQRCGAGYCLKHAADETTISHLIYMDDIKLYAKSEKDMKKLVDITAEFSQDINMQFGLEKCKTLHIVRGKVRPGDYAVNESDSITALEPTDLYKYLGYTQLKGLDHVKIKDTLATEYKKRVNAVCKTQLSGKHLIKALNTFAIPVLTYSFGVIKWTKTDTEQLQRTTRTTLTKHNNLHPKSAVERLTIKREHGGRGLIDIQHLWRKQVSRLKSFFHTKSRNSNIHKAIVTNDFNYTPLNLSDQIETQNTTNDDPQTQKIKDWKRKVLHGRHPHDLEQSHINKLASNKWLKIGNFFPETEGFIIAIQDQVINTKNYRKYIIKDPTVTNDKCRKCHVHPETIQHITGACTNLTQTDYTHRHNQVANIIHQKLALKHALIQNTNTPYYNYKPETTLENTTHKLYYDRAILTDRTIHYNRPDVILQDKINKVTYLIDIAVPNTHNIQKTITEKISKYAELKEEVTRIWRQEKVYVVPIVLSTTGVIPNHLIHSLKLLDLKETLYITLQKAAILNTCRIVRKFMQIEENEIGPHHNTTSSN

SEQ ID NO: 21379 - protein, 1317 aa, Noctua fimbriata
METRSKKKRIGPLPGGDRRGAPGADAGCLSMRTVSGEELNRRAPTDKDTTAEIIDDGDRLTDRTDTPVEPYSPSTVSYTPSRRSSPSIPSSPTPLSPPIITLNTISPTPTLNAARGVSTFLPASTKAGKARVRMKWSKEVNLFIMRTYLHITKLETDMTTYRQQLHALFTRQYPDITVSEQRISDQRRTIVRNKLLSQEVIDQLKEEVRTQLLHEETVNYTDTNNITQNLSEISHQEQPQSLSQSQIIYTQSQPYNQSQAYTQISHTSTQTESITLTLENDIETIVVPDQHLTTDIYIQEINDKFRTTITQYSGMDPAARPRLPKLKYTPNLFRLVNLFNESILTHFISDDTQLIDIHLLIYCTAVVISEELNFKITDHTRATRTRQNVAPAWQQRLEKGIEKLRADIGRLTQYINGCRSNKLVKRVEVIFRNNATHTRHELNNRKPEEFLDTLKQKLALKVHRLKRYKKAQQRKNDNAIFTTNEKIFYRNLHNPKNDRNYENNTNTPYLPSKEQLETYWASIWEEQKQHNDKASWIVDEEEKWRDIDVMEFVEVTESDIIHITTRLHNWKAPGIDKIHNFWYKKLTTLHKSIAKNLTDIILGQQNIPEFITTGITYMLPKTKYTSEPSQYRPITCLPTIYKILTSAVTKKINSHIIHHNIIAEEQKGCRQGHMGCKEQLIIDSTIHKHATSKNRNLHCTYIDYKKAFDSVPHSWLIQILEIYRVNPKIIDFMRYVMLQWKTTLQINSNNNNVTTRQISIKKGIYQGDSLSPLWFCLALNPLSHLLQRCGAGYCLKHSTDETTISHLIYMDDIKLYAKSEKDMKKLVDITAEFSKDINMQFGLEKCKTLHIVRGKVRPGDYAVNESDSITALEPTDLYKYLGYTQLKGLDHVKIKNTLTAEYKKRVNAVCKTQLSGKHLIKALNTFAIPVLTYSFGVIKWTKTDTEQLQRTTRTTLTKHNNLHPKSAIERLTIKREHGGRGLIDIQHLWRKQVSRLKLFFHTKSRTSNIHKAIVTNDLNYTPLNLSDQIEIQNTTNDDQQIQKIEDWKRKVLHGRHPHDLEQSHINKLASNKWLKIGNIFPETEGFIIAIQDQIINTKNYRKYIIKDPTLTNDKCRKCHVHPETIQHITGACTTLTQTDYTHRHNQVANVIHQKLALKHTLIQNTNTPYYNYKPETTLENTTHKLYYDRAILTDRTIHYNRPDIILQDKLNKITYLIDIAVPNTHNIQKTITEKISKYAELKEEVTRIWRQEKVYVVPIVLSTTGVIPNHLIHSLKLLDLKETLYITLQKAAILNTCRIVRKFMQIEENEIGPHHNT

SEQ ID NO: 21380 - protein, 1316 aa, Xestia c-nigrum
METRSKKKRIGPLPGGDRRGAPGADAGCHSMRTVSGEELNRRAPTDKATTAEIIDDGDRLTDRTYTPVEPYSPSTVSYTPSRQSSPSIPSSPTLSSSPTISLNTVTPTPVLNAARGVSTFLPASTKAGKARVRMKWSKEVNLFIMRTYLLITKLETDMTTYRQQLHTLFTRQYPEITVSEQRISDQRRIIVRNKLLSQEVIDQLREEVRTQLLPVETVNYIDTNSITQNITEISNQEQPQSLSQSQIIVSPSPYNQSQVFTQNISHTSTQTELITLTLENDIEAIVVPDQNLTTDTYIQEINDKFRTTITQYSGMDPAARPRLPKLKYTPNLFRLVNLFNETILTQFISDDTQLIDIHLLIYCTAVVISEELNFKITDHTRAPRSRPNIVPAWQQRLEKDVEKLRADIGRLTQYISGCRSNKLVKRVEIIFRNNSTHTRYEQNNRKPEEFLDTLKQKLALKVHRLKRYKKAQQRKNDNAIFTTNEKVFYRNLHVPKNDRNYENNTNTPTLPPKEQLETYWAGIWEEQKQHNDKASWIADEEMKWRDIDEMEFVEVTESDIIHITARLHNWKSPGIDKIHNFWYKKLTALHKTLAKNLTDIILGQQNLPEFITIGITYMLPKTKYTSEPSQYRPITCLPTIYKILTSVVTKKINSHIIQHNIIAEEQKGCRQGHMGCKEQLIIDSTIHKHATTKNRNLHCTYIDDKKAFDSVPHSWLIQILEIYRINPKIVDFMRHVMLQWKTTLQINSSNNNVTTRQISIKKGIYQGDSLSPLWFCLALNPLSHLLQRCGAGYCLKHSTDDTTISHLIYMDDIKLYAKSEKEMKKLVDITAEFSKDINMQFGLEKCKTLHIVRGKVRPGDYAVNESDSITALEPTDLYKYLGYTQLKGLDHVKIKDTLTTEYKKRVNAVCKTQLSGKHLIKALNTFAIPVLTYSFGVIKWTKTDTEQLQRITRTTLTKHNNLHPKSAIERLTIKRENGGRGLIDIQHLWRKQISRLKSFFHIKSRNSNIHKAIVTNDLNYTPLNLSDQIETHNTTNDDPQTQKIEDWKKKVLHGRHPHDLEQLHINKLASNKWLKIGNLFPETEGFIIAIQDQIINTKNYRKYIIKDPTVTNDKCRKCHVHPETIQHITGACTTLTQTDYTHRHNQVANVIHQKLALKHSLIQNTSTPYYNYKPETTLENTTHKLYYDRAILTDRTIHYNRPDIILQDKINKVAYLIDIAVPNTHNIQKTITEKISKYAELKEEVTRIWRQEKVYVVPIVLSSTGVIPNHLLHSLKLLDLNETLYITMQKAAILNTCRIVRKFMQIEESEIGPHHT

SEQ ID NO: 21381 - protein, 1315 aa, Xestia c-nigrum
METRSKRKRIGPLPGGDRRGAPGADAGCHSMRTVSGEELNRRAPTDKDTTAEITDDGDRLTDRTDTPVEPYSPSTVSYTPSRRSTPSIPSSPTLSSPPIISLNTGTPTPTLTAARGVSTFLPASTKAGKARVRMKWSKEVNLFIMRTYLHITKLETDMTTYRKQLHSLFTRQYPEITVSEQRISDQRRIIVRNKLLSQEVIDQLKEEVRTQLLQEETVTDTNNITQNISEISNQEQPQSLNQSQILYSLSPYNQSQAYTQNISHTSTQTESITLTLENDIETIVTPDQHLTTDTYIQEIIDKFRTTITQYSGMDPAARPRLPKLKYTPNLFRLVNLFNETILTQYISDDTQLIDIHLLIYCTAVVISEELNFKITNHTGNPRTRPNIVPAWQQRLEKDIEKLRADIGRLTQYISGCRSNKLVKKVEIMFRNNLTHTRHEQNNRKPEEFLDTLKQKLALKVHRLKRYKKAQQRKNDNAIFTTNEKVFYRNLHITKNDRNYENNTNTPNLPSKEQLGTYWAGIWEEQKQHNDKASWIADEETKWRDIDEMEFVEVTESDITHITARLHNWKSPGIDKIHNFWYKKLTALHKSLAKNLTDIVLGKQNIPEFITIGITYMLPKTKYTSEPSQYRPITCLPTIYKILTSAITKKINSHIIHHNIIAEEQKGCRQGHMGCKEQLIIDSTIHKHATSKNRNLHCTYIDYRKAFDSVPHSWLIQILEIYRINPKIIDFIRHVMLQWKTTLQINSSNNNVTTRQISIKKGIYQGDSLSPLWFCLALNPLSHLLQGCGAGYCLKHSTDETTISHLIYMDDIKLYAKSEKDMKKLVDITAEFSRDINMQFGLEKCKTLHIVRGKVRPGDYAVNESDSITALEPTELYKYLGYTQLKGLDHVKIKETLTTEYKKRVNAVCKTQLSGKNLIKALNTFAIPVLTYLFGVIKWTKTDTEQLQRTTRTTLTKHNNLHPKSAIERLTIKREHGGRGLIDIQHLWRKQISRLKSFFHTKSHNSNIHKAIVTNDLNYTPLNLSDQIEAQNTTNEDPQTQKIEDWKRKVLHGRNPHDLEQSHINKLASNKWLKIGNLFPETEGFIIAIQDQIINTKNYRKYIIKDPTVTNDKCRKCHLHPETIQHITGACTTLTQTDYTHRHNQVANVIHQKLAIKHTLIQNTNTPYYNYKPEATLENTTHKLYYDRAILTDRTIHYNRPDLILQDKIKKVTYLIDIAVPNTHNIQKTITEKISKYAELKEEVNRIWRQEKVYIVPIVLSTTGVIPNHLIHSLKLLDLKETLYITLQKAAILNTCRIVRKFMQIEENEIGPYHNT

SEQ ID NO: 21382 - protein, 1309 aa, Bombyx mori
MELRSKRKRMGPLPGGDRRGTPGADAGCLSMRIVSGEELNRRAPTDKDATAETRDDGDSLTVRTNTPIESYSPSTVSYTPSRSPSPSVPSSPQPLSFNPDPPIPVLNVAREASSFLPVSTKAGKSRVRMKWSKDVNTFIMRTYFHITKLETDMTTYRQQLHQLFSQQYPEVTVSEQRISDQRRVIVRNKLLSQEILDQLREEVRLQLQEADVGSNTMTLLQDADENIIPEQPQRHFQSQPILQSHPFHQSQAYTQTSNTSSQTENLTFVLENDIETLVIADQNLTTSTYTQEIHDKFIRTLTQYSGMDPAARPKLPKLRYSSNLFRLVNLFNEHILPQFLTKDAKLIDIHTLIYCTAVVVSEDLNYKITEYTGNRRQRNNTKPPWQQRLEKDIEKLRADCGRLTQYINNNRSNKVVRRVEAIFKSNITHTRHENTNQKPEEFLDTLKQKLALKVHRLKRYTKAQQRRNDNTIFATNEKIFYRNLNKPIHNTIDENNTVTPTKENLETYWSSIWEEQVEHNDKATWVTEEKIKWEGIDEMEFTEITELDITHITNKLHNWKSPGIDKIHNFWYKKLTSLHKSIAKNFTNIILGEQNIPDFIATGITYMLPKIQNSPEPSQYRPITCLPTIYKLLTSAITTKINTHVEHHNIIAEEQKGCSRGHMGCKEQLIIDSTIHKHATTKNRNLHCTYIDYKKAFDSVPHSWLIKILEIYRINPKIIDFLRNIMPQWQTTLQINCNSNPIVTRQISIKKGIYQGDSLSPLWFCLALNPLSHLLQRCRAGYCLKNTTENTSISHLIYMDDIKLYAQSEKEMKKLVEATAEFSKDINMQFSLDKCKTLHIIRGKIQPGDYVINDTDTITAMEATDLYKYLGYTQLKGLDHVRIKNTLTAEYKKRLNAICKSQLSSKHLVKALNTYAIPILTYSFGIIKWTKTDTEQVERTTRTTLTKHNKLHPKSAIERLTIKRQNGGRGLVDIQHLWQKQIIRLKSFFHTKSQSSKIHNAIVLNDNNYTPLNLNDQTDTLNTNSNNPQEQKIKEWKKKVLHGRHPHDLEQSHINTLASNKWLKVGSLFPETEGFMIAIQDQIINTKNYRKYIMKDPTITNDRCRKCHTQSETIQHITGACTTLTQTDYTHRHNQVANIIHQKLALKYALIQDTNTPYYKYNPQTILENTTHKLYYDRAILTDKTIHYNRPDITVQDKVNKITYLIDIAVPNTHNIQKTITEKISKYAELKDEVSRIWRQEKVYIVPIVLSTTGVIPNHLLHSLKLLDLKETLYITLQKAAILNTCRIVRKFLQIDENEIAPHNNIPST

SEQ ID NO: 21383 - protein, 1332 aa, Cecropterus tehuacana
MAKGNLVVSMRTLGTRGNPVLLTLTTVNAGLCRGRLLWSLASRGNKMRRSVRIKNKNSAQSGTVAEIVSNPSSPTSTTSSLSQSTNSTPLSFENRNNSISRSTTVSPMSVDVVQLQNVTLPALDVARGANAFLPASTKAGKPRVRMKWSQDVNIFIMRTYYHITKLETDMTTYRKTLHELFSIQYPHVNVSEQRVSDQRRMIVKNRYLTQEILDKLREEVSRQLHEDEHVNEVNDDNNQIHIEVEQNTLESQTHSQNTSFQSHILSQFNNQTFTPTLHSSTQTEFVTLLLENETNTIEEFMPPDDNSFQDMYDKLQTAITQYSGMDPSARPKLPRIKYTKHLNDLVNLFNQHILYRLISKETQLNDIHTLIYCTALVIAEELNYKIIHNTTHKKPKDYTKPSWQIRLEKDIENLRVDIGRLTQFINNNRSDRLVKKVQHIFNRITKHTKHESNNRKPEEFLDTLKQKLALKTHRLKRYKKTQQRKIDNIQFATNEKLFYRNLCKPKIDFTTKKDNHTDIPTKEELETYWCNIWEENIRHNDNADWIREEQSKWEVIDEMQFEEITELDITNITARLHNWKAPGIDKIHNYWYKKLTILHQPLARALTEIILGKQHIPNFITIGITYMLPKTNNSTQPSQFRPITCLPTIYKILTSAITTKINKHIDHHNVLAEEQKGCRRGHMGCKEQLVIDAIIHKHATSKHRNLHCTYIDYKKAFDSIPHSWLIQILQIYRISPIIIEFLRNTMPLWKTSLHLNHGNKSITTRQINIHKGIYQGDSLSPLWFCLALNPLSNLLRNCQTGYRFNNSREETTISHLLYMDDIKLYAKTDKDMQKLVDTTAQFSKDINMQFGLDKCKTLHIIKGKIRPGDYRLNNNEVISAMESTDVYKYLGYNQLKGLLHTHIKHTLTTEFKRRIDAICKTHLSGKHLTKAINTYAIPILTYSFGIVKWTKTDIEQLERITRTTLTKHNQLHPKSAVERLHIKRQDGGRGIIDIHYLWQKQINNLRQFFFMKSTTSNIHSAMTHNDKNLTPLNLSDHTDQHTFNNRNSQAQKIENWKNKVLHGRHPHDLEHTHVDKISSNKWLKVGNLFPETEGFMVAIQDQVINTKNYRKYIIKDPNVKNDKCRRCHTQPETIQHITGACINLTQTDYTHRHNQVTNIIHQNLALKHNLIQNTNTPYYKYTPQTVLENTSHKLYYDRAILTDRTIHYNRPDIILQDKLNKITYLIDIAVPNTHNIQKTIVEKINKYVDLKEEVARIWKQNKIYVVPIVLSTTGVIPYHLHQSIKLIGLKHSLYIPIQKAAILNTCRIVRKFMQIDEKEVSSQNVTQTIAPP

SEQ ID NO: 21384 - protein, 1272 aa, Arctia plantaginis
MQNKTNKYNLRPLPGGRRDSIRNHNINNQTDRQTDNDNISLNSLTSLSVTEPYSPSTSSYRPTPVSFVDEDSHETPNPTLAVTQEVNAFLPASTKSGKPRVRMRWSKEVNLFIMRTYYQITKLETDMTTYRKQLHELFIRHYPDINVTEQRIADQRRTIVRNKLLTEETLHILKEEIRMQLQQNEHIYEYIENNSNPQLHNTQSVTTALPTQSQPHTITQSSQISTQPETITLTLDNDIEIMQNNPSSDNIQKIQEKFRTALALYSRMDPITRPKLPKLKYSRKLSELTHVFNHNILHQFLSEDTQLTDIHTLIYCTALVISEELNYKIIDHPRNILRKNSKPPWQIRLEKDIEQLRADCGRLTQYINNNRSNKIVKRVEQIFRRQSTHTRHENNNRKPEEYLDTLKQKLALKVHRLKRYKKAQQRKNDNMLFTLNEKSFYRNLSKPQTATTRPENIDIPTQTQLETFWSGIWEEPVQHNDKADWITEEENKWNSIEEMEFDCITEDDIAHVTGKLHNWKSPGIDKIHNYWYKKITSFHKPIAKNLTYIILGKQNIPEFIGMGITYMLPKTAHSPQPSQYRPITCLPTIYKILTSAIAHKINMHIEHNHIIAEEQKGCRRGHMGCKEQLIIDSTIHKHATTKNRNLHCTYIDYKKAFDSIPHSWLIKILHIYKINPKITDFMRDIMSHWKTTLHLNMNDRTVTTRQISIKKGIYQGDFLSPLWFCLALNPLSHLLQRCQAGYRLRNSTEETIISHLIYMDDIKLYAKSDKEMTKLLQNTTKFSKDINMEFGLDKCKTLHIIRGKIRPGDYAVDESSTIAAMESTDLYKYLGYKQLKGLDHTSIKQILVTEFKSRTNTLCKTQLSAKNLIKALNTYAIPILTYSFGIIKWTKTDIEQIERTTRTTLTKHNHLHPKSAIERLTIKRENGGRGLIDIYHLWQKQVYNLKTFFRTKSHTSNIHKAITLNDYNFTPLNLNDHTGIHNPNNIDPQADKIENWKKKVLHGRHPHDLEQPHIDTIASNSWLKIGNLFPETEGFIIAIQDQIVNTKNYRKYIIKDATVTDDKCRKCHIQSETIQHITGACITLTQTDYTHRHNQITNIIHQKLALKHHLIQNTNTPYYNYTPQSVLESSSHKLYYDRAILTDRTIHYNRPDITLQDKINKTTYLIDIAVPNTHNLQKTITEKISKYTELKEEIIRIWRQEKVYIVPIVLSTTGVIPKHLHHSLKLINLNESVYFNLQKAAILNTCRTVRKFMDIEENGTAQHTQQPPSTST

SEQ ID NO: 21385 - protein, 1003 aa, Noctua janthe
MDPAARPRLPKLKYTPNLFRLVNLFNESILTQFISDDTQLIDIHLLIYCTAVVISEELNFKITDHTGTPRTRQNLAPAWQQRLEKDIEKLRADIGRLTQYINGCRSNKLVKRVEVIFRNNLTHTRHEKNNRKSEEFLDTLKQKLALKVHRLRRYKKAQQRKKDNTTFATNEKMFYRNLHKPQTDTIDINNTNIPNLPTKEQLEEYWASIWEEPVQHNDKASWIAEEEVKWRGVDEMEFLEVAETDITHITARLHNWKSPGIDKIHNFWYKKLTSLHKSLAKNLTDIILGQQNTPEFIATGITYMLPKTTNSPQPSQYRPITCLPTIYKILTSAITKKISSHIERHNIIAEEQKGCRQSHMGCKEQLIIDSTIHKHATSKNRNLHCTYIDYKKAFDSVPHSWLIQILEIYRINPKIIDFIRNIMLQWKTTLQINYNHNTVTTRQISIKKGIYQGDSLSPLWFCLALNPLSHLLQGCGAGYCLKHTTDETIISHLIYMDDIKLYAKTENDMKKLVDVTAEFSKDINMQFGLEKCKTLHIVSGKVRPGDYVVNDTDTISAMEQTDLYKYLGYAQLKGLDHTRIKNTLSNEYKRRVNAICKTQLSGKHLIKALNTFAIPVLTYSFGVIKWSKTDTEQLERTTRTTLTKHNNLHPKSAIERLTIKRQHGGRGLIDIQHLWRKQISRLKSFFHSKSRTSSIHKAIVINDLNYTPLNLSHQIETLNTTNDDPQQHKIEDWKRKVLHGRHPHDLEQSHINKLASNKWLKIGSLFPETEGFIIAIQDQIINTKNYRKYIIKDPTATNDKCRKCHSQPETIQHITGACTTLTQTDYTHRHNQVANVIHQKLALKHTLIHNTSTPYYNYKPEATLENTTHKLYYDRAILTDKTIHYNRPDIILQDKINKVTYLIDIAVPNTHNIQKTITEKISKYAELKDEVTRIWRQEKVYVVPIVLSTTGVIPNHLLHSLKLLDLKESIYIILQKAAILNTCRIVRKFLQIEENEIGPHHNT

SEQ ID NO: 21386 - protein, 1318 aa, Hydraecia micacea
METRSKRKRLGPLPGGDRRGALGADAECLSMRTVSGEELSRRAPTDKDATADITDDGDRLTDRTNTPVEPYSPSTVSYTPSRPSTPCVPSSPSISSSPPITSFNSVQPTSTLNVTREVSTFLPASTKAGKARVRMRWSKEVNLFIMRTYLYITKLETDLTTYRKQLHELFTRKYPEITVTEQRISDQRRIIVRNKLLSQDVINQLKEEVRTQLQGESENTAGEITIALTQNTTAYNEQEQPCSQTEPITQSQPYFQSQAYSQTTHTSTQTESITVMLENEIETLADININQSTDTHIQEIHDKFKTALTQYSGMDPAARPRLPKLRYTPKLSQLVHLFNQNILQQYISEETRLIDIHTLIYCTALVISEELNFKITEYTGNSRQKNINKPAWQQRLEKDIEKLRADCGRLTQYINNNRSNKVVKRVEAIFKNMATHTRHENDNRKSEEFLDTLKQKLALKVHRLRRYKKAQERKNDNSLFATNEKNFYRNLQTAQTDTNTRTTENNVELPTTEQLETFWSGIWEEQVQHNKNSNWIIDEETKWSSLEEMEFVELTESDITCVTARLHNWKSPGIDKIHNYWYKKLESLHKVLAKNLTQIILGKQNIPEFIATGITYMLPKAQYSPQPSQYRPITCLPTIYKILTAAITRKINKHIEHHNIISEEQKGCRRGHMGCKEQLVIDSIIHKHAATKHRNLHCTYIDYKKAFDSIPHSWLIQILHIYKINSKIIDFLQDIMARWRTTLQLNYQNNAITTRQISIKKGIYQGDSLSPLWFCLALNPLSDLLHRSQAGYSLKHATEETIISHLIYMDDIKLYSKSEKEMKKLIDITTEFSKDINMQFGLDKCKTVHIIRGKIKPGDYPINNTDTITAMEPTDLYKYLGYKQLKGLDHSTIKYTLNSEYKRRVVAVCKTQLSGKHLIKALNTYALPILTYSFGVIKWSKTDIQQIERTTRTTLTKHNNLHPKSAIERLTIKRQYGGRGLIDVHHLWQKQIAKLRTFFHSKSHTSNIHKAVVMNDISYTPLNLHEQIDIQHTGDEDPHKQKLEDWKKKVLHGRHPHDLEQSHIDTIASNKWLKIGNLFPETEGFIIAIQDQIINTKNYRKFIIKDPTIINDKCRKCHSQPETIQHITGACTTLTQTDYTHRHNQVANVIHQKLALKYKLIQDTNTPYYKYVPQTVLESTTHKLYYDRAILTDRTVHYNRPDITLKDKVNNITYLIDIAVPNTHNLQKTIGEKISKYAELKDEVTRIWRQEKVYVVPIVVSTTGVIPNHLHHSLKLIDLKDSIYITLQKAAIINTCRIVRKFLQIEENEISPPNNNSS

SEQ ID NO: 21387 - protein, 1319 aa, Hydraecia micacea
METRSKSKRIGPLPGGDRRGAPGADAGCLSMRTVSGEELNRRAPTDKDTTAEIIDDGDRLTDRTNTPVEPYSPSTVSYTPSRPSSPSIPSSPTLSSPPITSLNSIPPTPALNVAREVSSFLPASTKAGKARVRMRWSKEVNLFIMRTYFYITKLETDMTTYRQQLHELFTRQYPEITVSEQRISDQRRAIVRNKLLSQEIIEQLKEETRIQLQEAENNTSADAIPLSQNTTETAEQSHSQPHIQVTPYTQSQLYNQSQVFTQTSHTSTQTESIILTLENDIETLTVADQNLTADICIQVIVDKFRTSLAQYSGMDPAVRPKLPKLRYSPILFRLVNLFNENILHQFISDDTQLLDIYTLIYCTAVVVSEELNFKITQHTGNTRPKQNIKPAWQQRLEKDIEKLRADCGRLTQYINNVRSSKVVKRVEAIFRSSVTHTRHENNNRKPEEFLDTLKQKLALKVHRLRRYKKAQQRKNDNAIFAANEKMFYRNLHKPNTDTNDVNDTVAPDQPTKEQLETYWSSIWEEQEQHNDKATWITEEETKWRAIQEMEFIEITEIDITHLTGRLHNWKSPGIDKIHNFWYKKLTSLHKPIAKNLTEIILGRQNIPDFIATGITYMLPKTINSPQPSQYRPITCLPTIYKILTSAITTKINSHIEHHNIMAEEQKGCRRGHMGCKEQLIIDSTIHKHATTKNRNLHCTYIDYKKAFDSVPHSWLIKILEIYRINSKIIDFLRNIMPLWKTTLQINSNDNNVTTRQISIKKGIYQGDSLSPLWFCLALNPLSHLLQRCQAGYCIKHTADQTSVSHLIYMDDIKLYAQTEKDMKKLVEATAEFSLDINMQFGLDKCKTLHIIRGKIRPGDYVVNNTDTITAMEPTDLYKYLGYTQLKGLDHVSLKETLTAEYKRRLNTICKTQLSSKNLIKALNTFAIPILTYSFGVIKWTKTDTEQLERTTRATLTKHNNLHPKSATERLTIKRQHGGRGLIDIQHLWRKQVCRLKTFFHSKSRTSNIHKAIVLNDFNYTPLNLNEQLDTPPIISDDPQIQKIEDWKKKVLHGRHPHDLEQSHVNKVASNKFLKIGNLFPETEGFIIAIQDQIINTKNYRKFIIKDPSVTNDKCRKCHSQPETIQHITGACATLTQTDYTHRHNQVANVIHQKLALKYTLIQNTNTPYYNYTPQTILENETHKLYYDRAILTDRTIHYNRPDITLQDKINKVTYLIDITVPNTHNIQKTISEKISKYAELKDEVTRIWRQQKVYVVPIVLSTTGVIPNHLLHSLKLLNLKETLYITLQKAAILNTCRIVRKFMQIDENEIGPHHNTSVT

SEQ ID NO: 21388 - protein, 1315 aa, Eupsilia transversa
METRSKRKRIGPLPGGDRRGAPGADAGCHSMRTVSGEELNRRAPTDKDATAEISDDGDRLTDRINTPVEPYSPSTVSYTPSRASSLSIPSSPIPSSPPITSLNSIQPTPTLNVAREASSFLPASTKAGKARVRMRWSKEVNLFIMRTYFYITKLETDMTTYRQQLHELFSQQYPEITVSEQRISDQRRAIVRNKLLSQEIIEQLKEETRIKLQETENNTGANDILLSQNITEIAEQPHTQVESYTQSQPYNQTQAYTQTSHTSTQTESITLTLENDIETLTVPDQNLTTDIYIQEIHDKFRTTLAQYSGMDPTVRPKLPKLRYSPNLFRLVNLFNENILYQFISDDTQLIDIHTLIYCTAVVVSEELNFKITQHTGNTRPKQNIKPAWQQRLEKDIEKLRADCSRLTQYINNIRSSKVVRRVEAIFRSSPMHTRHENNNRKPEEFLDTLKQKLALKVHRLRRYKKAQQRKNDNAIFATNEKMFYRNLHKLDTDTNDENNTDAPNQPTKEQLETYWGSIWEEQEQHKDKATWITEEETKWRAIDEMEFVEITEADITHLTGRLHNWKSPGIDKIHNFWYKKLTSLYKPIAKNLTEIILGQQNIPDFIATGITYMLPKTKNSPQPSQYRPITCLPTIYKILTSAITTKINSHIEHHNIMAEEQKGCRRGHMGCKEQLIIDSTIHKHAATKNRNLHCTYIDYKKAFDSVPHSWLIHILEIYRINSKIIDFLRNIMPLWKTTLQLNCNQNNVTTRQIFIKKGIYQGDSLSPLWFCLALNPLSHLLQRCRAGYCFKHTTEQTTVSHLIYMDDIKLYAQTEKDMKKLVEATAEFSLDINMQFGLDKCKTLHIIRGKIRPGNYVVNNTDTITAMESTDLYKYLGYTQLKGLDHVRIKETLTAEYKRRLNAICKTQLSGKNLIKALNTFAIPILTYSFGVIKWTKTDTEQLERTTRTTLTKHNKLHPKSAIERLTIKRQNGGRGLIDIQHLWRKQVSRLKTFFHSKSRTSNIHKAIAQNDFNYTPLNLNEQPDTPEITSDDPQTQKIEDWKKKVLHGRHPHDLEQSHVNKVASNKFLKIGNLFPETEGFIIAIQDQIINTKNYRKFIIKDPSVTNDKCRKCHIQSETIQHITGACITLTQTDYTHRHNQVANVIHQKLALKYTLIQDTKTPYYNYTPQTILENDTHKLYYDRAILTDRTIHYNRPDITLRDKINKVTYLIDIAVPNTHNIQKTITEKISKYAELKDEVARIWRQEKVYVVPIVLSTTGVIPNHLLHSLKLLNLKETLYITLQKAAILNTCRIVRKFMQIDENEIGPHHNTSVT

SEQ ID NO: 21389 - protein, 1316 aa, Mimas tiliae
METRSKKKLRGPLPGGDRRGTPGADAGCYSIRTVSGKELNRRTPAGSPESVTADIDLPDRLTDSRTDSPIEPYSPSTVSYILSTDSSPSIPRSPPSNSYRDPSIPALDVAREVTAFLPASTKAGKPRVRMSWSKDVNLFIMRTYYYITKLETDMTIYRKQLHERFSRQYPDIKVTEQRVSDQRRAIERNKLLSQDTLDQLKEEVRKQLENEINNLDDGDDINLIDRDQNHLQPLSQLCTTHSNAQSIPLDPTSRVQHTHNLSYSQITQTSQISTQTESVTLTVENDIETLMEPNFITDTYTQELFEKFTTSLTLYSGLDPVARPKLPKLRYSPKLTKLTQIFNQNILTKFLSQDTKLIDIHTLIYCTAIVISEELGYKITESIRIQSRSRLNRKPPWQHRLETDIEKLRADCGRLTQYINKNRSKKVVKRVEEIFKSKTTHTRHENKNKTPEEFLDTLKQNLALKVHRLKRYKKAQQRKNDNILFTTNEKTFYRNLKKPRINAYNTENTQNIESPTKEQLETFWANLWEETIEHNNYADWIKEEENRWSTVGEMEFTEITESDIKCITNRLHNWKSPGVDKIHNFWFKKLTSLHKLIAKNITEIILNKQNIPHFIATGITYMLPKGEISSEPSQYRPITCLPTLYKIITAVISFKINTHVEHHNIIAEEQKGCRRGHMGCKEQLVIDSTIHKHATTKNRNLHCTYIDYKKAFDSIPHSWLIKVLEIYKINNSLIKFLQNIMTHWKTTLHLNDHNNSITTRPISIKKGIYQGDSLSPLWFCLALNPLSHILQRCRAGYHLKDNTQETIISHLIYMDDIKLYAKTEKDMKKLIDATSNFSKDINMQFGLDKCRTLHIIRGKIRPGDYTVNNNDIITAMEPADLYKYLGYKQLKGLDHTNIKHTLFTEYQRRINLLSKTQLSAKHLIKAFNTYAIPILTYSFGIIKWTKTDIDKIERITRTTLTKHNHHHPKSAIERLTIKRQEGGRGLIDIYNLWQKQLYNLKTFFYSKSHISNIHKAITHNDYNFTPLNLHEQTDQQNLLSSDPQKQKIEDWKKKVLHGRHPHDLEQPHIDAIASNKWLNIGNLFPETEGFMLAIQDQVINTKNYRKYIIKDPTVTNDKCRRCHTQSETIQHITGACTSLTQTDYTHRHNQVANIIHQSLARKYTLIPNTNTPYYKYTPETILENSSYKLYFDRAILTDRTIHYNRPDITLQDKTNKITYLIDIAVPNTHNIHKTIIEKINKYTELREEVARIWRQQKVFVVPIVLSTTGVIPKDLRTSLDLLNLNNSIYISLQKAAILNTCRIVRKFLQVSDSGMI

SEQ ID NO: 21390 - protein, 1215 aa, Thyatira batis
MSWSKDVNIFIMRTYFRITRLETDLTTYRQQLHELFTQQYPGITVSEQRISDQRRIIVRNKLLSPEIIKQLKEETRLHLQEEQNNTDNIATSLNANETNTQHSQIELTTNTHCQYNYSLSNTQTSHTSTQTESITVMLENDIETIDIPDQNIISNEILQEINNKFRTALTQYSGMDPAARPKLPKLKYSPKLFRYVNLFNENILNQFTSDDTKLIDIHTLIYCTAVVISEELNFKITDHLINSRPKHKTQPPWQQRLEKDIEKLRADCGRLTQYINNNRSSNVVRRVEAIFQSSLTHTRHENNNRRPEEFLDTLKQKLALKVHRLRRYNKAQQRKNDNALFAKNEKMFYRTLHKPHTDNVNTNNTNTNNTDTNNTNTNNTDTNNTNTNNTDTNNTNTDTNNTTDIPTKEQLETFWSSIWEEQVQHNDKASWIIDEETKWKAIDEMEFVEITESDISNITARLHNWKSPGLDKIHNFWYKKLTTLHKALAKNLTEIILEKQNIPEFIATGITYMLPKTKNPLQPSQYRPITCLPTIYKILTSAITAKINTHIEHHKIMAEEQKGCRRGHMGCKEQLIIDSTIHKHATTKNRNLHCTYIDYKKAFDSVPHSWLLQILQIYKINPKIIAFLRNIMSQWKTSLQINTNHNTILTRQISIKKGIYQGDSLSPMWFCLALNPLSHLLQRCQAGYNFKHTINQTKVSHLIYMDDIKLYAQTEKDMKKLVVATSEFSKDINMQFGLDKCKTLHIIRGKVKPGNYNINNTDTITAMEPADLYKYLGYSQLKGLDHIRIKNTLTTEYKRRLNAICKSQLSGKHLIKALNTYAIPILTYSFGVIKWTKTDTEQLERTTRTTLTKHNNLHPKSAIERLTIKRQNGGRGLIDIQQLWRKQVSRLKTFFHTKSLTSNIHKAIVLNDLNYTPLNLIEQVDTQQTNNEDPQKQKMEDWKKKVLHGRHPHDLQQSHINTIASNKWLKIGNLFPETEGFMIAIQDQIINTKNYRKYIIKDPSVNNDKCRKCHTQPETIQHITGACTTLTQTDYTHRHNQIANIIHQKLALKYTLIQNTNTPYYNYTPQTILENTTHKLYYDRAILTDRTIHYNRPDITLRDKINKVTYLIDIAVPNTHNIQKTITEKLTKYLELKDEVTRIWRQEKVYIVPIVLSTTGVIPNHLLHSLKLIDLHESLYITLQKAAILNTCRIVRKFMQLEEGEIGPHSQNTHT

SEQ ID NO: 21391 - protein, 1044 aa, Cosmia trapezina
MLENEIETLADININQSTDTRIQEIHDKFKTALTQYSGMDPAARPKLPKLRYTPKLSQLVHLFNQNILQQYISDDTHLIDVHTLIYCTALVISEELNFKITEYTGNPRQRNANKPAWQQRLEKDIEKLRADCSRLTQFINNNRSKKVVKRVEVIFKNMAIHTRHENDNRKPEEFLDTLKQKLALKVHRLRRYKKAQERKNDNSLFATNEKNFYRNLQKPQTDTNTPTTENNVELPTAEQLETFWSGIWEEHVQHKEKSDWITDEETKWSSLEEMEFDELTESDITCITARLHNWKSPGIDKIHNYWYKKLESLHKVLAKNLTEIILGKQNIPEFIATGITYMLPKAQYSPQPSQYRPITCLPTIYKILTSAITTKINKHVENHNIIAEEQKGCRRGHMGCKEQLVIDSIIHKHATTKNRNLHCTYIDYKKAFDSIPHSWLIQILQIYKINSKIIDFLQNIMSRWRTTLHLNYQHNAITTRQISIKKGIYQGDSLSPLWFCLALNPLSNLLHRSQAGYSLKHSTEETIISHLIYMDDIKLYSKSEKDMKKLIDITTEFSKDINMQFGLDKCKTVHIIRGKIKPGDYPINNTDTITAMEPTDLYKYLGYRQLKGLDHSAIKCTLNSEYKRRVVAVCKTQLSGKHLIKALNTYAIPILTYSFGVIKWSKTDIQQIERTTRTTLTKHNNLHPKSAIERLTIKRQYGGRGLIDVHHLWQKQIAKLKTFFNSKSHTSNIHKAVVMNDISYTPLNLHEQIDTQHTSNEDPHKQKLEDWKKKVLHGRHPHDLEQSHIDTIASNKWLKIGNLFPETEGFIIAIQDQIINTKNYRKFIIKDPTITNDKCRKCHSQPETIQHITGACTTLTQTDYTHRHNQVANIIHQKLALKYNLIQDTNTPYYKYIPQTVLESTTHKLYYDRAILTDRTVHYNRPDITLKDKVNKVTYLIDIAVPNTHNLQKTIGEKISKYAELKEEVTRIWRQEKVYIVPIVVSTTGVIPNHLHHSLKLIDLKDSIYITLQKAAILNTCRIVRKFMQIEENEISPHNINSSS

SEQ ID NO: 21392 - protein, 1319 aa, Mesoligia furuncula
METRSKRKRIGPLPGGDRRGAPGADAGCLSMRTVSGEELNRRAPIDKDTTAEIIDDGDRLTDRTTTPVEPYSPSTVSYTASRPSSPSMPSSPILSSPPITSLNSIPSTSTLNVAREVSSFLPASTKAGKARVRMRWSKEVNLFIMRTYFYITKLETDITTYRQQLHELFTRQYPEITVSEQRISDQRRAIVRNKLLSQEIIEQLKEETRIQLQEAEYNTSADANPLSESTTETAQQSHSQPHIQVTPYTQSQSYNQSQVFTQTSHTSTQTESIMLTLENDIETLTVADQNLTADICIQEILDKFRTTLAQYSGMDPAVRPKLPKLRYSPNLFQLVNLFNENILHQFISDDTQLIDIHTLIYCTAVVVSEELNFKITQYTGNTRPKQNTKPAWQQRLEKDIEKLRADCSRLTQYINNIRSRKVVKRVEALFRSSVTHTRHENDNRKPEEFLDTLKQKLALKVHRLRRYKKAQQRKNDNAIFATNEKIFYRNLYKPDADTNDENNTDAPNQPTKEQLETYWSSIWEEQEQHNDKATWITEEETKWRAIEEMEFVEITEADITHLTGRLHNWKSPGTDKIHNFWYKKLTILHKPIAKNLTKIILGQQNIPDFIATGITYMLPKTKNSPQPSQYRPITCLPTIYKILTSAITMKINSHIEHHNIMAEEQKGCRRGHMGCKEQLIIDSTIHKHASTKNRNLHCTYIDYKKAFDSVPHSWLIQILEIYRINSKIIDFLRNIMPLWKTTLQINCNHNNITTRQISIRKGIYQGDSLSPLWFCLALNPLSNLLQRCRAGYCLKHTTEQTTVSHLIYMDDIKLYAQTEKDMKKLVEATAEFSLDINMQFGLDKCKTLHIIRGKIRSGNYVVNNTDTITAMEPTDLYKYLGYTQLKGLDHVRIKETLTTEYKRRLNAICKTQLSSKNLMKALNTFAIPILTYSFGVIKWTKTDTEQLERTTRTTLTKHNNLHPKSAIERLTIKRQNGGRGLIDIQHLWRKQVCRLKTFFQSKSRTSNIHKAIVQNDFNYTPLNLNEQLDTPHNTSDDPQKQKIEDWKKKVLHGRHPHDLEQSHVNQLASNKFLKIGNLFPETEGFIIAIQDQIINTKNYRKFIIKDPSVTNDKCRKCHIQPETIQHITGACTTLTQTDYTHRHNQVANVIHQKLALKYTLIQDANTPYYNYTPQTILENDTHKLYYDRAILTDRTIHYNRPDITLQDKINKVTYLIDIAVPNTHNIQKTISDKISKYAELKDEVTRIWRQQKVYVVPIVLSTTGVIPNHLLHSLKLINLKETLYITLQKAAILNTCRIVRKFMQIDENQVGSHHNTSLS

SEQ ID NO: 21393 - protein, 1316 aa, Xestia c-nigrum
METRSKKKRIGPLPGGDRRGAPGADAGCHSMRTVSGEELNRRAPTDKATTAEIIDDGDRLTDRTDTPVEPYSPSTVSYTPSRQSSPSIPSSPTLSSSPTISLNTVTPTPVLNAARGVSTFLPASTKAGKARVCMKWSKEVNLFIMRTYLLITKLETDMTTYRQQLHTLFTRQYPEITVSEQRISDHRRIIVRNKLLSQEVIDQLREEVRTQLLPVETVNYIDTNSITQNITEISNQEQPQSLSQSQIIVSPSPYNQSQVFTQNISHTSTQTELITLTLENDIEAIVVPDQNLTTDTYIQEINDKFRTTITQYSGMDPAARPRLPKLKYTPNLFRLVNLFNETILTQFISDDTQLIDIHLLIYCTAVVISEELNFKITDHTRAPRSRPNIVPAWQQRLEKDVEKLRADIGRLTQYISGCRSNKLVKRVEIIFRNNSTHTRHEQNNRKPEEFLDTLKQKLALKVHRLKRYKKAQQRKNDNAIFTTNEKVFYRNLHVPKNDRNYENNTNTPTLPSKEQLETYWAGIWEEQKQHNDKASWIADEEMKWRDIDEMEFVEVTESDIIHITARLHNWKSPGIDKIHNFWYKKLTALHKTLAKNLTDIILGQQNLPEFITIGITYMLPKTKYTSEPSQYRPITCLPTIYKILTSVVTKKINSHIIQHNIIAEEQKGCRQGHMGCKEQLIIDSTIHKHATTKNRNLHCTYIDYKKAFDSVPHSWLIQILEIYRINPKIVDFMRHVMLQWKTTLQINSSNNNVTTRQISIKKGIYQGDSLSPLWFCLALNPLSHLLQRCGAGYCLKHSTDDTTISHLIYMDDIKLYAKSEKEMKKLVDITAEFSKDINMQFGLEKCKTLHIVRGKVRPGDYAVNESDSITALEPTDLYKYLGYTQLKGLDHVKIKDTLTTEYKKRVNAVCKTQLSGKHLIKALNTFAIPVLTYSFGVIKWTKTDTEQLQRITRTTLTKHNNLHPKSAIERLTIKRENGGRGLIDIQHLWRKQISRLKSFFHIKSRNSNIHKAIVTNDLNYTPLNLSDQIETHNTTNDDPQTQKIEDWKKKVLHGRHPHDLEQLHINKLASNKWLKIGNLFPETEGFIIAIQDQIINTKNYRKYIIKDPTVTNDKCRKCHVHPETIQHITGACTTLTQTDYTHRHNQVANVIHQKLALKHSLIQNTSTPYYNYKPETTLENTTHKLYYDRAILTDRTIHYNRPDIILQDKINKVAYLIDIAVPNTHNIQKTITEKISKYAELKEEVTRIWRQEKVYVVPIVLSSTGVIPNHLLHSLKLLDLNETLYITMQKAAILNTCRIVRKFMQIEESEIGPHHT

SEQ ID NO: 21394 - protein, 1173 aa, Omphaloscelis lunosa
MRWSKEVNLFIMRTYLYITKLETDMTTYRQQLHERFSRQYPEISVSEQRISDQRRTIVRNKLLSQGELDQLKEEVHTQLQQDTNTIILTQNTNENSIQDQPQSLTQSQPNFESQPYNQSQTSHISTQTESITLTLENDIETVAAVNQNPITDMYIQEIHDKFRTTLTQYSGMDPAARPKLPKLKYSPNLFRLVNLFNEDILKQFLSDNTQLIDINTLVYCTAVVISEELNFKITEHARNTIQRDTVKPPWQLRLEKDIEKLRADCGRLTHYINGSRSHKVVKRVEAIFKNNFTHTRHEINNRKPEQFLDTLKQKLALKVHRLRRYLKAQQRKKDNAIFATNEKLFYRNIQKPHTDSTTENDTDIPSKENLETFWSNIWEEQVHHNDKATWITEEATKWTAIDEMEFKEITESEITYLTARLHNWKSPGIDKIQNFWYKKLTILHKSIAKNFTDIVLGEQNIPEFIATGITYMLPKTKNTSEPSQYRPITCLPTIYKILTSAITNKINSHIEHHNIIAEEQKGCRRGHMGCKEQLVIDSTIHKHATTKNRNLHCTYIDYQKAFDSIPHSWLIQILEIYKINPKIIEFLRIVMTRWKTTLQINNRLGTLLTRQIHIKKGIYQGDSLSPLWFCLALNPLSHLLNRCRAGYNFKNNTGETIISHLIYMDDIKLYAKTVKEMKTLIEVTTTFSQDINMQFGLDKCRTLHIIKGKVKPGNYAVNDTDTIAAMEPTDLYKYLGYKQLKGLDHTTIKQTLNTEYRRRINAICKTQLSGKHLIKALNTFAIPILTYSFGVIKWSKTDIEHLERITRTTLTKHNNLHPKSAIERLTIKRQNGGRGLIDIHHLWQKQITSLKTFFYTKSRTSNIHKAIAQNDFNYTPLNLNEHRDTTQITSDDPHEQKIENWKKKVLHGRHPHDLEQSHVNKLASNKFLKIGNLFPETEGFIIAIQDQIINTKNYRKFIIKDPSVTNDKCRKCHIQPETIQHITGACTTLTQTDYTHRHNQVANVIHQKLAVKYTLIQDTNTPYYNYIPQTILENDTHKLYFDRAILTDKTIHYNRPDITLQDKINKVTYLIDIAVPNTHNIQKTISEKISKYAELKDEVTRIWRQQKVYVVPIVLSTTGVIPNHLLHSLKLLNLKETLYITLQKAAILNTCRIVRKFMQIDEYEIGPHNTSST

SEQ ID NO: 21395 - protein, 1309 aa, Hemaris fuciformis
METRSKKKLRGPLPGGDRRGTPGADAGCYSMQTVSGEELSRRAPTGSPESITAANLTDRQTDSRSNSPSEPYSPSTKSYTPSICSSSSRSPPSLTNKIREPSIPALDAAREVNRPFLPMSTKAGKPRVRMSWSRDVNLFIMRTYYYITKLETDMTIYRKHLHEHFSQRYPDVIVSEQRLSDQRRAIVRNNLLPQDVLDQLKTDVRKQLEEESMINDDTEVICRNQSPLPHPHTSNSNTPHISLIQIQPITQENQNQCSQITHTSTQTENVILTLENDIDNMPEPNISTDIHIQTIQDKFTATLTLYSGLDPTLRPKLPKLKYTSKLTSLINIFNQSILNNCISKTTKLLDIHTIIYCTAYVIAEELDFKINEQRVGRIKPGKNIKPAWQYRLEKDIEKLRADCGRLTQYINNNRSKKVIKKVEEIFKKYTTHTRHENNNKKPEEFLDTLKQKLAVKAQRLKRYKKAQERRKDNVLFAKNEKMFYRQLRNPHTNIKTNIHNENNISTPKKEALEAFWAKVWEEQIQHNDEANWIKEEENMWSEVDEMEFTEVTEADIKLITNRLHNWKSPGIDKIHNFWYKKLTSLHKAIAQNFTDIILRKQSFPHFLATGITYMLPKDKFSPDPSNYRPITCLPTIYKILTSVITSKINKHVENHNIIAEEQKGCRRGHMGCKEQLVIDSTIHKHASTKSRNLHCTYIDYKKTFDSIPHSWLIQILKIYKINSVIIEFLQNIMLNWKTTLHLYNVNDPIITRQLSIRKGIFQGDSLSRLWFCLALNPLSHILQRSRAGYHLKHNSEETNISHLIYMDDVKLYSKNEKDMNKLIEATLNFSKDINMHFSLDKCKTVHIIRGKIRSGDYTLNNSELITAMEPTDLYKYLGYKQLKGIDHKNIKHTLSGEYRRRVNAICKTQLSAKNLIKALNTYVIPILTYSFGVIKWSKTNIEQIERLTRTTLTKHKYLHPKSAVERTTIKREAGGRGLIDIYNLWQKQIYNLKLFFREKSRTSNIHNAICQNDNNFTPLNLCEPPNPPNPNNIDRQQQKIEDWKKKVLHGRHPHDLEQPHIDKIGSNKWLKIGGLFPETEGFLIAIQDQVINTKNYRKFIIKDPTMINDKCRRCHTQPETIQHITGACICLTQTDYTHRHNQISNIIHQTLALKYNLIQSSKTPYYKYTPETILENALYKLYYDRAILTDRTIHYNRPDITLQDKRNKTTYLIDIAVPNTHNIQKTIAEKNNKYTDLKNEVIRIWKQEKVYVVPIVLSTTGVIPKHLHHSLKLLNLNKSLYITLQKAAILNTCRIVRKFMEIDETVSHP

SEQ ID NO: 21396 - protein, 1275 aa, Noctua janthe
METRSKKKRIGPLPGGDRRGAPGADAGCLSMRTVSGEELNRRAPTDKDTTAEIIDDGDRLTDRTDTPVEPYSPSTVSYTPSRRSSPSIPSSPTPLSPPIISFNTVSPTPTLNATRGVSTFLPASTKAGKARVRMKWSKEVNTFIMRTYLYITKLETDMTTYRQQMHALFTRQYPDIAVSEQRIADQRRTIVRNKLLSQEVIDQLKEEIRTQLLQEETLNCIDTNNITQNVNEIYHQEQPQLLSQSQLIYSQSQPYNQSQAHTQISHTATQTESITLMLENDIETIAVPYQHLTTHTYIQEINDKFRTTITQYSGMDPAARPRLPKLKYTPNLFRLVNLFNESILTQFISDDTQLIDIHLLIYCTAVVISEELNFKITDHTGTPRTRQNLAPAWQQRLEKDIEKLRADIGRLTQYINGCRSNKLVKRVEVIFRNNLTHTRHEKNNRKSEEFLDTLKQKLALKVHRLRRYKKAQQRKKDNTTFATNEKMFYRNLHKPQTDTIDKNNTNIPNLPTKEQLEEYWASIWEEPVQHNDKASWIAEEEVKWRGVDEMEFLEVAETDITHITARLHNWKSPGIDKIHNFWYKKLTSLHKSLAKNLTDIILGQQNTPEFIATGITYMLPKTTNSPQPSQYRPITCLPTIYKILTSAITKKISSHIERHNIIAEEQKGCRQGHMGCKEQLIIDSTIHKHATSKNRNLHCTYIDYKKAFDSVPHSWLIQILEIYRINPKIIDFIRNIMLQWKTTLQINYNHNTVTTRQISIKKGIYQGDSLSPLWFCLALNPLSHLLQGCGAGYCLKHTTDETIISHLIYMDDIKLYTKTENDMKKLVDVTAEFSKDINMQFGLEKCKTLHIVSGKVRPGDYVVNDTDTISAMEQTDLYKYLGYAQLKGLDHTRIKNTLSNEYKRRVNAICKTQLSGKHLIKALNTFAIPVLTYSFGVIKWSKTDTEQLERTTRTTLTKHNNLHPKSAIERLTIKRQHGGRGLIDIQHLWRKQISRLKSFFHSKSRTSSIHKAIVINDLNYTPLNLSHQIETLNTTNDDPQQHKIEDWKRKVLHGRHPHDLEQSHINKLASNKWLKIGSLFPETEGFIIAIQDQIINTKNYRKYIIKDPTATNDKCRKCHSQPETIQHITGACTTLTQTDYTHRHNQVANVIHQKLALKHTLIHNTSTPYYNYKPEATLENTTHKLYYDRAILTDKTIHYNRPDIILQDKINKVTYLIDIAVPNTHNIQKTITEKISKYAELKDEVTRIWRQEKVYVVPIVLSPQQALYQIIFSIV

SEQ ID NO: 21397 - protein, 1179 aa, Eilema sororculum
MRWSKDVNTFIMRTYYTITKLETDMTTYRKQLYELFSQRYPTVIVTEQRVSDQRRTIVKNKLLTVDELNRLKEEVRVQEHSTNTITQSQNTIENNLQQPPPLDAQLLLHTQTQSYSYSHPMHIDTQTSHIFTQTSHTSTQTESMTLMIENDIETLPVTNQNHLAQAHIQKIQDNFNSTLLLYSGMDPSARPKLPKLRYNPNLFRLVNLFDEDILQQFVSSDTQLTDIHTLIYCTAVVISEELNFKITEHTRNTAPRHTIKPPWQQRLEHDIEKLRADCGRLTQYINNNRSNKVVKRVEAIFKTHNSHTRHENSNKKPEEFLDTLKQKLALKVHRLRRYKKAQQRKNDNTIFATNEKMFYRNLQKPQTDTLIENHTEIPTKENLETFWSNIWEEQAHHNDKANWIQEETAKWRSIEEMEFIEFTEQDIRNTTARLHNWKAPGIDKIHNFWYKKLTSLHKSIAKNLTDIVLGKQNIPEFIATGITYMLPKTKHTSQPSQYRPITCLPTIYKILTSVITDKINSHIGTHNIIAEEQKGCRRGHMGCKEQLIIDSTIHKHATTKNRNLHCTYIDYQKAFDSIPHSWLIQVLEIYKINPTIIDFLRNIMASWKTTLQLNNGLSTLITRQIQIRKGIYQGDSLSPMWFCLALNPLSHLLHQCQAGYNLKLNTEETLISHLIYMDDIKLYAKTEKQMKKLLDTTTEFSNDINMQFGLDKCKTVHIIKGKVKPGNYVVNDVDTIAAMEPTDLYKYLGYQQLKGLDHTMIKNTLKTEYQRRVSAVCKSQLSGKHLIKALNTFAIPILTYSFGVIKWSKTDIANLERTTRTTLTKHNNLHPKSATERLTIKRQNGGRGLLDIQNLWQKQITRLRTFFHTKSNTSNIHKAILLNDLNYTPLNLSDPENPHNTSNSDPQNQKIIDWKSKVLHGRHPHDLEQPHINTLASNKWLKVGNLFPETEGFIIAIQDQIINTKNYRKYIIKDPTITNDRCRRCYTQSETIQHITGACITLTQTDYTHRHNQVANIIHQKLALKYSLIQDTNTPYYKYTPQTILENNTHKIYYDRAILTDRTIHYNRPDIILQDKIKKVTYLIDIAVPNTHNLQKTIAEKISKYAELKEEVIRIWRQDNVFVVPLVLSTTGVIPNHLLHSLKLIDLPESLYINLQKAAILNTCRIVRKFMQLDENTPT

SEQ ID NO: 21398 - protein, 1309 aa, Hydraecia micacea
METRSKRKRIGPLPGGDRRGTLGADAECFSMRTVSGEELNRRAPTDKDATAEVIDDGDRLTNRTDTPVEPYSPSTVSYAPSRTSSPSIPSSPIPPSSPIASFNTVSSTPALNVAREVSTFLPASTKAGKTRVRMRWSKEVNLFIMRTYLYITKLETDMTTYRQQLHERFSRQYPEISVSEQRISDQRRTIVRNKLLSQVELDQLKEEVSTQLQQESENYADTNTIILTQNTNINILQEQPQSFTQLHPNSQSLTYNQSQAYTQTTHTSTQTESLTLTLENDIETLVDADQNLATDTYIQEIQDKFRTTITQYSGMDPAVRPKLPKLKYTRNLFRLVNLFNKNILVQFISDDTQLIDIHLLIYCTAVVISKELNFKITDHTVTTRTNRIVKPAWQQRLEKDVEKLRADCGRLTQYINGIRSNKVVKRVETIFKNYSNHTRHESNNRKPEEFLDTLKQKLALKVHRLRRYMKAQQRKNDNATFAMNEKAFYRNIQKTHSDTTIENNTDAPSKEQLESYWSSIWEEQVQHNDKASWIAEEEAKWRAIDEMDFAEVAESDITHITARLHNWKSPGVDKIHNFWYKKLTSLHKSIAKNLTDIILGQQNTPEFIATGITYMLPKTKSSSQPSQYRPITCLPTIYKILTSAITKKISSHIENHNIIAEEQKGCRQGHMGCKEQLIIDSTIHKHATSKNRNLHCTYIDYKKAFDSVPHSWLIQILEIYRINPKIINFMRHIMLQWKTTLQINSNHSTVTTRQISIKKGIYQGDSLSPLWFCLALNPLSHLLQACRAGYCLKHNTEETTISHLIYMDDIKLYGKTEKDMKKLVEITAEFSKDINMQFGLDKCKTLHIIRGKVRPGDYAVNDTDTITAMEPSDLYKYLGYTQLKGLDHIRIKNTLTTEYKRRLNAVCKTQLSGKHLIKALNTFAIPVLTYSFGVIKWTKTDTEKLERTTRTTLTKHNNLHPKSAIERLTIKRQNGGRGLIDIQHLCRKQVSCLKTFFHTKSRTSNIHKAIVINDLNYTPLNLSDQIETQNTTNDDPQKQKIEEWKKKVLHGRHPHDLEQSHINQLASNKWLKIGNLFPETEGFIIAIQDQIINTKNYRKFIIKDPTITNDKCRKCHIQSETIQHITGACTTLTQTDYTHRHNQVANIIHQKLALKHSLIQNSCTPYYKYTPQTILENDTHKMYYDRAILTDRTIHYNRPDITLQDKIRKITYLIDIAVPNTHNLQKTISEKISKYAELKEEVTRIWRQEKVYVIPIVLSTTGVIPNHLLRSLKLIDLEESVYINLQKAAILNTCRIVRKFMQLEEENTP

SEQ ID NO: 21399 - protein, 1312 aa, Noctua pronuba
METRSKKKRIGPLPGGDRRGTPGADAGCLSMRTVSGEELSRRAPTDKDTTAEIIDDGDRLTDRTDTPVEPYSPSTVSYTPSRRSSPSIPSSPTISSPPIISLSTVSPIPTLNAAREVSTFLPASTKAGKARVRMKWSKEVNTFIMRTYLYITKLETDMTTYRQQLHELFTRRYPEITVSEQRISDQRRTIVRNKLLSLEEMDRIKVDVRTQLHLESVNDEDTNNIAVTENTIENTQQEQPQAYAQLETYTQSQPYYQSQTYSQSTHTSTQTENVTIMLENDIEVLANIDQNPPTDTRVQEIHDKFKTALTQYSGMDPAARPKLPKLRYTPKLVQLVNCFNQNILTQYISEETQLIDVHTLIYCTALVISEELNFKITEYTGNTRQSNVNKPAWQQRLEKDIEKLRADCGRLTQYINNNRSNKVVKRVEVIFKNMAVHTRHENHNRRPEEFLDTLKQILALKVHRLRRYKKAQERKNDNTLFATNEKNFYRKLQKPQTDTDTPTTENHTNNIELPTTEQLETFWAGIWEEQVHHKETSEWIQAEKTKWSSLEEMEFIELSESDITSITARLHNWKSPGIDKIHNYWYKKLESLHNILAKNLTEIILGKQNIPEFIATGITYMLPKTHYSPQPSQYRPITCLPTIYKILTSAITKKINKHVEHHNIIAEEQKGCRRGHMGCKEQLVIDSIIHKHAATKNRNLHCTYIDYKKAFDSIPHSWLIQILNIYKINPKIMEFLQNIMTRWKTTLQLNYRDNAVTTRQIAIKKGIYQGDSLSPLWFCLALNPLSHLLQRCQAGYCLKQTTEETTISHLIYMDDIKLYAKTEKEMKKLIDITTEFSKDINMQFGLDKCKTVHIIRGKIKPGDYAINTNDTIAAMEPTDFYKYLGYRQLKGLDHTTIKQTLNTEYKRRVVAVCKTQLSGKHLIKALNTYAIPILTYSFGVIKWSKTDIQQIERTTRTTLTKHNNLHPKSAIERLTIKRQNGGRGLIDIHHLWQKQITRLKTFFNSKSHTSNIHKAIVMNDNRYTPLNLNEQTDTQHTNNEDPHKQKLEDWKKKVLHGRHPHDLEQPHIDTLASNKWLKIGSLFPETEGFIIAIQDQIINTKNYRKFIIKDPTMTNDKCRKCHSQPETIQHITGACTTLTQTDYTHRHNQLANVIHQNLALKHKLIQDSNTPYYKYVPQPVVENTTHKLFYDRGVLTDRTIHYNRPDIILQDKVNKVTYLIDIAVPNTHNLQKTIGDKISKYAELKEEVTRIWRQEKVYVVPIVVSTTGVIPNHLHHSLKLIDLKDPIYITLQKAAILNTCRIVRKFMQIDEN

SEQ ID NO: 21400 - protein, 1316 aa, Ochropleura plecta
METRSKNKRIGPLPGGDRRGAPGADAGCHSMRTVSGEELNRRAPTDKDTTAEIIDDGDRLTDRTDTPVEPYSPSTVSYTPSRPSSPSISSSPTLPTHPIITLNTVSPTPTLNAARGVSTFLPASTKAGKARIRMRWSKEVNLFIMRTYFYITKLETDMTTYRKQLHELFTQQYPEITVSEQRISDQRRAIVRNKLLSQALIDQLKEEIRVQLQSDDNTSPLLEGLTDIAQQPQTQLNTQLQPNIQSQLYNQSQANTQTSHTSTQTEYITFTLENDIETLVVENHNPTTDTYIQEIHDKFRTTLSQYSGMDPAIRPKLPKLRYSPNLFRLVNLFNENILNQFISDETQLIDIHTLIYCTAVVISEELNFKITQNTGNPRPKQNIKPAWQQRLEKDIEQLRADIGRLTQYINNNRSSKVVRRVEAIFRTHLVHTRHENNNRKPEEFLDTIKQKLALKVHRLRRYKKAQQRKNDNAIFATNEKIFYRNLNKPNTDTHYDTNTDTPTQPTKEQLETYWASIWEQQARHNDEAAWITEEETKWKAIDEMEFVEVTEADITHITGRLHNWKSPGIDKVHNFWFKKLTSLYKPIARNLTQIILGQQNAPEFMATGITYMLPKTKNSPEPSQYRPITCLPTIYKILTSAITTKINTHIEQHNIMAEEQKGCRRGHMGCKEQLIIDSTIHKHATTKNRNLHCTYIDYKKAFDSVPHSWLIQILKIYRINAKIIDFLSNIMSQWKTTLQINCNQNSIITRQILIKKGIYQGDSLSPLWFCLALNPLSHLLQRCQAGYRLKHTTEQTTISHLIYMDDIKLYAQTEKDMKKLVEVTADFSQDINMQFGLDKCKTLHIIRGKIRPGNYVVNNTDTITAMEPTDLYKYLGYTQLKGLDHVRIKETLTAEYKRRLNVVCKTQLSGKNLIKALNTFAIPILTYSFGVIKWTKTDTEQLERTTRTTLTKHNNLHPKSAIERLTIKRQNGGRGLIDIQHLWRKQVIGLRTFFHTKSQTSNIHKAIAQNDHNYTPLNLNEQLDTSHNTNEDPQTQKIEDWKKKVLHGRHPYDLEQTHVNKVASNKWLKIGNLFPETEGFIIAIQDQIINTKNYRKFIIKDPSVTNDKCRKCHTQPETIQHITGACTTLTQTDYTHRHNQVANVIHQRLAVQYTLIQDTNTPYYNYTPQATLENDTHKLYYDRAILTDRTIHYNRPDIILQDKINKITYLIDIAVPNTHNIQKTITEKISKYAELKEEVTRIWRQEKVYVVPIVLSTTGVIPNHLLHSLKLLSLKETLYITLQKAAILNTCRIVRKFMQIEENEIGPHHNTPHTST

SEQ ID NO: 21401 - protein, 1316 aa, Mimas tiliae
METRSKKKLRGPLPGGDRRGTPGADAGCYSIRTVSGKELNRRTPAGSPESVTADIDLPDRLTDSRTDSPIEPYSPSTVSYILSTDSSPSIPRSPPSNSYRDPSIPALDVAREVTAFLPASTKAGKPRVRMSWSKDVNLFIMRTYYYITKLEMDMTIYRKQLHERFSRQYPDIKVTEQRVSDQRRAIERNKLLSQDTLDQLKEEVRKQLENEINNLDDGDDINLIDRDQNHLQPLSQLCTTHSNAQSIPIDPTSRVQHTHNLSYSQITQTSQISTQTESVTLTVENDIETLMEPNFITDTYTLELFEKFTTSLTLYSGLDPVARPKLPKLRYSPKLTKLTQIFNQNILTKFLSQDTKLIDIHTLIYCTAIVISAELGYKITESIRIQSRSRLNRKPPWQHRLETDIEKLRADCGRLTQYINKNRSKKVVKRVEEIFKSKTTHTRHENNNKTPEEFLDTLKQNLALKVHRLKRYKKAQQRKNDNILFTTNEKTFYRNLKKPRINAYNTENTQNIESPTKEQLETFWANLWEETIEHNNYADWIKEEENRWSTVGEMEFTEITESDIKCITNRLHNWKSPGVDKIHNFWFKKLTSLHKLIAKNITEIILNKQNIPHFIATGITYMLPKGEISSEPSQYRPITCLPTLYKIITAVISFKINTHVEHHNIIAEEQKGCRRGHMGCKEQLVIDSTIHKHATTKNRNLHCTYIDYKKAFDSIPHSWLIKVLEIYKINNSLIKFLQNIMTHWKTTLHLNDHNNSITTRPISIKKGIYQGDSLSPLWFCLALNPLSHILQRCRAGYHLKDNTQETIISHLIYMDDIKLYAKTEKDMKKLIDATSNFSKDINMQFGLDKCRTLHIIRGKIRPGDYTVNNNDIITAMEPADLYKYLGYKQLKGLDHTNIKHTLFTEYQRRINLLSKTQLSAKHLIKAFNTYAIPILTYSFGIIKWTKTNIDKIERITRTTLTKHNHHHPKSAIERLTIKRQEGGRGLIDIYNLWQKQLYNLKTFFYSKSHISNIHKAITHNDYNFTPLNLHEQTDQQNLLSSDPQKQKIEDWKKKVLHGRHPHDLEQPHIDAIASNKWLNIGNLFPETEGFMLAIQDQVINTKNYRKYIIKDPTVTNDKCRRCHTQSETIQHITGACTSLTQTDYTHRHNQVAYIIHQSLARKYTLIPNTNTPYYKYTPETILENSSYKLYFDRAILTDRTIHYNRPDITLQDKTNKITYLIDIAVPNTHNIHKTIIEKIYKYTELREEVARIWRQQKVFVVPIVLSTTGVIPKHLRTSLDLLNLNNSIYISLQKAAILNTCRIVRKFLQVSDSGMI

SEQ ID NO: 21402 - protein, 1317 aa, Noctua fimbriata
METRSKKKRIGPLPGGDRRGAPGADAGCLSMRTVSGEELNRRAPTDKDTTAEIIDDGDRLTDRTDTPVEPYSPSTVSYTLSRRSSPSIPSSPTPLSPPIITLNTISPTPTLNAARGVSTFLPASTKAGKTRVRMKWSKEVNLFIMRTYLHITKLETDMTTYRQQLHALFTREYPDITVSEQRISDQRRTIVRNKLLSQEVIDQLKEEVRTQLLHEETVNYTDTNNITQNLSEISHQEQPQSLSQSQIIYTQSQPYNQSQAYTQISHTSTQTESITLTLENDIETIVVPDQHLTTDIYIQEINDKFRTTITQYSGMDPAARPRLPKLKYTPNLFRLVNLFNESILTHFISDDTQLIDIHLLIYCTAVVISEELNFKITDHTRTTRTRQNVAPAWQQRLEKGIEKLRADIGRLTQYINGCRSNKLAKRVEVIFRNNGTHTRHELNNRKPEEFLDTLKQKLALKVHRLKRYKKAQQRKNDNAIFTTNEKIFYRNLHNPKNDRNYENNTNTPNLPSKEQLETYWASIWEEQKQHNDKASWIVDEEEKWRDINVMEFVEVTESDIIHITTRLHNWKAPGIDKIHNFWYKKLTTLHKSIAKNLTDIILGQQNIPEFITTGITYMLPKTKHTSEPSQYRPITCLPTIYKILTSAVTKKINSHIIHHNIIAEEQKGCRQGHMGCKEQLIIDSTIHKHATSKNRNLHCTYIDYKKAFDSVPHSWLIQILEIYRVNPKIIDFMRHVMLQWKTTLQINSNNNNVTTRQISIKKGIYQGDSLSPLWFCLALNPLSHLLQRCGAGYCLKHSTDETTISHLIYMDDIKLYAKSEKDMKKLVDITAEFSKDINMQFGLEKCKTLHIVRGKVRPGDNAVNESDSITALEPTDLYKYLGYTQLKGLDHVKIKNTLTAEYKKRVNAVCKTQLSGKHLIKALNTFAIPVLTYSFGVIKWTKTDTEQLQRTTRTTLTKHNNLHPKSAIERLTIKREHGGRGLIDIQHLWRKQVSRLKLFFHTKSRTSNIHKAIVTNDLNYTPLNLSDQIETQNTTNDDQQIQKIEDWKRKVLHGRHPHDLEQSHINKLASNKWLKIGNLFPETEGFIIAIQDQIINTKNYRKYIIKDPTLTNDKCRKCHVHPETIQHITGACTTLTQTDYTHRHNQVANVIHQKLALKHTLIQNTNTPYYNYKPETTLENTTHKLYYDRAILTDRTIHYNRPDIILQDKLNKITYLIDIAVPNTHNIQKTITEKISKYAELKEEVTRIWRQEKVYVVPIVLSTTGVIPNHLIHSLKLLDLKETLYITLQKAAILNTCRIVRKFMQIEENEIGPHHNT

SEQ ID NO: 21403 - protein, 834 aa, Mesoligia furuncula
MFYRNLHKPKTNTNDDNNTVAPDQPTKEQLETYWSIIWEEQEQHNDKATWITEEEIKWRAIEEMEFVEITEADITHLTGRLHNWKSPGIDKIHNFWYKKLTSLHKPIAKNLTEIILGRQNIPDFIATGITYMLPKTINSPQPSQYRPITCLPTIYKILTSAITTKINSHIEHHNIMAEEQKGCRQGHMGCKEQLIIDSTIHKHATTKNRNLHCTYIDYKKAFDSVPHSWLIKTLEIYRINSKIIDFLRNIMPLWKTTLQINSNHNNVTTRQISIKKGIYQGDSLSPLWFCLALNPLSHLLQRCQVGYCLKHTAEQTTVSHLIYMDDIKLYAQTEKDMKKLVEVTAEFSLDINMQFGLDKCKTLHVIRGKIRPGDYVVNNTDTITAMEPTDLYKYLGYTQLKGLDHVRIKETLTAEYKRRLNTICKTQLSSKNLIKALNTFAIPILTYSFGVIKWTKTDTEQLERTTRTTLTKHNNLHPKSATERLTIKRQHGGRGLIDIQHLWQKQVFRLKTFFHSKSRTSNIHKAIVQNDFNYTPLNLSEQLDTPQITSDDPQIQKIENWKKKVLHGRHPHDLEQSHVNKVASNKFLKIGNLFPETEGFIIAIQDQIINTKNYRKFIIKDPSVINDKCRKCHSQPETIQHITGACTTLTQTDYTHRHNQVANIIHQKLGLKYTLIQNTNTPYYNYTPQTILENDTHKLYYDRAILTDRTIHYNRPDITLQDKINKVTYLIDIAVPNTHNIQKTISEKISKYAELKDEVTRIWRQQKVYVVPIVLSTTGVIPNYLLHCLKLLNLKETLYITLQKAAILNTCRIVRKFMQIDENEIGPHHNTSLT

SEQ ID NO: 21404 - protein, 1318 aa, Mesoligia furuncula
METRSKRKRIGPLPGGDRRGALGADAECLSMRTVSGEELNRRAPTDKDTTADIVDDGDRLMDRINTPVEPYSPSTVSYIPSRPSTPSIPSSPSIPSSPPITSSNSVQPNSTLDVMREVSTFLPASTKAGKTRVRMRWSKEVNLFIMRTYLYITKLETDLTTYRKQLHELFTRQYPEITVTEQRISDQRRIIVRNKLLSQDIINQLKEEVRTRLQGESENIAGTITTALTQNITAYNQQEQPCSQIEPIIQSQPYFQSQAYSETTHTSTQTESITIMLENEIETLADININQSTDTHIQEIHDKFKTALTQYSGMDPAARPRLPKLRYTPKLSQLVHLFNQNILQQYISEETHLIDIHTLIYCTALVISEELNFKITEYTGNPRQRNINKPAWQQRLEKDIEKLRADCGRLTQYINNNRSNKVVKRVDAIFKNMATHTRHENDNRKPEEFLDTLKQKLALKVHRLRRYKKAQERKHDNSLFATNEKNFYRNLQTAQTDTNTLTTENNIELPTAEQLETFWFGIWEEQVQHNNNSDWITVEETKWSSLEEMEFVELTESDITCVTARLHNWKSPGIDKIHNYWYKKLESLHKVLAKNLTQIILGKQNIPEFIATGITYMLPKAQYSPQPSQYRPITCLPTIYKILTSAITTKINKHIENHNIIAEEQKGCRRGHMGCKEQLVIDSIIHKHANTKHRNLHCTYIDYKKAFDSIPHSWLIQILQIYKINSKIIDFLQDIMARWRTTLQLNYRNNAITTRQISIKKGIYQGDSLSPLWFCLALNPLSDLLHRSQAGYAIKHTTEETIISHLIYMDDIKLYSKSEKEMKKLIDITTEFSKDINMQFGLDKCKTVHIIRGKIKPGDYPINNTDTITAMEPTDLYKYLGYRQLKGIDHSTIKYTLNSEYKRRVIAVCKTQLSGKHLIKALNTYAIPILTYSFGVIKWSKTDIQQIERTTRTILTKHNNLHPKSAIERLTIKRQCGGRGLIDVHRLWQKQIAKLRTFFHSKSHTSNIHKAVVMNDISYTPLNLHDQIDIQHTSNEDPHKQKIEDWKKKVLHGRHPHDLEQSHIDTIASNKWLKIGNLFPETEGFIIAIQDQIINTKNYRKFIIKDPTITNDKCRKCHSQPETIQHITGACTTLTQTDYTHRHNQVANVIHQKLALKYKLIQDTNTPYYKYVPQTVLESTTHKLYYDRAILTDKTVHYNRPDITLQDKVNKVTYLIDIAVPNTHNVQKTISEKISKYADLKEEVSRIWRQEKVYVVPIVVSTTGVIPNHLHHSLKQIDLNDSIYITLQKAAILNTCRIVRKFMQIDDNEITPHNINSS

SEQ ID NO: 21405 - protein, 1309 aa, Hemaris fuciformis
METRSKKKLRGPLPGGDRRGTPGADAGCYSMQTVSGEELSRRAPTGSPESITAANLTDRQTDSRSNSPSEPYSPSTKSYTPSICSSSSRSPPSLTNKIREPSIPALDAAREVNRPFLPMSTKAGKPRVRMSWSRDVNLFIMRTYYYITKLETDMTIYRKLLHEHFSQRYPDVIVSEQRLSDQRRAIVRNNLLPQDVLDQLKTDVRKQLEEESMINDDTEIICRNQSPLPHPHTSNSNTPHLSLIQIQPITQENQNQCSQITHTSTQTEIVILTLENDIDNMPEPNISTDIHIQTIQDKFTATLTLYSGLDPTLRPKLPKLKYTSKLTSLINIFNQSILNNCISKATTLLDIHTIIYCTAYVIAEELDFKINEQRVGRIKPGKNNKPPWQYRLEKDIEKLRADCGRLTQYINNNRSKKVIKKVEEIFKKYTTHTRHENNNKKPEEFLDTLKQKLAVKAQRLKRYKKAQERRKDNVLFAKNEKMFYRQLRNPHTNIKTNIHNENNISTPKKEALEAFWAKIWEEQIQHNDEANWIKEEENMWSEVDEMEFTEVTEADIKLITNRLHNWKSPGIDKIHNFWYKKLTSLHKAIAQNFTDIILRKQSFPHFLATGITYMLPKDKFSPDPSNYRPITCLPTIYKILTSVITSKINTHVENHNIIAEEQKGCRRGHMGCKEQLVIDSTIHKHASTKSRNLHCTYIDYKKAFDSIPHSWLIQILKIYKINSVIIEFLQNIMLNWKTTLHLYNVNDPIITRQLSIRKGIFQGDSLSPLWFCLALNPLSHILQRSRAGYHLKHNSEETNISHLIYMDDVKLYSKNEKDMNKLIEATLNFSKDINMHFSLDKCKTVHIIRGKIRPGDYTLNNSDLITAMEPTDLYKYLGYKQLKGIDHKNIKHTLSGEYRRRVNAICKTQLSAKNLIKALNTYAIPILTYSFGVIKWSKTNIEQIERLTRTTLTKHKYLHPKSAVERTTIKREAGGRGLIDIYNLWQKQIYNLKLFFREKSRTSNIHNAICQNDNNFTPLNLCEPPNPPNPNNIDRQQQKIEDWKKKVLHGRHPHDLEQPHIDKIGSNKWLKIGGLFPETEGFLIAIQDQVINTKNYRKFIIKDPTMINDKCRRCHTQPETIQHITGACICLTQTDYTHRHNQISNIIHQTLALKYNLIQSSKTPYYKYTPETILENALYKLYYDRAILTDRTIHYNRPDITLQDKRNKTTYLIDIAVPNTHNIQKTIAEKNNKYTDLKNEVIRIWKQEKVYVVPIVLSTTGVIPKHLHHSLKLLNLNKSLYITLQKAAILNTCRIVRKFMEIDETVSHS

SEQ ID NO: 21406 - protein, 1171 aa, Heliconius pardalinus
MRWSSEVNMFIMRTYYQITKLETDFTIYRQRLHEIFSQKFPYINVSQQRVSDQMRTIIRNKLLPQELLNQIKTEVKSQLELDEIEMENIDSNQTQNLLTLPNTPTTQYEVRQQTQNTCLTQATQTYTQTETSTCLLENEIETLILPTDVTEKYAQNLKEKLTTALNLFSGLDPTTRPNLPKLKYSQKLTELIKIFNSIILSNYNSEDTQLIDIHTLIYCTAVVIGEELGYKIIQKIDTEQRKKYKSKAPWQIRLEKSIQKLRADIGRLTQYISNNRSEKVVKRVMKIFRNTTLHTKHENDNKKVEEFLDTLKQKLALKSHRLKRYNKAQKRKDDNILFQTREKSFYRQLLKPDHICQDSNNESIPTETQLVTYWSNIWEQESKHNENAEWILEEINKYKTIDEMNFTEITEAEIFKITTKLHNWKSPGVDKVHNFWYKKLTIFHKAIAKNLTEIIFKKQNIPNFMATGVTYMIPKGKFSPDPAQYRPITCLSTIYKILTSVLTSKITSHIEKYNIVAEEQKGCRRGHMGCKEQLIIDSTIHKHATAKNRNLHCTYIDYKKAFDSIPHSWLVKILEIYKINPTVIEFLNSIMSQWKTTLQLNHNNHSVKTRQIFIKKGIYQGDSLSPLWFCLALNPLSSMLKNSQVGYNFNSRIQNSVISHLIYMDDLKLYAKTNKDMKKLIDITAEFSNDIQMQFGLDKCKTLHITKGKIQPGDYSINENNIITALESQDIYKYLGYNQLKGLDHTNTKQILTAEYKKRIHAICKTQLSGKHLIKAINTYAIPILTYSFGVVKWSKTDIEQLERLIRTILTKHNYLHPKSAIERLTIKRPCGGRGLININTLWQNQLNTLRKFFINKSNNSIIHKTIKDNDHNYTPLNLEEIVNAEISPKIDPQKEQIDNWKRKVLHGRHPHDLEQAHIDSIGSNMWLKVGNLFPETEGFIIAIQDQIINTKNYRKYIIKDTKITNDKCRRCHSQPETIQHITGACSNLTHSDYTHRHNQICNIIHQQLAHKYKFITNFDTPYYKYIPETILENSTHKIYYDRAVLTDRTIHFNRPDIILQNKIDKITYLIDIAVPNTHNLQKTIAEKINKYEELKEEVTRIWKQKTVYIVPIVLSTTGVIPKHLHHSLNILNLKRTTYITLQRAAILNTCRIVRKFLQIDEQSTNTPQVQ

SEQ ID NO: 21407 - protein, 1289 aa, Spodoptera exigua
METRSRRKRIGPLPGGDRRGTPGADAGCFSMRTVSGEELNRRALTDKDATAELSDDGDTQLYRSNSPQEPYSPSTISYTPSRTSSPSIPSSPVLHTDVPNPAMDVARGVNAFLPASTKAGKPRVRMRWSKEVNIFIMRTYFYITKLETDMTIYRKLLHELFCRQYPQVNVSEQRISDQRRIIIRNKLLSQDVIDQLKEEARQRLEIESENSNNSALIPQNEQTQSITPTQPLSMHSQPYNITQTTHSSTQTESITLTLENDIDTLVAVELAPITDENIQQIYDKFKMTLTLYSGMDPASRPRLPKLRYNRNLFRLVNLFNESVISQFVSNDSQLTDLHTIIYCTAVVISEELNFKIADDTGNRTPRTSIKPPWQRRLEKDIDTLRADCGRLTQYINNNRSHKVVKRVETIFKNVQIHTRHENNNSKPEEYLDTLKQKLALKVHRLKRYKKAQQRRNDNALFTTNEKLFYRKLNTTHTNTTNESNTIPSKEQLEAFWAGIWEEPVSHNDKATWIAEELTKWRSIEEMEFKEITETDIANVTARLHNWKSPGIDKIHNFWFKKLTILHKYIAKNLTEIILGKQRIPDFIATGITYMLPKAKHSRQPSQYRPITCLPTIYKILTSTITLKITSHIERHKIMAEEQKGCRRGHMGCKEQLIIDSTIHKQAISKNRNLHCTYIDYKKAFDSVPHSWLIQVLEIYKINKGIINFLRNIMPLWKTTLRVCTTANNVCTRQINIKKGIYQGDSLSPLWFCLALNPLSHLLQSCQAGYCLKHTSKETKISHLVYMDDIKLYAKSEKEMKHLIDITSAFSKDINMQFGLDKCKTLHIVRGKIRPGDYAVNGSDIITALEPSDVYKYLGYSQLKGFDHIKIKNTLTAEFKRRLNAICKSQLSGKHLIKAINTYAVPVLTYSFGIIKWTKTDTEQLERTTRTTLTKHNNLHPKSAIERLTIKRQNGGRGLIDICHLWQKQICNLKSFFYMKSQTSHIHKAIVANDHNYTPLNLNEPIGTENSNEIDKQKEKLEAWKSKVLHGRHPHDLEQAHVNTIASNKWLKIGNLFPETEGFMIAIQDQIINTKNYRKYIIKDPTVTDDKCRKCHNQPETIQHITGACATLTQTDYTHRHNQIVNIIHQKLALKHTLIQNTNIPYYKYTPETVLENTTHKLYYDRAILTDRTIHYNRPDITLQDKVHKITYVIDIAVPNTHNLQKTITEKITKYAELKDEISRIWKQNKVYVIPIVISTTGVIPNHLLHSLKLLDLRESLYITIQKAAILNTCRIVRKFMQIEDNTPIT

SEQ ID NO: 21408 - protein, 1288 aa, Iphiclides podalirius
METHLKRKRNGPLPGGDRRGTPGADAGCLSMRTVSGEELSRRTPTEKHITAEIIEDGDDMTHNRSTQSRPSSPHISLSPPNSILNTDPPISTLNVARDVSTFLPASTKAGKQRVRMKWSKDVNIFIMRAYLYITKLETDMTTYRQQLHELFTRQYPEITVTEQRIADQRRAIVRNKLLSQEEIEQLKVSVRTHLQKESENNASANTVTSSQNTPENILQLRSPSHTQLQRRSYNQSQAYAQTSHTSTQTESITLIIENDIETLAVADQNLVTDVYIQEIHDKLRTTLTHYSGMDPAARPKLPKLKYSPNLFRLVNLFNENILTEFISDGTQLIDIHKLIYCTAVVISEELNFKIIQHTGNTQPKHEFKPAWQQRLEKDIEKLRADCGRLTQYINNNRSTKVVKRVEAIFKNSFAHTRHENSNRKPEDFLDTLKQKLALKVHRLRRYKKAQQRRNDNAIFATNQKIFYRKLQTPHTDTRTEANTDAPTKEQLEIFWSSIWEDRVQHNDKAPWIAEEQAKWRSIEEMEFVEITESDITNITARLHNWKSPGIDKIHNFWYKKLISLHKQLAKNLTDIILGQQNIPEFIATGITYMLPKTKNAKQPSQYRPITCLPTIYKILTSSITKKINSHIENHNIIAEEQKGCRRGHMGCKEQLIIDSTIHKHATTKNRNLHCTYIDYQKAFDSIPHSWLIKILEIYKINSKIIDFLRNIMLRWKTTLQLNNHHNTFMTRHISIRKGIYQGDSLSPLWFCLALNPLSHLLHRCRAGYSLKHTTEETVISHLIYMDDIKLYSKTEKEMKKLIESTREFSRDINMQFGLDKCKTLHIVKGKIKPGNYSVNDTDIISAMEPTDLYKYLGYKQLKGLDHSAIKQTLNIEYRRRINALCKTQLSGKHLIKALNTFAIPILTYSFGVIKWSKTDIEQLERTTRTTLTKHNNLHPKSAIERLTIKRQDGGRGLIDIHHLWQKQMITLKTFFLTKSRTSDIHKAISLNDFNYTPLNLNEQISTPDINNQDPQKQKLENWKKKTLHGRHPYDLEQTHINRIASNKWLKIGSLFPETEGFIIAIQDQIINTKNYRKYIIKDPTVINDKCRRCHIQSETIQHITGACTTLTQTDYTHRHNQVANIIHQKLALKHKLIQNTNTPYYKYTPQTILENSTHKLYYDRAILTDRTIQYNRPDITLQDKIRKITYLIDVAVPNTHNLQKTIAEKVSKYTDLKEEVTRIWRQEKVFVIPIVLSTTGVIPNHLLRSLKLIDLEDSLFITLQKAAILNTCRIVRKFMQLDENTSST
